(19) United States
(12) Patent Application Publication
(10) Pub. No.: US 2025/0152746 A1
(43) Pub. Date: May 15, 2025

(54) BASE EDITING OF ANGPTL3 AND METHODS OF USING SAME FOR TREATMENT OF DISEASE

(71) Applicant: Verve Therapeutics, Inc., Boston, MA (US)

(72) Inventors: Alexandra Chadwick, Somerville, MA (US); Kallanthottathil G. Rajeev, Wayland, MA (US); Ellen Rohde, Ashland, MA (US); Christopher Cheng, North Reading, MA (US); Caroline Reiss, Somerville, MA (US)

(21) Appl. No.: 18/904,423

(22) Filed: Oct. 2, 2024

Related U.S. Application Data
(63) Continuation of application No. 17/918,092, filed on Oct. 10, 2022, now Pat. No. 12,115,230.
(60) Provisional application No. 63/007,803, filed on Apr. 9, 2020.
(60) Provisional application No. 63/007,797, filed on Apr. 9, 2020.
(60) Provisional application No. 63/136,087, filed on Jan. 11, 2021.
(60) Provisional application No. 63/045,032, filed on Jun. 26, 2020.
(60) Provisional application No. 63/045,033, filed on Jun. 26, 2020.

(51) Int. Cl. A61K 48/00; A61K 9/127; A61K 31/7105; A61K 38/46; C07K 14/515; C12N 9/22; C12N 15/11; C12N 15/113; C12N 15/90

(52) U.S. Cl. CPC A61K 48/0066; A61K 9/127; A61K 31/7105; A61K 38/465; C07K 14/515; C12N 9/22; C12N 15/11; C12N 15/113; C12N 15/907; C07K 2319/09; C07K 2319/80; C12N 2310/20; C12N 2310/315; C12N 2310/321; C12N 2310/331; C12N 2310/335; C12N 2310/344; C12N 2310/3521; C12N 2800/80

(57) ABSTRACT

Provided herein are compositions for gene modification or editing and methods of using same to treat or prevent certain conditions. Specific compositions and methods capable of safely and effectively editing gene targets expressed in the liver to durably lower LDL-C thereby treating a leading cause of cardiovascular disease are disclosed.

### CROSS REFERENCE TO RELATED APPLICATIONS

[0001] This application is a continuation of U.S. application Ser. No. 17/918,092, filed Oct. 10, 2022 which is a 371 U.S. National Stage of International Application No. PCT/US2021/026729, filed Apr. 9, 2021 which claims benefit under 35 U.S.C. § 119 from Provisional Application Ser. No. 63/007,803, filed Apr. 9, 2020; Provisional Application Ser. No. 63/007,797, filed Apr. 9, 2020; Provisional Application Ser. No. 63/136,087, filed Jan. 11, 2021; Provisional Application Ser. No. 63/045,032, filed Jun. 26, 2020; Provisional Application Ser. No. 63/045,033, filed Jun. 26, 2020, the disclosures of which are incorporated herein by reference in their entirety.

### SEQUENCE LISTING

[0002] The instant application contains a Sequence Listing which has been submitted electronically in XML format and is hereby incorporated by reference by its entirety. Said XML copy, created on Feb. 1, 2023, is named 53989-711_302_SL.xml and is 61,457,253 bytes in size.

### FIELD OF DISCLOSURE

[0003] Provided herein are compositions for gene modification or editing, and methods of using same that are capable of treating or preventing certain conditions, such as cardiovascular disease and conditions or diseases associated therewith such as diabetes.

### BACKGROUND

[0004] All publications, patents, and patent applications mentioned in this specification are herein incorporated by references to the same extent as if each individual publication, patent, or patent application was specifically and individually indicated to be incorporated by reference. It is not an admission that any publication or information specifically or implicitly referenced herein is prior art or necessarily relevant to the claimed subject matter. To the extent publications or patents or patent applications incorporated by reference contradict or are inconsistent with the disclosure contained in the specification, such cited or incorporated references should be considered supplementary to this disclosure with the understanding that the specification is intended to supersede and/or take precedence over any irreconcilable inconsistencies or contradictory material.

### SUMMARY

[0005] The inventive subject matter disclosed in this application is directed to compositions capable of editing a polynucleotide or target gene and methods of use of those compositions. The compositions and the constituent components thereof, individually and in combination, are considered separate aspects of the inventive subject matter, which may be defined and claimed by their respective physical and/or functional attributes described herein in any combination without limitation. The breadth, specificity, and variation of the inventive subject matter are further illustrated by specific aspects summarized here.

[0006] One significant aspect of the inventive subject matter described herein is directed to the treatment of cardiovascular disease (CVD), which is the leading cause of death worldwide, responsible for nearly one in three deaths according to the World Health Organization. CVD is also a leading contributor to reductions in life expectancy and is one of the most expensive health conditions to care for. According to the Centers for Disease Control and Prevention (CDC), CVD is a significant economic burden, costing the U.S. healthcare system more than $320 billion per year in annual costs and lost productivity. CVD collectively refers to diseases of the heart and blood vessels, which are diagnosed as either atherosclerotic cardiovascular disease (ASCVD) or cardiomyopathy, among others. ASCVD is a large subset of CVD for which cholesterol drives the development of atherosclerotic plaque, a mixture of cholesterol, cells and cellular debris in the wall of a blood vessel that results in the hardening of the arteries. The current cornerstone of the treatment and prevention of ASCVD is to lower cumulative exposure to blood lipids aiming to maintain low-density lipoprotein cholesterol (LDL-C, commonly known as “bad” cholesterol) and/or triglycerides as low as possible for as long as possible. There is significant evidence, for example, demonstrating that individuals who maintain LDL-C at sufficiently low levels over a sufficiently long period of time are substantially less likely to develop ASCVD. The relationship between the lowering of LDL-C and reduction in ASCVD is amongst the best understood of all relationships in medicine. It has been shown that lowering LDL-C by 39 mg/dL for five years in a patient with established ASCVD reduces ASCVD risk by 21%, whereas that same 39 mg/dL degree of LDL-C reduction over a lifetime reduces risk of a first ASCVD event by 88%. The current standard of care is a chronic care model that typically requires numerous daily pills and/or intermittent injections and often insufficiently controls cumulative exposure to LDL-C. Despite the availability of such chronic care therapies, cumulative exposure to LDL-C is often insufficiently controlled in many patients with ASCVD, and a large fraction of individuals with established ASCVD have LDL-C levels above the recommend goal. Higher cumulative LDL-C exposure leads to accelerated cholesterol plaque build-up in the heart or neck arteries and the rupture of which can result in heart attack, cardiac death, stroke and the need for invasive medical procedures, such as intracoronary stenting and coronary artery bypass surgery.

[0007] One aspect, disclosed herein, are compositions and methods that are capable of safely and effectively editing gene targets expressed in the liver to durably lower LDL-C and/or triglycerides thereby treating CVD such as ASCVD.

[0008] Another aspect, disclosed herein, is the efficacy and safety of the gene editing compositions described herein when administered as a single-course or dose (once-and-done) therapy, in repeat or successive doses, and combination gene editing therapy doses. The efficacy and safety of the compositions described herein are shown in in vitro and in vivo studies described herein involving various cell and animal experiments including mouse and non-human primate experiments, and the results or performance of the compositions disclosed herein represented in those studies each constitute aspects of the invention.

[0009] Another aspect of the composition and methods disclosed herein relates to the location where the edit in the gene is made, including for example compositions and methods directed at editing a gene in the splice site.

[0010] Another aspect of the compositions and methods disclosed herein are the constituent guide RNAs (gRNAs) and base editors that comprise the compositions that are capable of precisely editing a gene at a single base pair without imparting double-stranded breaks in the target gene. The compositions and method of use of those gRNAs and base editors including nucleotide or mRNA sequences that express and encode the base editor constitute yet another aspect.

[0011] Another aspect, disclosed herein, are the lipid nanoparticle (LNPs) formulations that encapsulate the gRNA and base editor drug substances, the selection of an LNP, and the relative ratios between the various components of the drug substance compositions alone and as part of the LNP.

[0012] Another aspect, disclosed herein, is directed at the dosing of gene editing compositions, such as those described herein, and the impact of dosing and repeat dosing on efficacy and safety profile indicia.

[0013] Another aspect, disclosed herein, are that the compositions and methods of use include implementations that are designed to target or edit specific genes such PCSK9, ANGPTL3, APOC3, and/or Lp(a) and/or have an impact on the protein levels of proteins expressed by those genes.

[0014] In one aspect, provided herein is a composition for editing a gene target comprising: (i) a base editor fusion protein comprising a programmable DNA binding domain and a deaminase, or a mRNA encoding the same, (ii) a guide RNA comprising a tracr sequence that serves as a binding scaffold for the base editor fusion protein, and a spacer sequence that corresponds to a protospacer on a ANGPTL3 gene, wherein the guide RNA directs the base editor fusion protein to effect a nucleobase alteration in the ANGPTL3 gene in vivo when administered to a mammalian subject, wherein when the guide RNA and the mRNA is administered at a total amount of at least 0.5 mg/kg, the base alteration occurs in at least 35% of whole liver cells in the mammalian subject as measured by next generation sequencing or Sanger sequencing. In some embodiments, the mammalian subject is a cynomolgus monkey, wherein when the guide RNA and the mRNA is administered at a total amount of about 1 mg/kg, the base alteration occurs in at least 35% of whole liver cells in the cynomolgus monkey as measured by next generation sequencing or Sanger sequencing. In some embodiments, the mammalian subject is a cynomolgus monkey, wherein when the guide RNA and the mRNA is administered at a total amount of about 3 mg/kg, the base alteration occurs in at least 50% of whole liver cells in the cynomolgus monkey as measured by next generation sequencing or Sanger sequencing. In some embodiments, the nucleobase alteration results in a reduction of at least 20% in blood triglyceride level in the cynomolgus monkey as compared to prior to the administration. In some embodiments, the nucleobase alteration results in a reduction of at least 50% in blood triglyceride level in the cynomolgus monkey as compared to prior to the administration. In some embodiments, the protospacer is located in a splice site. In some embodiments, the protospacer complementary sequence is in the antisense strand of the ANGPTL3 gene. In some embodiments, the protospacer complementary sequence is in the sense strand of the ANGPTL3 gene. In some embodiments, the base alteration happens outside of the protospacer on the ANGPTL3 gene (off-target sites), wherein the editing percentages of off-target sites set forth in Table 14 are below or equal to the editing percentages set forth in Table 14, respectively. In some embodiments, the deaminase is an adenine deaminase and wherein the nucleobase alteration is a A·T to G·C alteration. In some embodiments, the programmable DNA binding domain comprises a nuclease inactive Cas9 or a Cas9 nickase. In some embodiments, the nucleobase alteration is at a splice site of the ANGPTL3 gene. In some embodiments, the nucleobase alteration is at a splice donor site of the ANGPTL3 gene. In some embodiments, the splice donor site is at 5′ end of ANGPTL3 intron 6 as referenced in SEQ ID NO: 7. In some embodiments, the nucleobase alteration is at a splice acceptor site of the ANGPTL3 gene. In some embodiments, the nucleobase alteration results in a frame shift, a premature stop codon, an insertion or deletion in a transcript encoded by the ANGPTL3 gene. In some embodiments, the nucleobase alteration results in an aberrant transcript encoded by the ANGPTL3 gene. In some embodiments, the guide RNA is chemically modified. In some embodiments, the tracr sequence of the guide RNA is chemically modified following the scheme depicted in FIG. 7. In some embodiments, the spacer sequence comprises an ANGPTL3 ABE guide RNA spacer sequence set forth in Table 1. In some embodiments, the guide RNA comprises the ANGPTL3 ABE guide RNA sequence of GA067, GA091, GA098, GA099, GA100, GA101, GA102, GA103, GA347, GA441, GA442, GA472, GA473, GA474, GA475, GA476, GA517 or GA547 as set forth in Table 1. In some embodiments, the protospacer sequence comprises an ANGPTL3 ABE protospacer sequence set forth in Table 1. In some embodiments, the protospacer comprises the sequence 5′-AAGATACCTGAATAACTCTC-3′ (SEQ ID No: 14), 5′-AAGATACCTGAATAACCCTC-3′ (SEQ ID No: 15), 5′-GATACCTGAATAACTCTC-3′ (SEQ ID No: 1606), 5′-AGATACCTGAATAACCCTC-3′ (SEQ ID No: 248), or 5′-GATACCTGAATAACCCTC-3′ (SEQ ID No: 249). In some embodiments, the base editor fusion protein comprises an amino acid sequence of SEQ ID No: 2137. In some embodiments, the GC % content of the mRNA sequence is greater than 50%. In some embodiments, the GC % content of the mRNA sequence is greater than 56%. In some embodiments, the GC % content of the mRNA sequence is greater than or equal to 63%. In some embodiments, the mRNA comprises an adenine tTNA deaminase (TadA) region, a Cas9 region and a nuclear localization sequence (NLS) region. In some embodiments, the mRNA further comprises a first linker region which connects the TadA region and the Cas9 region, and a second linker region which connects the Cas9 region and the NLS region. In some embodiments, the GC % content of the TadA region is greater than 60%. In some embodiments, the GC % content of the TadA region is greater than or equal to 70%. In some embodiments, the GC % content of the Cas9 region is greater than 56%. In some embodiments, the GC % content of the Cas9 region is greater than or equal to 62%. In some embodiments, the GC % content of the NLS region is greater than 54%. In some embodiments, the GC % content of the NLS region is greater than or equal to 63%. In some embodiments, the GC % content of the first linker region is greater than 65%. In some embodiments, the GC % content of the first linker region is greater than or equal to 79%. In some embodiments, the GC % content of the second linker region is greater than 67%. In some embodiments, the GC % content of the second linker region is greater than or equal to 83%. In some embodiments, the GC % content of the TadA region is greater than 60%, the GC % content of the Cas9 region is greater than 56%, the GC % content of the NLS region is greater than 54%, the GC % content of the first linker region is greater than 65%, and the GC % content of the second linker region is greater than 67%. In some embodiments, the mRNA comprises a mRNA sequence selected from Table 23. In some embodiments, the mRNA comprises a mRNA sequence of SEQ ID No: 2136. In some embodiments, the mRNA comprises a poly A tail. In some embodiments, the composition further comprises a lipid nanoparticle (LNP) enclosing (i). In some embodiments, the LNP further encloses (ii). In some embodiments, the composition further comprises a second LNP enclosing (ii). In some embodiments, the ratio of the guide RNA and the mRNA encoding the base editor fusion protein is about 1:10 to about 10:1 by weight. In some embodiments, the ratio of the guide RNA and the mRNA encoding the base editor fusion protein is about 1:1, 1.5:1, 2:1, 3:1, 4:1, 1:1.5, 1:2, 1:3, or 1:4 by weight. In some embodiments, the ratio of the guide RNA and the mRNA encoding the base editor fusion protein is about 1:1 by weight.

[0015] In another aspect, provided herein is a pharmaceutical composition comprising the composition as provided herein and a pharmaceutically acceptable carrier or excipient.

[0016] In another aspect, provided herein is a method for treating or preventing a condition in a subject in need thereof, the method comprising administering to the subject a therapeutically effective amount of the composition as provided herein. In some embodiments, the administration is via intravenous infusion. In some embodiments, the method comprises sequential administration of a LNP enclosing (i) and a LNP enclosing (ii). In some embodiments, the method comprises concurrent administration of the LNP enclosing (i) and the LNP enclosing (ii). In some embodiments, the method comprises administering a single dose of the LNP enclosing (ii) followed by staggered doses of the LNP enclosing (i) over an interval of 1 day. In some embodiments, the method comprises administering a single dose of the LNP enclosing (ii) followed by staggered doses of the LNP enclosing (i) over an interval of 2 days. In some embodiments, the method comprises administering a single dose of the LNP enclosing (ii) followed by staggered doses of the LNP enclosing (i) over an interval of 3 days. In some embodiments, the method comprises administering a single dose of the LNP enclosing (ii) followed by staggered doses of the LNP enclosing (i) over an interval of 4 days. In some embodiments, the method comprises administering a single dose of the LNP enclosing (ii) followed by staggered doses of the LNP enclosing (i) over an interval of 5 days. In some embodiments, the method comprises administering a single dose of the LNP enclosing (ii) followed by staggered doses of the LNP enclosing (i) over an interval of 6 days. In some embodiments, the method comprises administering a single dose of the LNP enclosing (ii) followed by staggered doses of the LNP enclosing (i) over an interval of 7 days. In some embodiments, the method comprises administering a single dose of the LNP enclosing (i) and (ii). In some embodiments, the single dose of the LNP is at about 0.3 to about 3 mg/kg. In some embodiments, the method comprises administering a treatment course of one or more treatments to the subject, wherein each one of the one or more treatment comprises one or more of the single doses of the LNP. In some embodiments, the method comprises administering a treatment course of two to ten treatments. In some embodiments, the method comprises administering a treatment course of two to five treatments. In some embodiments, the method comprises administering a treatment course of two treatments. In some embodiments, the method comprises administering a treatment course of three treatments. In some embodiments, the method comprises administering a treatment course of four treatments. In some embodiments, the method comprises administering a treatment course of five treatments. In some embodiments, the method comprises the condition is an atherosclerotic cardiovascular disease. In some embodiments, the condition is an atherosclerotic vascular disease. In some embodiments, the subject is a human.

[0017] In another aspect, provided herein is a composition for editing a gene target comprising: (i) a base editor fusion protein comprising a programmable DNA binding domain and a deaminase, or a mRNA encoding the same, (ii) a guide RNA comprising a tracr sequence that serves as a binding scaffold for the base editor fusion protein, and a spacer sequence that corresponds to a protospacer on a ANGPTL3 gene, wherein the guide RNA directs the base editor fusion protein to effect a nucleobase alteration in the ANGPTL3 gene in vivo when administered to a mammalian subject, and wherein the guide RNA comprises the ANGPTL3 ABE guide RNA sequences as set forth in Table 1. In another aspect, provided herein is a composition for editing a gene target comprising: (i) a base editor fusion protein comprising a programmable DNA binding domain and a deaminase, or a mRNA encoding the same, (ii) a guide RNA comprising a tracr sequence that serves as a binding scaffold for the base editor fusion protein, and a spacer sequence that corresponds to a protospacer on a ANGPTL3 gene, wherein the guide RNA directs the base editor fusion protein to effect a nucleobase alteration in the ANGPTL3 gene in vivo when administered to a mammalian subject, and wherein the mRNA comprises a sequence selected from Table 23.

[0018] In another aspect, provided herein is a method for treating or preventing an atherosclerotic cardiovascular disease in a subject in need thereof, the method comprising administering to the subject a therapeutically effective amount of a first composition, comprising (i) a base editor fusion protein comprising a programmable DNA binding domain and a deaminase, or a mRNA encoding the same, (ii) a guide RNA comprising a tracr sequence that serves as a binding scaffold for the base editor fusion protein, and a spacer sequence that corresponds to a protospacer on a PCSK9 gene, wherein the guide RNA directs the base editor fusion protein to effect a nucleobase alteration in the PCSK9 gene in vivo when administered to a mammalian subject, wherein when the guide RNA and the mRNA is administered at a total amount of at least 0.5 mg/kg, the base alteration occurs in at least 35% of whole liver cells in the mammalian subject as measured by next generation sequencing or Sanger sequencing; and a second composition, comprising (i) a base editor fusion protein comprising a programmable DNA binding domain and a deaminase, or a mRNA encoding the same, (ii) a guide RNA comprising a tracr sequence that serves as a binding scaffold for the base editor fusion protein, and a spacer sequence that corresponds to a protospacer on a ANGPTL3 gene, wherein the guide RNA directs the base editor fusion protein to effect a nucleobase alteration in the ANGPTL3 gene in vivo when administered to a mammalian subject, wherein when the guide RNA and the mRNA is administered at a total amount of at least 1 mg/kg, the base alteration occurs in at least 35% of whole liver cells in the mammalian subject as measured by next generation sequencing or Sanger sequencing. In some embodiments, the method comprises sequential administration of the first composition and the second composition. In some embodiments, the method comprises administering one or more doses of the first composition followed by one or more dose of the second composition. In some embodiments, the method comprises administering one or more doses of the second composition followed by one or more dose of the first composition. In some embodiments, the method comprises concurrent administration of the first composition and the second composition. In some embodiments, the method comprises one or more doses of the first composition and the second composition.

[0019] In another aspect, provided herein is a composition for editing a gene target comprising: (i) a base editor fusion protein comprising a programmable DNA binding domain and a deaminase, or a mRNA encoding the same, (ii) a guide RNA comprising a tracr sequence that serves as a binding scaffold for the base editor fusion protein, and a spacer sequence that corresponds to a protospacer on a ANGPTL3 gene, wherein the guide RNA directs the base editor fusion protein to effect a nucleobase alteration in the ANGPTL3 gene in vitro, wherein when the guide RNA and the mRNA is administered at a total amount of at least 0.5 mg/kg, the base alteration occurs in at least 35% of whole liver cells in the mammalian subject as measured by next generation sequencing or Sanger sequencing. In some embodiments, when the guide RNA and the mRNA is administered at a total amount of at least 1 mg/kg, the base alteration occurs in at least 40% of whole liver cells in the mammalian subject as measured by next generation sequencing or Sanger sequencing. In some embodiments, when the guide RNA and the mRNA is administered at a total amount of at least 1.5 mg/kg, the base alteration occurs in at least 45% of whole liver cells in the mammalian subject as measured by next generation sequencing or Sanger sequencing. In some embodiments, when the guide RNA and the mRNA is administered at a total amount of at least 2 mg/kg, the base alteration occurs in at least 50% of whole liver cells in the mammalian subject as measured by next generation sequencing or Sanger sequencing. In some embodiments, when the guide RNA and the mRNA is administered at a total amount of at least 2.5 mg/kg, the base alteration occurs in at least 55% of whole liver cells in the mammalian subject as measured by next generation sequencing or Sanger sequencing. In some embodiments, when the guide RNA and the mRNA is administered at a total amount of at least 3 mg/kg, the base alteration occurs in at least 60% of whole liver cells in the mammalian subject as measured by next generation sequencing or Sanger sequencing.

[0020] In another aspect, provided herein is a composition for editing an ANGPTL3 gene comprising: (a) a mRNA encoding an adenine base editor protein having an editing window, and (b) a guide RNA comprising a tracr sequence that serves as a binding scaffold for the base editor protein and a spacer sequence that serves to guide the base editor protein to a protospacer sequence on the ANGPTL3 gene, wherein the spacer sequence is complimentary, at least in part, to a splice site or an exon region of the ANGPTL3 gene. In some embodiments, when the base editor protein is operatively bound to the guide RNA and the guide RNA is hybridized with the complementary strand to the protospacer sequence on the ANGPTL3 gene, the editing window encompasses the splice site of the ANGPTL3 gene. In some embodiments, when the base editor protein is operatively bound to the guide RNA and the guide RNA is hybridized with the complementary strand to the protospacer sequence on the ANGPTL3 gene, the editing window encompasses a region of an intron of the ANGPTL3 gene. In some embodiments, when the base editor protein is operatively bound to the guide RNA and the guide RNA is hybridized with the complementary strand to the protospacer sequence on the ANGPTL3 gene, the editing window encompasses a region of intron 1, intron 3 or intron 4 of the ANGPTL3 gene. In some embodiments, when the base editor protein is operatively bound to the guide RNA and the guide RNA is hybridized with the complementary strand to the protospacer sequence on the ANGPTL3 gene, the editing window encompasses a region of intron 1 of the ANGPTL3 gene. In some embodiments, the spacer sequence has a 80-100% nucleotide sequence identity to a spacer sequence selected from the group of guide RNA sequences identified as GA067, GA100 and GA574. In some embodiments, the tracr sequence has a 80-100% nucleotide sequence identity to a tracr sequence selected from the group of guide RNA sequences identified as GA067, GA091, GA098, GA099, GA100, GA101, GA102, GA103, GA347, GA441, GA442, GA472, GA473, GA474, GA475, GA476, GA517 and GA547. In some embodiments, the mRNA has an 80-100% sequence identity to the mRNA sequences identified as MA002, MA004, MA040, MA0041, or MA045. In some embodiments, the mRNA has one or more of the GC nucleotide region percentages set forth in the following table:

| | Average GC |
|---|---|
| Nucleotide region | Nucleotide Content |
| 27-213 | 67-73% |
| 389-661 | 67-71% |
| 735-829 | 63-74% |
| 4207-4286 | 67-70% |
| 4537-4569 | 65-73% |
| 4683-4741 | 62-67% |

[0021] In some embodiments, the mRNA has one or more of the GC nucleotide region percentages set forth in the following table:

| | Average GC |
|---|---|
| Nucleotide region | Nucleotide Content |
| 27-213 | At least 73% |
| 389-661 | At least 71% |
| 735-829 | At least 74% |
| 4207-4286 | At least 70% |
| 4537-4569 | At least 73% |
| 4683-4741 | At least 67% |

[0022] In some embodiments, the mRNA and gRNA are encapsulated within a lipid nanoparticle. In some embodiments, the mRNA and gRNA are encapsulated within a lipid nanoparticle having the following:
[0023] LNP composition (mol %):
[0024] 40-65% iLipid
[0025] 2-20% DSPC
[0026] 1-5% PEG
[0027] Remaining mol % balance is cholesterol;
[0028] LNP Particle size: 55-120 nm Z average hydrodynamic diameter; and
[0029] Polydispersity index of <0.2 as determined by dynamic light scattering.

[0030] In some embodiments, the mRNA and gRNA are encapsulated within the lipid nanoparticle having an LNP particle size between 50-70 nm Z average hydrodynamic diameter. In some embodiments, the composition when administered to a group of cynomolgus monkeys via intravenous infusion at a dose of approximately 0.5 mg of the guide RNA and mRNA combined total weight per kg of the cynomolgus monkey weight is capable of inducing adenine base editing at the ANGPTL3 target splice site in the liver of the cynomolgus monkeys with an average editing percentage of greater than 40 percent. In some embodiments, the composition when administered to a group of cynomolgus monkeys via intravenous infusion at a dose of approximately 0.5 mg of the guide RNA and mRNA combined total weight per kg of the cynomolgus monkey weight is capable of inducing adenine base editing at the ANGPTL3 target splice site in the liver of the cynomolgus monkeys with an average editing percentage of greater than 50 percent. In some embodiments, the composition when administered to a group of cynomolgus monkeys via intravenous infusion at a dose of approximately 0.5 mg of the guide RNA and mRNA combined total weight per kg of the cynomolgus monkey weight is capable of inducing adenine base editing at the ANGPTL3 target splice site in the liver of the cynomolgus monkeys with an average editing percentage of greater than 30 percent. In some embodiments, the composition when administered to a group of cynomolgus monkeys via intravenous infusion at a dose of approximately 1 mg of the guide RNA and mRNA combined total weight per kg of the cynomolgus monkey weight is capable of inducing adenine base editing at the ANGPTL3 target splice site in the liver of the cynomolgus monkeys with an average editing percentage of greater than 40 percent. In some embodiments, the composition when administered to a group of cynomolgus monkeys via intravenous infusion at a dose of approximately 1 mg of the guide RNA and mRNA combined total weight per kg of the cynomolgus monkey weight is capable of inducing adenine base editing at the ANGPTL3 target splice site in the liver of the cynomolgus monkeys with an average editing percentage of greater than 50 percent. In some embodiments, the composition when administered to a group of cynomolgus monkeys via intravenous infusion at a dose of approximately 1 mg of the guide RNA and mRNA combined total weight per kg of the cynomolgus monkey weight is capable of inducing adenine base editing at the ANGPTL3 target splice site in the liver of the cynomolgus monkeys with an average editing percentage of greater than 60 percent. In some embodiments, the composition when administered to a group of cynomolgus monkeys via intravenous infusion at a dose of approximately 1 mg of the guide RNA and mRNA combined total weight per kg of the cynomolgus monkey weight is capable of inducing adenine base editing at the ANGPTL3 target splice site in the liver of the cynomolgus monkeys with an average editing percentage of greater than 70 percent. In some embodiments, the composition when administered to a group of cynomolgus monkeys via intravenous infusion at a dose of approximately 1.5 mg of the guide RNA and mRNA combined total weight per kg of the cynomolgus monkey weight is capable of inducing adenine base editing at the ANGPTL3 target splice site in the liver of the cynomolgus monkeys with an average editing percentage of greater than 40 percent. In some embodiments, the composition when administered to a group of cynomolgus monkeys via intravenous infusion at a dose of approximately 1.5 mg of the guide RNA and mRNA combined total weight per kg of the cynomolgus monkey weight is capable of inducing adenine base editing at the ANGPTL3 target splice site in the liver of the cynomolgus monkeys with an average editing percentage of greater than 50 percent. In some embodiments, the composition when administered to a group of cynomolgus monkeys via intravenous infusion at a dose of approximately 1.5 mg of the guide RNA and mRNA combined total weight per kg of the cynomolgus monkey weight is capable of inducing adenine base editing at the ANGPTL3 target splice site in the liver of the cynomolgus monkeys with an average editing percentage of greater than 60 percent. In some embodiments, the composition when administered to a group of cynomolgus monkeys via intravenous infusion at a dose of approximately 1.5 mg of the guide RNA and mRNA combined total weight per kg of the cynomolgus monkey weight is capable of inducing adenine base editing at the ANGPTL3 target splice site in the liver of the cynomolgus monkeys with an average editing percentage of greater than 70 percent. In some embodiments, the composition when at administered to a group of cynomolgus monkeys via intravenous infusion at a dose of approximately 1.5 mg of the guide RNA and mRNA combined total weight per kg of the cynomolgus monkey weight is capable of inducing adenine base editing at the ANGPTL3 target splice site in the liver of the cynomolgus monkeys with an average editing percentage of greater than 80 percent. In some embodiments, the composition when administered to a group of cynomolgus monkeys via intravenous infusion at a dose of approximately 3 mg of the guide RNA and mRNA combined total weight per kg of the cynomolgus monkey weight is capable of inducing adenine base editing at the ANGPTL3 target splice site in the liver of the cynomolgus monkeys with an average editing percentage of greater than 40 percent. In some embodiments, the composition when administered to a group of cynomolgus monkeys via intravenous infusion at a dose of approximately 3 mg of the guide RNA and mRNA combined total weight per kg of the cynomolgus monkey weight is capable of inducing adenine base editing at the ANGPTL3 target splice site in the liver of the cynomolgus monkeys with an average editing percentage of greater than 50 percent. In some embodiments, the composition when administered to a group of cynomolgus monkeys via intravenous infusion at a dose of approximately 3 mg of the guide RNA and mRNA combined total weight per kg of the cynomolgus monkey weight is capable of inducing adenine base editing at the ANGPTL3 target splice site in the liver of the cynomolgus monkeys with an average editing percentage of greater than 60 percent. In some embodiments, the composition when administered to a group of cynomolgus monkeys via intravenous infusion at a dose of approximately 3 mg of the guide RNA and mRNA combined total weight per kg of the cynomolgus monkey weight is capable of inducing adenine base editing at the ANGPTL3 target splice site in the liver of the cynomolgus monkeys with an average editing percentage of greater than 70 percent. In some embodiments, the composition when administered to a group of cynomolgus monkeys via intravenous infusion at a dose of approximately 3 mg of the guide RNA and mRNA combined total weight per kg of the cynomolgus monkey weight is capable of inducing adenine base editing at the ANGPTL3 target splice site in the liver of the cynomolgus monkeys with an average editing percentage of greater than 80 percent. In some embodiments, the percent editing is determined at 15 days after dosing through analysis of dosed cynomolgus monkey liver either via liver biopsy or necropsy of the monkey. In some embodiments, the percent editing is determined to be durably maintained by periodic liver biopsy testing of the dosed cynomolgus monkeys over a span of at least 168 days after dosing. In some embodiments, the percent editing is determined to be durably maintained by periodic liver biopsy testing of the dosed cynomolgus monkeys over a span of at least 300 days after dosing. In some embodiments, the composition when administered to a group of cynomolgus monkeys via intravenous infusion at a dose of approximately 0.5 mg of the guide RNA and mRNA combined total weight per kg of cynomolgus monkey weight is capable of reducing ANGPTL3 protein in the plasma of the dosed cynomolgus monkeys on average of at least 35 percent as compared to baseline. In some embodiments, the composition when administered to a group of cynomolgus monkeys via intravenous infusion at a dose of approximately 0.5 mg of the guide RNA and mRNA combined total weight per kg of cynomolgus monkey weight is capable of reducing ANGPTL3 protein in the plasma of the dosed cynomolgus monkeys on average of at least 40 percent as compared to baseline. In some embodiments, the composition when administered to a group of cynomolgus monkeys via intravenous infusion at a dose of approximately 0.5 mg of the guide RNA and mRNA combined total weight per kg of monkey weight is capable of reducing ANGPTL3 protein in the plasma of the dosed cynomolgus monkeys on average of at least 50 percent as compared to baseline. In some embodiments, the composition when administered to a group of cynomolgus monkeys via intravenous infusion at a dose of approximately 0.5 mg of the guide RNA and mRNA combined total weight per kg of cynomolgus monkey weight is capable of reducing ANGPTL3 protein in the plasma of the dosed monkeys on average of at least 60 percent as compared to baseline. In some embodiments, the composition when administered to a group of cynomolgus monkeys via intravenous infusion at a dose of approximately 0.5 mg of the guide RNA and mRNA combined total weight per kg of cynomolgus monkey weight is capable of reducing ANGPTL3 protein in the plasma of the dosed cynomolgus monkeys on average of at least 70 percent as compared to baseline. In some embodiments, the composition when administered to a group of cynomolgus monkeys via intravenous infusion at a dose of approximately 0.5 mg of the guide RNA and mRNA combined total weight per kg of cynomolgus monkey weight is capable of reducing ANGPTL3 protein in the plasma of the dosed cynomolgus monkeys on average of at least 80 percent as compared to baseline. In some embodiments, the composition when administered to a group of cynomolgus monkeys via intravenous infusion at a dose of approximately 1 mg of the guide RNA and mRNA combined total weight per kg of cynomolgus monkey weight is capable of reducing ANGPTL3 protein in the plasma of the dosed cynomolgus monkeys on average of at least 35 percent as compared to baseline. In some embodiments, the composition when administered to a group of cynomolgus monkeys via intravenous infusion at a dose of approximately 1 mg of the guide RNA and mRNA combined total weight per kg of cynomolgus monkey weight is capable of reducing ANGPTL3 protein in the plasma of the dosed cynomolgus monkeys on average of at least 40 percent as compared to baseline. In some embodiments, the composition when administered to a group of cynomolgus monkeys via intravenous infusion at a dose of approximately 1 mg of the guide RNA and mRNA combined total weight per kg of monkey weight is capable of reducing ANGPTL3 protein in the plasma of the dosed cynomolgus monkeys on average of at least 50 percent as compared to baseline. In some embodiments, the composition when administered to a group of cynomolgus monkeys via intravenous infusion at a dose of approximately 1 mg of the guide RNA and mRNA combined total weight per kg of cynomolgus monkey weight is capable of reducing ANGPTL3 protein in the plasma of the dosed cynomolgus monkeys on average of at least 60 percent as compared to baseline. In some embodiments, the composition when administered to a group of cynomolgus monkeys via intravenous infusion at a dose of approximately 1 mg of the guide RNA and mRNA combined total weight per kg of cynomolgus monkey weight is capable of reducing ANGPTL3 protein in the plasma of the dosed cynomolgus monkeys on average of at least 70 percent as compared to baseline. In some embodiments, the composition when administered to a group of cynomolgus monkeys via intravenous infusion at a dose of approximately 1 mg of the guide RNA and mRNA combined total weight per kg of cynomolgus monkey weight is capable of reducing ANGPTL3 protein in the plasma of the dosed cynomolgus monkeys on average of at least 80 percent as compared to baseline. In some embodiments, the composition when administered to a group of cynomolgus monkeys via intravenous infusion at a dose of approximately 1.5 mg of the guide RNA and mRNA combined total weight per kg of cynomolgus monkey weight is capable of reducing ANGPTL3 protein in the plasma of the dosed cynomolgus monkeys on average of at least 35 percent as compared to baseline. In some embodiments, the composition when administered to a group of cynomolgus monkeys via intravenous infusion at a dose of approximately 1.5 mg of the guide RNA and mRNA combined total weight per kg of cynomolgus monkey weight is capable of reducing ANGPTL3 protein in the plasma of the dosed cynomolgus monkeys on average of at least 40 percent as compared to baseline. In some embodiments, the composition when administered to a group of cynomolgus monkeys via intravenous infusion at a dose of approximately 1.5 mg of the guide RNA and mRNA combined total weight per kg of cynomolgus monkey weight is capable of reducing ANGPTL3 protein in the plasma of the dosed cynomolgus monkeys on average of at least 50 percent as compared to baseline. In some embodiments, the composition when administered to a group of cynomolgus monkeys via intravenous infusion at a dose of approximately 1.5 mg of the guide RNA and mRNA combined total weight per kg of cynomolgus monkey weight is capable of reducing ANGPTL3 protein in the plasma of the dosed cynomolgus monkeys on average of at least 60 percent as compared to baseline. In some embodiments, the composition when administered to a group of cynomolgus monkeys via intravenous infusion at a dose of approximately 1.5 mg of the guide RNA and mRNA combined total weight per kg of cynomolgus monkey weight is capable of reducing ANGPTL3 protein in the plasma of the dosed cynomolgus monkeys on average of at least 70 percent as compared to baseline. In some embodiments, the composition when administered to a group of cynomolgus monkeys via intravenous infusion at a dose of approximately 1.5 mg of the guide RNA and mRNA combined total weight per kg of cynomolgus monkey weight is capable of reducing ANGPTL3 protein in the plasma of the dosed cynomolgus monkeys on average of at least 80 percent as compared to baseline. In some embodiments, the composition when administered to a group of cynomolgus monkeys via intravenous infusion at a dose of approximately 3 mg of the guide RNA and mRNA combined total weight per kg of cynomolgus monkey weight is capable of reducing ANGPTL3 protein in the plasma of the dosed cynomolgus monkeys on average of at least 35 percent as compared to baseline. In some embodiments, the composition when administered to a group of cynomolgus monkeys via intravenous infusion at a dose of approximately 3 mg of the guide RNA and mRNA combined total weight per kg of cynomolgus monkey weight is capable of reducing ANGPTL3 protein in the plasma of the dosed cynomolgus monkeys on average of at least 40 percent as compared to baseline. In some embodiments, the composition when administered to a group of cynomolgus monkeys via intravenous infusion at a dose of approximately 3 mg of the guide RNA and mRNA combined total weight per kg of cynomolgus monkey weight is capable of reducing ANGPTL3 protein in the plasma of the dosed cynomolgus monkeys on average of at least 50 percent as compared to baseline. In some embodiments, the composition when administered to a group of cynomolgus monkeys via intravenous infusion at a dose of approximately 3 mg of the guide RNA and mRNA combined total weight per kg of cynomolgus monkey weight is capable of reducing ANGPTL3 protein in the plasma of the dosed cynomolgus monkeys on average of at least 60 percent as compared to baseline. In some embodiments, the composition when administered to a group of cynomolgus monkeys via intravenous infusion at a dose of approximately 3 mg of the guide RNA and mRNA combined total weight per kg of cynomolgus monkey weight is capable of reducing ANGPTL3 protein in the plasma of the dosed cynomolgus monkeys on average of at least 70 percent as compared to baseline. In some embodiments, the composition when administered to a group of cynomolgus monkeys via intravenous infusion at a dose of approximately 3 mg of the guide RNA and mRNA combined total weight per kg of cynomolgus monkey weight is capable of reducing ANGPTL3 protein in the plasma of the dosed cynomolgus monkeys on average of at least 80 percent as compared to baseline. In some embodiments, the reduction in plasma protein is determined at 15 days after dosing via blood sampling and analysis of the dosed cynomolgus monkey. In some embodiments, the composition when administered to a group of cynomolgus monkeys via intravenous infusion at a dose of approximately 0.5 mg of the guide RNA and mRNA combined total weight per kg of monkey weight is capable of reducing triglyceride level in the plasma of the dosed monkeys on average of at least 20 percent as compared to baseline. In some embodiments, the composition when administered to a group of cynomolgus monkeys via intravenous infusion at a dose of approximately 0.5 mg of the guide RNA and mRNA combined total weight per kg of cynomolgus monkey weight is capable of reducing triglyceride level in the plasma of the dosed cynomolgus monkeys on average of at least 25 percent as compared to baseline. In some embodiments, the composition when administered to a group of cynomolgus monkeys via intravenous infusion at a dose of approximately 0.5 mg of the guide RNA and mRNA combined total weight per kg of cynomolgus monkey weight is capable of reducing triglyceride level in the plasma of the dosed cynomolgus monkeys on average of at least 30 percent as compared to baseline. In some embodiments, the composition when administered to a group of cynomolgus monkeys via intravenous infusion at a dose of approximately 0.5 mg of the guide RNA and mRNA combined total weight per kg of cynomolgus monkey weight is capable of reducing triglyceride level in the plasma of the dosed cynomolgus monkeys on average of at least 35 percent as compared to baseline. In some embodiments, the composition when administered to a group of cynomolgus monkeys via intravenous infusion at a dose of approximately 0.5 mg of the guide RNA and mRNA combined total weight per kg of cynomolgus monkey weight is capable of reducing triglyceride level in the plasma of the dosed cynomolgus monkeys on average of at least 40 percent as compared to baseline. In some embodiments, the composition when administered to a group of cynomolgus monkeys via intravenous infusion at a dose of approximately 0.5 mg of the guide RNA and mRNA combined total weight per kg of cynomolgus monkey weight is capable of reducing triglyceride level in the plasma of the dosed cynomolgus monkeys on average of at least 45 percent as compared to baseline. In some embodiments, the composition when administered to a group of cynomolgus monkeys via intravenous infusion at a dose of approximately 1 mg of the guide RNA and mRNA combined total weight per kg of cynomolgus monkey weight is capable of reducing triglyceride level in the plasma of the dosed cynomolgus monkeys on average of at least 20 percent as compared to baseline. In some embodiments, the composition when administered to a group of cynomolgus monkeys via intravenous infusion at a dose of approximately 1 mg of the guide RNA and mRNA combined total weight per kg of cynomolgus monkey weight is capable of reducing triglyceride level in the plasma of the dosed cynomolgus monkeys on average of at least 25 percent as compared to baseline. In some embodiments, the composition when administered to a group of cynomolgus monkeys via intravenous infusion at a dose of approximately 1 mg of the guide RNA and mRNA combined total weight per kg of cynomolgus monkey weight is capable of reducing triglyceride level in the plasma of the dosed cynomolgus monkeys on average of at least 30 percent as compared to baseline. In some embodiments, the composition when administered to a group of cynomolgus monkeys via intravenous infusion at a dose of approximately 1 mg of the guide RNA and mRNA combined total weight per kg of cynomolgus monkey weight is capable of reducing triglyceride level in the plasma of the dosed cynomolgus monkeys on average of at least 35 percent as compared to baseline. In some embodiments, the composition when administered to a group of cynomolgus monkeys via intravenous infusion at a dose of approximately 1 mg of the guide RNA and mRNA combined total weight per kg of cynomolgus monkey weight is capable of reducing triglyceride level in the plasma of the dosed cynomolgus monkeys on average of at least 40 percent as compared to baseline. In some embodiments, the composition when administered to a group of cynomolgus monkeys via intravenous infusion at a dose of approximately 1 mg of the guide RNA and mRNA combined total weight per kg of cynomolgus monkey weight is capable of reducing triglyceride level in the plasma of the dosed cynomolgus monkeys on average of at least 45 percent as compared to baseline. In some embodiments, the composition when administered to a group of cynomolgus monkeys via intravenous infusion at a dose of approximately 1 mg of the guide RNA and mRNA combined total weight per kg of cynomolgus monkey weight is capable of reducing triglyceride level in the plasma of the dosed cynomolgus monkeys on average of at least 50 percent as compared to baseline. In some embodiments, the composition when administered to a group of cynomolgus monkeys via intravenous infusion at a dose of approximately 1 mg of the guide RNA and mRNA combined total weight per kg of cynomolgus monkey weight is capable of reducing triglyceride level in the plasma of the dosed cynomolgus monkeys on average of at least 55 percent as compared to baseline. In some embodiments, the composition when administered to a group of cynomolgus monkeys via intravenous infusion at a dose of approximately 1 mg of the guide RNA and mRNA combined total weight per kg of cynomolgus monkey weight is capable of reducing triglyceride level in the plasma of the dosed cynomolgus monkeys on average of at least 60 percent as compared to baseline. In some embodiments, the composition when administered to a group of cynomolgus monkeys via intravenous infusion at a dose of approximately 1.5 mg of the guide RNA and mRNA combined total weight per kg of cynomolgus monkey weight is capable of reducing triglyceride level in the plasma of the dosed cynomolgus monkeys on average of at least 20 percent as compared to baseline. In some embodiments, the composition when administered to a group of cynomolgus monkeys via intravenous infusion at a dose of approximately 1.5 mg of the guide RNA and mRNA combined total weight per kg of cynomolgus monkey weight is capable of reducing triglyceride level in the plasma of the dosed cynomolgus monkeys on average of at least 25 percent as compared to baseline. In some embodiments, the composition when administered to a group of cynomolgus monkeys via intravenous infusion at a dose of approximately 1.5 mg of the guide RNA and mRNA combined total weight per kg of cynomolgus monkey weight is capable of reducing triglyceride level in the plasma of the dosed cynomolgus monkeys on average of at least 30 percent as compared to baseline. In some embodiments, the composition when administered to a group of cynomolgus monkeys via intravenous infusion at a dose of approximately 1.5 mg of the guide RNA and mRNA combined total weight per kg of cynomolgus monkey weight is capable of reducing triglyceride level in the plasma of the dosed cynomolgus monkeys on average of at least 35 percent as compared to baseline. In some embodiments, the composition when administered to a group of cynomolgus monkeys via intravenous infusion at a dose of approximately 1.5 mg of the guide RNA and mRNA combined total weight per kg of cynomolgus monkey weight is capable of reducing triglyceride level in the plasma of the dosed cynomolgus monkeys on average of at least 40 percent as compared to baseline. In some embodiments, the composition when administered to a group of cynomolgus monkeys via intravenous infusion at a dose of approximately 1.5 mg of the guide RNA and mRNA combined total weight per kg of cynomolgus monkey weight is capable of reducing triglyceride level in the plasma of the dosed cynomolgus monkeys on average of at least 45 percent as compared to baseline. In some embodiments, the composition when administered to a group of cynomolgus monkeys via intravenous infusion at a dose of approximately 1.5 mg of the guide RNA and mRNA combined total weight per kg of cynomolgus monkey weight is capable of reducing triglyceride level in the plasma of the dosed cynomolgus monkeys on average of at least 50 percent as compared to baseline. In some embodiments, the composition when administered to a group of cynomolgus monkeys via intravenous infusion at a dose of approximately 1.5 mg of the guide RNA and mRNA combined total weight per kg of cynomolgus monkey weight is capable of reducing triglyceride level in the plasma of the dosed cynomolgus monkeys on average of at least 55 percent as compared to baseline. In some embodiments, the composition when administered to a group of cynomolgus monkeys via intravenous infusion at a dose of approximately 1.5 mg of the guide RNA and mRNA combined total weight per kg of cynomolgus monkey weight is capable of reducing triglyceride level in the plasma of the dosed cynomolgus monkeys on average of at least 60 percent as compared to baseline. In some embodiments, the composition when administered to a group of cynomolgus monkeys via intravenous infusion at a dose of approximately 1.5 mg of the guide RNA and mRNA combined total weight per kg of cynomolgus monkey weight is capable of reducing triglyceride level in the plasma of the dosed cynomolgus monkeys on average of at least 65 percent as compared to baseline. In some embodiments, the composition when administered to a group of cynomolgus monkeys via intravenous infusion at a dose of approximately 3 mg of the guide RNA and mRNA combined total weight per kg of cynomolgus monkey weight is capable of reducing triglyceride level in the plasma of the dosed cynomolgus monkeys on average of at least 20 percent as compared to baseline. In some embodiments, the composition when administered to a group of cynomolgus monkeys via intravenous infusion at a dose of approximately 3 mg of the guide RNA and mRNA combined total weight per kg of cynomolgus monkey weight is capable of reducing triglyceride level in the plasma of the dosed cynomolgus monkeys on average of at least 25 percent as compared to baseline. In some embodiments, the composition when administered to a group of cynomolgus monkeys via intravenous infusion at a dose of approximately 3 mg of the guide RNA and mRNA combined total weight per kg of cynomolgus monkey weight is capable of reducing triglyceride level in the plasma of the dosed cynomolgus monkeys on average of at least 30 percent as compared to baseline. In some embodiments, the composition when administered to a group of cynomolgus monkeys via intravenous infusion at a dose of approximately 3 mg of the guide RNA and mRNA combined total weight per kg of cynomolgus monkey weight is capable of reducing triglyceride level in the plasma of the dosed cynomolgus monkeys on average of at least 35 percent as compared to baseline. In some embodiments, the composition when administered to a group of cynomolgus monkeys via intravenous infusion at a dose of approximately 3 mg of the guide RNA and mRNA combined total weight per kg of cynomolgus monkey weight is capable of reducing triglyceride level in the plasma of the dosed cynomolgus monkeys on average of at least 40 percent as compared to baseline. In some embodiments, the composition when administered to a group of cynomolgus monkeys via intravenous infusion at a dose of approximately 3 mg of the guide RNA and mRNA combined total weight per kg of cynomolgus monkey weight is capable of reducing triglyceride level in the plasma of the dosed cynomolgus monkeys on average of at least 45 percent as compared to baseline. In some embodiments, the composition when administered to a group of cynomolgus monkeys via intravenous infusion at a dose of approximately 3 mg of the guide RNA and mRNA combined total weight per kg of cynomolgus monkey weight is capable of reducing triglyceride level in the plasma of the dosed cynomolgus monkeys on average of at least 50 percent as compared to baseline. In some embodiments, the composition when administered to a group of cynomolgus monkeys via intravenous infusion at a dose of approximately 3 mg of the guide RNA and mRNA combined total weight per kg of cynomolgus monkey weight is capable of reducing triglyceride level in the plasma of the dosed cynomolgus monkeys on average of at least 55 percent as compared to baseline. In some embodiments, the composition when administered to a group of cynomolgus monkeys via intravenous infusion at a dose of approximately 3 mg of the guide RNA and mRNA combined total weight per kg of cynomolgus monkey weight is capable of reducing triglyceride level in the plasma of the dosed cynomolgus monkeys on average of at least 60 percent as compared to baseline. In some embodiments, the composition when administered to a group of cynomolgus monkeys via intravenous infusion at a dose of approximately 3 mg of the guide RNA and mRNA combined total weight per kg of cynomolgus monkey weight is capable of reducing triglyceride level in the plasma of the dosed cynomolgus monkeys on average of at least 65 percent as compared to baseline. In some embodiments, the reduction in triglyceride level is determined at 15 days after dosing via blood sampling and analysis of the dosed cynomolgus monkey. In some embodiments, the reduction in triglyceride level is determined to be durably maintained over a span of at least 168 days by periodic blood sampling and analysis of the dosed cynomolgus monkey. In some embodiments, the reduction in triglyceride level is determined to be durably maintained over a span of at least 300 days by periodic blood sampling and analysis of the dosed cynomolgus monkey. In some embodiments, the composition when administered to a group of cynomolgus monkeys via intravenous infusion at a dose of approximately 3 mg of the guide RNA and mRNA combined total weight per kg of cynomolgus monkey weight is capable of reducing lipoprotein (a) in the plasma of the dosed cynomolgus monkeys on average of at least 10 percent as compared to baseline. In some embodiments, the composition when administered to a group of cynomolgus monkeys via intravenous infusion at a dose of approximately 3 mg of the guide RNA and mRNA combined total weight per kg of cynomolgus monkey weight is capable of reducing lipoprotein (a) level in the plasma of the dosed cynomolgus monkeys on average of at least 15 percent as compared to baseline. In some embodiments, the composition when administered to a group of cynomolgus monkeys via intravenous infusion at a dose of approximately 3 mg of the guide RNA and mRNA combined total weight per kg of cynomolgus monkey weight is capable of reducing lipoprotein (a) level in the plasma of the dosed cynomolgus monkeys on average of at least 20 percent as compared to baseline. In some embodiments, the composition when administered to a group of cynomolgus monkeys via intravenous infusion at a dose of approximately 3 mg of the guide RNA and mRNA combined total weight per kg of cynomolgus monkey weight is capable of reducing lipoprotein (a) level in the plasma of the dosed cynomolgus monkeys on average of at least 25 percent as compared to baseline. In some embodiments, the composition when administered to a group of cynomolgus monkeys via intravenous infusion at a dose of approximately 3 mg of the guide RNA and mRNA combined total weight per kg of cynomolgus monkey weight is capable of reducing lipoprotein (a) level in the plasma of the dosed cynomolgus monkeys on average of at least 30 percent as compared to baseline. In some embodiments, the composition when administered to a group of cynomolgus monkeys via intravenous infusion at a dose of approximately 3 mg of the guide RNA and mRNA combined total weight per kg of cynomolgus monkey weight is capable of reducing lipoprotein (a) level in the plasma of the dosed cynomolgus monkeys on average of approximately 35 percent as compared to baseline. In some embodiments, the reduction in lipoprotein (a) is determined at 15 days after dosing via blood sampling and analysis of the dosed cynomolgus monkey. In some embodiments, the reduction in lipoprotein (a) is determined to be durably maintained over a span of at least 224 days by periodic blood sampling and analysis of the dosed cynomolgus monkey. In some embodiments, the reduction in lipoprotein (a) is determined to be durably maintained over a span of at least 300 days by periodic blood sampling and analysis of the dosed cynomolgus monkey. In some embodiments, to the extent that the dosing of the cynomolgus monkeys results in elevation of AST, ALT, or Cytokines, the elevations resulting from the dosing of the composition are transient and resolved back to approximately baseline levels within 3-15 days after dosing. In some embodiments, the percent editing of ANGPTL3 is negligible outside of the liver, spleen and adrenal glands tissues as illustrated in FIG. 27. In some embodiments, repeat dosing results is additive with respect to the editing percentage of ANGPTL3 editing percentage. In some embodiments, the repeat dosing does not elicit cytokine activation nor an immune response. In some embodiments, the spacer sequence has at least 80% nucleotide correlation with the nucleotide sequence of a targeted protospacer on the ANGPTL3 gene, wherein an RNA nucleotide on the spacer sequence is in correlation with a DNA nucleotide of the protospacer if it has the same nucleotide as the DNA nucleotide in the same order and wherein uracil and thymine bases are considered the same nucleotide for purposes of determining correlation. In some embodiments, the spacer sequence has at least 85% nucleotide correlation with the nucleotide sequence of a targeted protospacer on the ANGPTL3 gene. In some embodiments, the spacer sequence has at least 90% nucleotide correlation with the nucleotide sequence of a targeted protospacer on the ANGPTL3 gene. In some embodiments, the spacer sequence has at least 95% nucleotide correlation with the nucleotide sequence of a targeted protospacer on the ANGPTL3 gene. In some embodiments, the spacer sequence has at least 99% nucleotide correlation with the nucleotide sequence of a targeted protospacer on the ANGPTL3 gene. In some embodiments, the spacer sequence has at least 100% nucleotide correlation with the nucleotide sequence of a targeted protospacer on the ANGPTL3 gene.

[0031] In another aspect, provided herein is a method for treating or preventing an atherosclerotic cardiovascular disease in a subject in need thereof, the method comprising administering to the subject a therapeutically effective amount of (a) a mRNA encoding an adenine base editor protein having an editing window, (b) a first guide RNA comprising a tracr sequence that serves as a binding scaffold for the base editor protein and a spacer sequence that serves to guide the base editor protein to a protospacer sequence on a PCSK9 gene, wherein the spacer sequence is complimentary, at least in part, to a splice site or an exon region of the PCSK9 gene; and (c) a second guide RNA comprising a tracr sequence that serves as a binding scaffold for the base editor protein and a spacer sequence that serves to guide the base editor protein to a protospacer sequence on a ANGPTL3 gene, wherein the spacer sequence is complimentary, at least in part, to a splice site or an exon region of the ANGPTL3 gene. In some embodiments, the method further comprises a first LNP enclosing (a). In some embodiments, the first LNP encloses (b) and (c). In some embodiments, the first LNP was administered repeatedly. In some embodiments, the first LNP was administered repeatedly at an interval of one to sixty days. In some embodiments, the first LNP was administered repeatedly at an interval of seven days. In some embodiments, the first LNP further encloses (b). In some embodiments, the method further comprises a second LNP enclosing (a) and (c). In some embodiments, the first LNP and the second LNP are administered sequentially. In some embodiments, the first LNP and the second LNP are administered sequentially at an interval of one day to 12 months. In some embodiments, the interval is one day. In some embodiments, the interval is five days. In some embodiments, the interval is ten days. In some embodiments, the interval is fifteen days. In some embodiments, the interval is twenty days. In some embodiments, the interval is twenty-five days. In some embodiments, the interval is one month. In some embodiments, the interval is two months. In some embodiments, the interval is three months. In some embodiments, the interval is five months. In some embodiments, the interval is eight months. In some embodiments, the interval is ten months. In some embodiments, the interval is twelve months.

### BRIEF DESCRIPTION OF THE DRAWINGS

[0032] The features, principles, advantages, and illustrative embodiments, implementations, analysis, and examples of the subject matter of this application are set forth herein including in the appended claims with aspects of which being illustrated in the accompanying drawings of which:

[0033] FIGS. 1A-1C illustrate the modes of operation of Cas9, cytidine base editors (CBE), and adenine base editors (ABE) respectively, along with relevant terminology used in this application including “protospacer”, “PAM”, “spacer” (Mali, P. et al 2013 Nat Methods 10, 957-963; Anzalone, A V. 2020 Nat Biotechnol 38, 824-844). FIG. 1A discloses SEQ ID NO: 3184. FIG. 1D is a schematic representation of how mcPCSK9 guide RNA (gRNA)-Tracr disclosed herein were designed. Shown is a ribonucleoprotein (RNP)—single guide RNA (sgRNA) alignment with stem-loop guide intramolecular interactions (W—C base pairing at the stem). The tracrRNA sequence of the gRNA serves as a binding scaffold for the cas protein. When designing a gRNA, loop nucleotides can be aligned with a protein and the interaction of base (H-bond), 2′-hydroxyl (2′-OH), 4′-oxygen (ring-oxygen) of the sugar moiety, phosphate linkage of each nucleotide to amino acid side chains of the protein can be considered in the design of a gRNA-Tracr. Spatial arrangement of nucleotide within RNP-steric interaction, room to accommodate bulky substitution like 2′-O-Methyl (2′-OMe) and phosphorothioate (PS) can be also taken into consideration. FIG. 1D discloses SEQ ID NOS 70-71, respectively, in order of appearance.

[0034] FIG. 2 are two tables that describe how SpCas9 crystal structures were chosen in connection with designing a gRNAs disclosed herein based on structure. The top panel is a table summarizing different components of CRISPR/Cas system with Protein Data Bank (PDB) IDs and the state. The bottom panel shows the root mean square deviation (RMSD) values after alignment between the protein chains of each structure. The RNP state (4ZT0) and pre-catalytic ternary complex (5F9R) are the most relevant to determine contacts related to RNP formation and contacts related to catalysis. Some rearrangement of the protein occurs between these two states. Massive rearrangements may occur in the protein between the apo state and the RNP.

[0035] FIG. 3 depicts a gRNA secondary structure of a sgRNA based on the 4ZT0 and 5F9R crystal structures, in which the sgRNA is bound to SpCas9 either as an RNP alone or as part of a ternary complex with DNA. Secondary structure relationships are shown in the Leontis and Westhof nomenclature (RNA, 2001, 7, 499-512) (SEQ ID NO: 72).

[0036] FIG. 4 depicts a gRNA secondary structure with a PCSK9 spacer showing predicted contacts based on RNP PDB 4ZT0 (sgRNA+SpCas9 RNP). Positions 1-10 and positions 83-100 were not modeled in this crystal structure due to a lack of clear electron density (SEQ ID NO: 73). Black circle with white letter labels: protein contact, light gray with black letter: steric clash if 2′-O-Me incorporated or distant contact, dark grey with black letter: RNA contact. As a person of skill in the art would understand, the term “clash” as used herein refers to physically-unlikely overlapping atomic volumes in a structure. Incorporation of a 2′O-Me modification in these situations would potentially result in structural rearrangement(s) that could be detrimental to RNP function. As a person of skill in the art would understand, the term “contact” as used herein means a stable, non-covalent interaction between two functional groups, e.g. a hydrogen bond.

[0037] FIG. 5 depicts a gRNA secondary structure with a PCSK9 spacer showing predicted contacts based on PDB 5F9R (precatalytic ternary complex) (SEQ ID NO: 74). Black circle with white letter labels: protein contact, light gray with black letter: steric clash if 2′-O-Me incorporated or distant contact, dark grey with black letter: RNA contact.

[0038] FIG. 6 depicts plausible positions of 2′-OMe substitutions determined by structure-based designs (SEQ ID NO: 3190). Black circle with white letter labels: 2′-OMe and phosphorothioate substitution, light gray circle with black letter labels: 2′-OMe substitution only, white circle with black letter labels: unmodified nucleotide.

[0039] FIG. 7A depicts three patterns of 2′-OMe position identified in the tracr region of the single guide RNA from structure-guided incorporation of 2′-O-methylribosugar modification that produced robust editing in vivo: (1) mice: FIG. 16, GA054 (tracr1) and GA055 (tracr2) and (2) NHP: FIG. 28, GA096 (tracr1), GA097 (tracr2) and GA346 (tracr3). Black circle with white letter labels: 2′-OMe and phosphorothioate substitution, light gray circle with black letter labels: 2′-OMe substitution only, white circle with black letter labels: unmodified nucleotide. (SEQ ID NOS 55, 2238, and 3185, respectively, in order of appearance) FIG. 7B depicts the sequence alignment of unmodified SEQ ID NO: 61, a reference tracrRNA sequence (“Lit Tracr”), tracr1, tracr2, and tracr3. (SEQ ID NOS 3186-3189, respectively, in order of appearance)

[0040] FIG. 8 shows base editing of the target splice site by an adenosine base editor system in modifying PCSK9 in primary human hepatocytes. The dark line represents the percent splice site editing obtained using gRNA identified a GA066.

[0041] FIG. 9 depicts a Sanger sequencing chromatogram demonstrating editing of adenine base in the antisense strand at the splice donor at the end of PCSK9 exon 1 (PCR amplification from the genomic DNA of the cells transfected with the 2500-ng/mL dose), portraying how splice-site disruption results in an in-frame stop codon. Heterozygosity for a naturally occurring single nucleotide polymorphism (SNP) is evident downstream of the editing site. The scheme shows A-to-G base editing by an adenosine base editor system to knock-out PCSK9 in primary human hepatocytes. FIG. 9 discloses SEQ ID NO: 75.

[0042] FIG. 10 depicts a Sanger sequencing chromatogram demonstrating editing of adenine base in the antisense strand at the splice donor at the end of ANGPTL3 exon 6 (PCR amplification from the genomic DNA of the cells transfected with the 2500-ng/ml dose), portraying how splice-site disruption results in an in-frame stop codon. A-to-G base editing effected by an adenosine base editor system in modifying ANGPTL3 in primary human hepatocytes. FIG. 10 discloses SEQ ID NO: 76.

[0043] FIG. 11 shows three sanger sequencing chromatograms from PCR amplified genomic DNA isolated from: 1) untreated primary hepatocytes (top panel); 2) SpCas9 mRNA/PCSK9 gRNA GA097 treated primary hepatocytes (middle panel); 3) ABE8.8 mRNA/PCSK9 gRNA treated primary hepatocytes (bottom panel). The PCSK9-gRNA GA097 protospacer sequence is highlighted in grey. The arrow points to the position 6 of the protospacer that is targeted for A-to-G base editing by the ABE8.8 editor. The scissors depict the general site of double stranded break that occurs upon cutting by the SpCas9 nuclease at this target site. SpCas9 mRNA and GA097 delivery in cells resulted in significant gene editing at the site of the double strand break (as denoted with the scissors) but this was not seen in the ABE8.8 and GA097 delivery in cells. Instead, the same gRNA GA097 in combination with ABE8.8 mRNA resulted in robust A-to-G base editing. FIG. 11 discloses SEQ ID NO 77-79, respectively in order of appearance.

[0044] FIG. 12 depicts a schematic showing potential splicing outcomes with disruption of splice donor or splice acceptor sequences. Other outcomes are possible, such as inclusion of part of intron 1 in the splicing product. Alteration of the splice donor or splice acceptor sites are shown (top panel). Alternative splice donor sites within PCSK9 intron 1 resulting from editing of PCSK9 exon 1 splice-donor adenine base in primary human hepatocytes is shown in the bottom panel. *Four different primer pairs (Table 9) were used for RT-PCR of the control/treated samples.

[0045] FIG. 13 shows lack of guide RNA-dependent DNA off-target editing in primary human hepatocytes. Human primary hepatocytes were incubated with gRNA (GA097 or GA346) and ABE8.8 mRNA as described in Example 4. The off-target reading was calculated as net adenine editing (proportion of sequencing reads with alteration of one or more adenine bases in LNP-treated cells versus untreated cells) at the on-target PCSK9 site and more than 50 candidate off-target PCSK9 sites in primary human hepatocytes from four individual donors.

[0046] FIG. 14 depicts guide RNA-independent RNA editing, assessed in SpCas9-treated or ABE8.8-treated hepatocytes after 2 days (n=4 biological replicates). Each replicate was compared against each of four untreated hepatocyte samples to eliminate any positions with editing that were common to both conditions. The jitter plots portray transcriptomic loci with editing in the treated sample (number indicates total edited loci identified in the treated sample, boxplot indicates median±interquartile range of proportion of edited reads across all edited loci in the sample). gRNA GA097, SpCas9 mRNA MS010, and ABE8.8 mRNA MA004 were used in this study as described in example 4.

[0047] FIG. 15 shows PCSK9 and ANGPTL3 base editing with lipid nanoparticles (LNPs) formulated with an embodiment of base editor system, ABE mRNA and a guide RNA, in primary human hepatocytes and primary non-human primates (NHP) hepatocytes. The human-specific ANGPTL3 guide RNA showed low editing efficiency in NHP hepatocytes within the concentration evaluated, whereas the PCSK9 guide RNA cross-reactive to both human and NHP showed high editing efficiency in both cell lines.

[0048] FIG. 16 shows gene editing of Pcsk9 in mice (n=2-5 mice) via LNPs containing SpCas9 mRNA MS002 (TriLink Biotechnologies) and mouse Pcsk9-targeting gRNA with different tracr designs (GA052, GA053, GA054, and GA055) at a 1:1 weight ratio. Wild-type C57BL/6 mice were dosed with 2 mg/kg of the LNP test article. The mg/kg dose was calculated based on total RNA and the total RNA is the quantified sum of mRNA and gRNA present in the LNP after formulation. Seven days after dosing, the mice were euthanized and genomic DNA was harvested from mouse liver, and then assessed for base editing of the target site with next-generation sequencing. All four guide RNAs evaluated carry same spacer and same pattern of chemical modification within the first 20 nucleotides from the 5′-end, but all four differ in chemical modification pattern within the tracr between nucleotides at position 21 and at position 100 of the 100-mer guide RNA.

[0049] FIG. 17 shows base editing of PCSK9 in mice (n=5) via LNPs with an embodiment of base editor system, ABE mRNA MA004 and PCSK9 guide RNA GA256 (targeting mouse intron 1 splice donor). Wild-type C57BL/6 mice were dosed with 2 mg/kg total RNA of the LNP test article. Seven days after dosing, the mice were euthanized and genomic DNA was harvested from mouse liver, and then assessed for base editing of the target site with next-generation sequencing.

[0050] FIG. 18 depicts editing of the Pcsk9 exon 1 splice-donor adenine base in wild-type mouse liver, assessed 1 week following treatment with different doses of same LNP formulation with ABE8.8 mRNA MA004 and Pcsk9 gRNA GA256 (n=4 to 5 mice per dosing group, bar indicates mean editing in group).

[0051] FIG. 19 depicts editing of the Pcsk9 exon 1 splice-donor adenine base in wild-type mouse liver, after dosed with LNPs at 0.05 mg/kg total RNA dose containing different ratios of gRNA GA256 and mRNA MA002. Additional guides GA255 and GA257 with different chemical modifications were also assessed for base editing efficiency, at mRNA to gRNA 1:1 wt ratio.

[0052] FIG. 20 shows the results from dosing LNPs containing ABE8.8 mRNA and mouse Angptl3-targeting gRNAs (GA258, GA259, GA260, GA349, GA353) at 0.05 mg/kg total RNA dose at a 1:1 weight ratio into mice. GA258, GA259 and GA260 contain three different structure-guided tracr design. GA349 and GA353 tracr designs were from published literature (Cell Reports, 2018 22, 2227-2235). The mice were later euthanized and genomic DNA was harvested from mouse liver, and then assessed for base editing of the target splice site with next-generation sequencing.

[0053] FIG. 21 is a schematic showing the general dosing strategy for introducing adenine base editing of a target gene in NHP via LNPs formulated with an embodiment of base editor system, ABE mRNA and a guide RNA, and subsequent analysis after 2 weeks.

[0054] FIG. 22 shows that administration of LNPs formulated with an embodiment of base editor system, ABE mRNA MA002 and PCSK9 guide RNA GA066, at 1 mg/kg and 3 mg/kg total RNA dose to cynomolgus monkeys via intravenous infusion, induced adenine base editing at the PCSK9 target splice site in the liver of cynomolgus monkeys.

[0055] FIG. 23 shows that administration of LNPs formulated with an embodiment of base editor system, ABE mRNA MA004 and PCSK9 guide RNA GA066, to cynomolgus monkeys via intravenous infusion resulted in reduction in the blood PCSK9 protein level compared to pre-dosing levels at 2 weeks after dosing.

[0056] FIG. 24 shows that administration of LNPs at 3 mg/kg formulated with an embodiment of base editor system, ABE mRNA MA002 and PCSK9 guide RNA GA066, to cynomolgus monkeys via intravenous infusion resulted in reduction of the blood low-density lipoprotein cholesterol (LDL-C) level at 1 and 2 weeks after dosing compared to pre-dosing levels.

[0057] FIGS. 25A-25C show short-term adenine base editing of PCSK9 in non-human primates. FIG. 25A depicts editing of the PCSK9 exon 1 splice-donor adenine base in the livers of cynomolgus monkeys receiving an intravenous infusion of a 1 mg/kg dose of an LNP formulation with ABE8.8 mRNA MA004 and PCSK9 gRNA GA097 with necropsy at either 2 weeks (three animals) or 24 hours (two animals) following treatment. For each animal, editing was assessed in samples collected from sites distributed throughout the liver (n=8 samples; bar indicates mean editing in animal). Reduction of the blood PCSK9 protein level (FIG. 25B) or blood LDL-C level (FIG. 25C) in the three animals that underwent necropsy at 2 weeks following treatment are shown, comparing the level at 2 weeks versus the baseline pre-treatment level (n=1 blood sample per animal).

[0058] FIGS. 26A-26C shows adenine base editing of PCSK9 in non-human primates. FIG. 26A depicts editing of the PCSK9 exon 1 splice-donor adenine base in the livers of cynomolgus monkeys receiving an intravenous infusion of 0.5, 1.0, or 1.5 mg/kg dose of an LNP formulation with ABE8.8 mRNA MA004 and PCSK9 gRNA GA346. Reduction of the blood PCSK9 protein level (FIG. 26B) or blood LDL-C level (FIG. 26C) for the animals are shown.

[0059] FIG. 27 depicts tissue distribution of editing of the PCSK9 exon 1 splice donor adenine base in the three animals that underwent necropsy at 2 weeks following treatment (n=1 sample per animal for each indicated organ except liver; the liver data represent the means shown in a calculated from eight liver samples each). The LNP constituted with ABE mRNA MA004 and guide RNA GA346 was used in this study, and the dose administered was 0.5 mg/kg.

[0060] FIG. 28 illustrates editing of the PCSK9 exon 1 splice-donor adenine base editing in the livers of cynomolgus monkeys following intravenous infusions of individual lipid nanoparticles (LNPs) constituted with ABE mRNA MA004 and different guide RNAs with same spacer but with different tracer modifications. The guide RNAs used in this study were GA066, GA096, GA097 and GA346. The gRNA GA097 from two different sources were used in the same study and the sources are identified as (1) and (2). For tracr comparison studies the LNPS were dosed at 1 mg/kg total RNA dose where the guide RNA and mRNA were mixed at 1:1 weight ratio. The GA066 with published tracr design (Cell Reports, 2018 22, 2227-2235) produced lower base editing in monkey compared to all other tracr designs (FIG. 7)-GA095, GA097, and GA346-under same experimental conditions.

[0061] FIG. 29 shows SpCas9 nuclease versus adenine base editing of PCSK9 in non-human primates. LNPs containing either SpCas9 mRNA and PCSK9 gRNA, (MS010/GA097) or ABE8.8 mRNA and PCSK9 gRNA (MA004/GA097) were infused intravenously in cynomolgus monkeys. The MS010/GA097 LNP was dosed at 0.75 and 1.5 mg/kg, and the MA004/GA097 LNP was dosed at 1 mg/kg total RNA dose. The MS010/GA097 LNP test article at 1.5 mg/kg produced low single digit gene editing in NHP whereas the ABE/GA097 test article produced about 40% adenine base editing at 1 mg/kg, showing the robustness of ABE base editor over SpCas9 system. All LNPs used in this study were prepared using same excipients and compositions.

[0062] FIG. 30 shows adenine base editing of PCSK9 in non-human primates. This graph depicts editing of the PCSK9 exon 1 splice-donor adenine base in the livers of cynomolgus monkeys (each bar is an individual animal, with editing recorded for multiple sampling areas) receiving an intravenous infusion of 0.5, 1.0, 1.5, or 3 mg/kg total RNA dose of LNP #1. LNP #2 at 3 mg/kg total RNA was dosed as a benchmark from a previous study. Both LNP formulations contain ABE8.8 mRNA MA004 and PCSK9 gRNA GA346.

[0063] FIG. 31 shows the reduction of PCSK9 protein levels from basal on Day 15, from the same experiment described in FIG. 30.

[0064] FIG. 32 depicts editing of the PCSK9 exon 1 splice-donor adenine base in the livers of four cynomolgus monkeys received an intravenous infusion of a 3 mg/kg total RNA dose of an LNP formulation with ABE8.8 mRNA MA004 and PCSK9 gRNA GA066. For each animal, editing was assessed in a liver biopsy sample at 2 weeks following treatment (n=1 sample per animal).

[0065] FIG. 33 depicts reduction of the blood PCSK9 protein levels in the four animals from FIG. 32 (animals that received 3 mg/kg total RNA dose of an LNP formulation with ABE8.8 mRNA MA004 and PCSK9 gRNA GA066) and in two contemporaneous control animals that received phosphate-buffered saline, comparing levels at various time points following treatment versus the baseline pre-treatment level (mean±standard deviation for each group, n=4 or n=2, at each time point). The dotted lines indicate 100% and 10% of baseline levels, respectively.

[0066] FIG. 34 depicts reduction of the blood LDL-C level in the four animals from FIG. 32 (animals that received 3 mg/kg total RNA dose of an LNP formulation with ABE8.8 mRNA MA004 and PCSK9 gRNA GA066) and in two contemporaneous control animals that received phosphate-buffered saline, comparing levels at various time points following treatment versus the baseline pre-treatment level (mean±standard deviation for each group, n=4 or n=2, at each time point). The dotted lines indicate 100% and 40% of baseline levels, respectively (top panel). The absolute values of individual animals are shown in the bottom panel.

[0067] FIG. 35 depicts reduction of Lipoprotein (a) in the four animals from FIG. 32 and in two contemporaneous control animals that received phosphate-buffered saline, comparing levels at various time points following treatment versus the baseline pre-treatment level (mean±standard deviation for each group, n=4 or n=2, at each time point).

[0068] FIG. 36 shows long-term phenotypic effects of liver PCSK9 base editing in non-human primates. Absolute values of aspartate aminotransferase (AST) (top panel), and alanine aminotransferase (ALT) (bottom panel) in the individual animals portrayed in FIG. 32 (n=4 animals treated with 3 mg/kg dose of an LNP formulation with ABE8.8 mRNA and PCSK9-gRNA, and n=2 animals treated with phosphate-buffered saline) at various time points following treatment.

[0069] FIGS. 37A-37G show liver function markers of individual animals. AST (FIG. 37A, FIG. 37B), ALT (FIG. 37A, FIG. 37C), Alkaline phosphate (FIG. 37A, FIG. 37D), gamma-glutamyltransferase (FIG. 37A, FIG. 37E), total bilirubin (FIG. 37A, FIG. 37F), and albumin (FIG. 37A, FIG. 37G), up to 15 days post dose, from cynomolgus monkeys that received an intravenous infusion of a 0.5, 1.0, or 1.5 mg/kg dose of an LNP formulation with ABE8.8 mRNA and PCSK9 gRNA.

[0070] FIG. 38 is a schematic of the representative candidate ONE-seq sites using a specific library designed against the cynomolgus genome. The PCSK9 protospacer is depicted at the top with a ONE-seq score of 1.00. All sites listed are ranked by decreasing ONE-seq score, with mismatches to the protospacer sequence identified. FIG. 38 discloses SEQ ID NO: 80, 2193-2196, 566, 2197-2205, 675, 2206-2220, 564, 2221-224, 638, 644, 506, 621, 2225-2226, 681, and 2227-2230, respectively, in order of appearance.

[0071] FIG. 39 shows gRNA-dependent, DNA off-target analysis of the sites identified in FIG. 38. Samples from cynomolgus primary hepatocytes (top panel) or cynomolgus monkey livers (bottom panel) were assessed for net A>G base editing (n=3 treated, n=3 untreated samples).

[0072] FIG. 40 shows net A>G % base editing at one off-target site (C5), identified in FIG. 39, from livers of NHPs that received either 0.5, 1.0, or 1.5 mg/kg LNP.

[0073] FIG. 41 shows base editing of ANGPTL3 in NHPs via LNPs formulated with an embodiment of base editor system, ABE mRNA MA004 and ANGPTL3 guide RNA GA067. Liver editing (left panel), ANGPTL3 protein levels (middle panel), and triglyceride levels (right panel) are shown for three NHPs.

[0074] FIG. 42 shows simultaneous ANGPTL3 and PCSK9 base editing with lipid nanoparticles (LNPs) formulated with an embodiment of base editor system, ABE mRNA MA002 and dual guide RNAs GA095 (hcPCSK9) and GA098 (hANGPTL3), in human primary hepatocytes at concentrations ranging from 0-2500 ng/test article/mL.

[0075] FIG. 43 shows Day 15 and Day 44 liver biopsy adenosine base editing results. NHPs were dosed with LNPs formulated with ABE8.8 mRNA MA004 and either a gRNA targeting PCSK9 (GA346) or a gRNA targeting ANGPTL3 (GA347) via intravenous infusion at a total RNA doses ranging from 0.5-2 mg/kg. Two weeks after administration of test article, biopsies were performed to assess base editing. After 30 days from the initiation of the study, the opposite LNP was administered. Following a second biopsy after an additional 2 weeks, the gDNA was extracted, and base editing was assessed using next generation sequencing. Results for PCSK9 base editing (top panel) and ANGPTL3 base editing (bottom panel) are shown. 2 mg/kg total RNA dose of LNP encapsulating ABE8.8 mRNA, PCSK9 gRNA GA346 and ANGPTL3 gRNA GA347 at 1:0.5:0.5 weight ratio produced robust synchronized PCSK9 and ANGPTL3 gene editing (Example 10).

[0076] FIG. 44 illustrates the corresponding % change in PCSK9 (top panel) and ANGPTL3 (bottom panel) protein levels from NHPs described in FIG. 43.

[0077] FIG. 45 illustrates that repeat LNP dosing in NHPs causes additive adenosine base editing in the liver, post Day 14, Day 46, and Day75 liver biopsies. NHPs were dosed with either LNP #1 or LNP #2 formulated with ABE8.8 mRNA MA004 and a gRNA targeting PCSK9 (GA097) via intravenous infusion at a total RNA doses of 0.5 mg/kg (see Example 10 for details on dosing intervals and related details).

[0078] FIG. 46 illustrates that repeat LNP dosing in NHPs causes additive base editing in the liver and translates to dose-dependent additive decrease in plasma PCSK9 protein levels over 90 days. As described in FIG. 45, NHPs were repeat dosed with LNPs formulated with ABE8.8 mRNA MA004 and a gRNA targeting PCSK9 (GA097). NHPs were dosed via intravenous infusion at a total RNA doses of 0.5 mg/kg at days 0, 30, and 60 (arrow is illustrated on graph to depict dosing). For description of analysis of PCSK9 protein levels, see detailed methods section.

[0079] FIG. 47 illustrates that repeat LNP dosing in NHPs causes additive base editing in the liver with only transient liver marker increase, and the transient liver marker increase correlates well with the day of each dose administered. The data shows 71 days of the liver marker levels of ALT, AST, total bilirubin, and creatine kinase post first dose (see Example 10, FIG. 45 for details).

[0080] FIG. 48 illustrates that repeat LNP dosing in NHPs causes additive base editing in the liver, with only transient liver marker increase showing up to 71 days post dose of the liver enzyme levels of LDH, GLDH, GGT, and ALP, in NHPs (See Example 10, FIG. 45 for details).

[0081] FIGS. 49A and 49B illustrate that base editing of ANGPTL3 results in long-term decreased ANGPTL3 protein and triglyceride levels after a single dose of LNP constituted with ABE8.8 mRNA MA004 and ANGPTL3 gRNA GA067. The results illustrates the effect of long-term adenine base editing of ANGPTL3 on ANGPTL3 protein (FIG. 49A) and triglycerides (FIG. 49B) in non-human primates over 6 months. ANGPTL3 protein (96% reduction) and triglyceride levels were substantially decreased upon single dose administration of the LNP, and remain stably reduced for more than 170 days (see Example 10 for details).

[0082] FIGS. 50A-50E illustrate the effect of LNP dosing in NHPs on cytokine activation and immune response. Cynomolgus monkeys received intravenous infusions of 0.5 mg/kg doses at specified time points (FIG. 50A and FIG. 50B) of an LNP formulation with ABE8.8 mRNA MA004 and PCSK9 gRNA GA346. Blood was collected at timepoints specified and the graph, and IP-10 and MCP-1 were analyzed. In additional studies, IL-6, MCP-1, and SC5b-9 (FIG. 50C, FIG. 50D, and FIG. 50E, respectively) were analyzed at different time points from blood collected from NHPs that received an intravenous infusion of 1.0 mg/kg total RNA dose of LNP formulated with MA004 and PCSK9 gRNA GA346.

[0083] FIG. 51 illustrates liver editing in NHPs at 15 days after treatment with an LNP containing SpCas9 mRNA/gRNA. FIG. 51 shows the results from gene editing of ANGPTL3 or PCSK9 in non-human primates. Cynomolgus monkeys received an intravenous infusion of a 1.5 mg/kg dose of an LNP formulation with SpCas9 mRNA MS004 and one gRNA targeting either ANGPTL3 (GA261-GA263) or PCSK9 (GA266-GA271). Upon necropsy after 2 weeks, two pieces from each liver lobe (8 pieces total) were isolated and gDNA was extracted. Samples were processed as described in the detailed methods section. Indel % was analyzed for each separate piece and are graphed as individual points. High editing efficiency was observed in most NHP livers.

[0084] FIG. 52 illustrates LDL-C levels in NHPs at 15 days after treatment with SpCas9/gRNA. FIG. 52 shows the reduction of LDL-C from gene editing of ANGPTL3 or PCSK9 in non-human primates. Cynomolgus monkeys received an intravenous infusion of a 1.5 mg/kg dose of an LNP formulation with SpCas9 mRNA MS004 and one gRNA targeting either ANGPTL3 (GA261-GA263) or PCSK9 (GA266-GA271. Samples were processed as described in the detailed methods section. All NHPs that received LNPs with SpCas9 mRNA/PCSK9 gRNA had at least 35% reduction in circulating LDL-C levels. Although more modest, LNPs with SpCas9 mRNA/ANGPTL3 gRNA had 10-25% reduction in circulating LDL-C levels.

[0085] FIG. 53 illustrates triglyceride levels in NHPs at 15 days after treatment with SpCas9/gRNA. FIG. 53 shows the triglyceride levels from gene editing of ANGPTL3 or PCSK9 in non-human primates. Cynomolgus monkeys received an intravenous infusion of a 1.5 mg/kg dose of an LNP formulation with SpCas9 mRNA MS004 and one gRNA targeting either ANGPTL3 (GA261-GA263) or PCSK9 (GA266-GA271. Samples were processed as described in the detailed methods section. NHPs that received LNPs with SpCas9 mRNA/ANGPTL3 gRNA had around 10-50% reduction in triglyceride levels. NHPs that received LNPs with SpCas9 mRNA/PCSK9 gRNA did not show a significant reduction in triglyceride levels.

[0086] FIGS. 54A and 54B illustrate that PACE-modifications to the gRNA decrease off-target editing efficiency. Human primary hepatocytes were transfected at 2500, 1250, 500, and 250 ng/test article/mL with SpCas9 mRNA (commercially purchased from Trilink) and a gRNA targeting PCSK9 with modifications to the tracr. Genomic DNA was processed, sequenced, and analyzed as described in the detailed methods section. GA156 was transfected to serve as a positive control. GA248 and GA249 contain PACE-modifications to the gRNA that have previously been demonstrated to decrease off-target editing efficiency. Indeed, although GA248 and GA249 had lower on-target editing compared to the unmodified gRNA, GA156 (FIG. 54A), GA248 and GA249 showed decreased off-target editing at an identified off-target site (FIG. 54B).

[0087] FIG. 55A illustrates the GC comparison of ABE-encoding nucleotides, MA004, MA019, MA020, MA021, and ABE8.8m (Table 23), as well as a more detailed look at MA004 (FIG. 55A, bottom panel). FIG. 55B illustrates the editing % obtained using ABE-encoding nucleotides, MA004, MA019, MA020, and MA021 (Table 23).

### DETAILED DESCRIPTION

[0088] Certain specific details of this description are set forth in order to provide a thorough understanding of various embodiments. However, one skilled in the art will understand that the present disclosure may be practiced without these details. In other instances, well-known structures have not been shown or described in detail to avoid unnecessarily obscuring descriptions of the embodiments.

[0089] Unless otherwise defined, all technical and scientific terms used herein have the same meaning as commonly understood by one of ordinary skill in the art to which this disclosure belongs. Although methods and materials similar or equivalent to those described herein can be used in the practice or testing of the present disclosure, suitable methods, and materials are described below. Further, headings provided herein are for convenience only and do not interpret the scope or meaning of the claimed disclosure. It is contemplated that any embodiment discussed in this specification can be implemented with respect to any method or composition of the present disclosure, and vice versa. Furthermore, compositions of the present disclosure can be used to achieve methods of the present disclosure.

### Definitions

[0090] To facilitate an understanding of the present disclosure, a number of terms and phrases are defined below.

[0091] As used in this specification and the appended claims, the singular forms “a,” “an,” and “the” include plural referents unless the content clearly dictates otherwise.

[0092] It should also be noted that the term “or” is generally employed in its sense including “and/or” unless the content clearly dictates otherwise. The terms “and/or” and “any combination thereof” and their grammatical equivalents as used herein, can be used interchangeably. These terms can convey that any combination is specifically contemplated. Solely for illustrative purposes, the following phrases “A, B, and/or C” or “A, B, C, or any combination thereof” can mean “A individually; B individually; C individually; A and B; B and C; A and C; and A, B, and C.” The term “or” can be used conjunctively or disjunctively, unless the context specifically refers to a disjunctive use.

[0093] The term “about” or “approximately” can mean within an acceptable error range for the particular value as determined by one of ordinary skill in the art, which will depend in part on how the value is measured or determined, i.e., the limitations of the measurement system. For example, “about” can mean within 1 or more than 1 standard deviation, per the practice in the art. Alternatively, “about” can mean a range of up to 20%, up to 10%, up to 5%, or up to 1% of a given value. Alternatively, particularly with respect to biological systems or processes, the term can mean within an order of magnitude, within 5-fold, and more preferably within 2-fold, of a value. Where particular values are described in the application and claims, unless otherwise stated the term “about” meaning within an acceptable error range for the particular value should be assumed.

[0094] As used in this specification and claim(s), the words “comprising” (and any form of comprising, such as “comprise” and “comprises”), “having” (and any form of having, such as “have” and “has”), “including” (and any form of including, such as “includes” and “include”) or “containing” (and any form of containing, such as “contains” and “contain”) are inclusive or open-ended and do not exclude additional, unrecited elements or method steps.

[0095] As used herein, “some embodiments,” “an embodiment,” “one embodiment,” “embodiments” or “other embodiments” means that a particular feature, structure, or characteristic described in connection with the embodiments is included in at least some embodiments, but not necessarily all embodiments, of the present disclosures.

[0096] The term “nucleic acid” as used herein refers to a polymer containing at least two nucleotides (i.e., deoxyribonucleotides or ribonucleotides) in either single- or double-stranded form and includes DNA and RNA. “Nucleotides” contain a sugar deoxyribose (DNA) or ribose (RNA), a base, and a phosphate group. Nucleotides are linked together through the phosphate groups. “Bases” include purines and pyrimidines, which further include natural compounds adenine, thymine, guanine, cytosine, uracil, inosine, and natural analogs, and synthetic derivatives of purines and pyrimidines, which include, but are not limited to, modifications which place new reactive groups such as, but not limited to, amines, alcohols, thiols, carboxylates, and alkylhalides. A nucleic acid includes any oligonucleotide or polynucleotide, with fragments containing up to 60 nucleotides generally termed oligonucleotides, and longer fragments termed polynucleotides. A deoxyribooligonucleotide consists of a 5-carbon sugar called deoxyribose joined covalently to phosphate at the 5′ and 3′ carbons of this sugar to form an alternating, unbranched polymer. DNA may be in the form of, e.g., antisense molecules, plasmid DNA, pre-condensed DNA, a PCR product, vectors, expression cassettes, chimeric sequences, chromosomal DNA, or derivatives and combinations of these groups. A ribooligonucleotide consists of a similar repeating structure where the 5-carbon sugar is ribose. Accordingly, the terms “polynucleotide” and “oligonucleotide” can refer to a polymer or oligomer of nucleotide or nucleoside monomers consisting of naturally-occurring bases, sugars and intersugar (backbone) linkages. Additionally, nucleic acids include nucleic acids containing known nucleotide analogs or modified backbone residues or linkages, which are synthetic, nonstandard, and/or non-naturally occurring, and which have similar binding properties as the reference nucleic acid. The nucleic acid may be modified at the base moiety (e.g., at one or more atoms that typically are available to form a hydrogen bond with a complementary nucleotide and/or at one or more atoms that are not typically capable of forming a hydrogen bond with a complementary nucleotide), sugar moiety, or phosphate backbone. Backbone modifications can include, but are not limited to, a phosphorothioate, a phosphorodithioate, a phosphoroselenoate, a phosphorodiselenoate, a phosphoroanilothioate, a phosphoraniladate, a phosphoramidate, and a phosphorodiamidate linkage. A phosphorothioate linkage substitutes a sulfur atom for a non-bridging oxygen in the phosphate backbone and delays nuclease degradation of oligonucleotides. A phosphorodiamidate linkage (N3′→P5′) allows preventing nuclease recognition and degradation. Backbone modifications can also include having peptide bonds instead of phosphorous in the backbone structure (e.g., N-(2-aminoethyl)-glycine units linked by peptide bonds in a peptide nucleic acid), or linking groups including carbamate, amides, and linear and cyclic hydrocarbon groups. Oligonucleotides with modified backbones are reviewed in Micklefield, Backbone modification of nucleic acids: synthesis, structure and therapeutic applications, Curr. Med. Chem., 8 (10): 1157-79, 2001 and Lyer et al., Modified oligonucleotides-synthesis, properties and applications, Curr. Opin. Mol. Ther., 1 (3): 344-358, 1999. Nucleic acid molecules described herein may contain a sugar moiety that comprises ribose or deoxyribose, as present in naturally occurring nucleotides, or a modified sugar moiety or sugar analog. The examples of modified sugar moieties include, but are not limited to, 2′-O-methyl, 2′-O-methoxyethyl, 2′-O-aminoethyl, 2′-Flouro, N3′→P5′ phosphoramidate, 2′dimethylaminooxyethoxy, 2′ 2′dimethylaminoethoxyethoxy, 2′-guanidinidium, 2′-O-guanidinium ethyl, carbamate modified sugars, and bicyclic modified sugars. 2′-O-methyl or 2′-O-methoxyethyl modifications promote the A-form or RNA-like conformation in oligonucleotides, increase binding affinity to RNA, and have enhanced nuclease resistance. Modified sugar moieties can also include having an extra bridge bond (e.g., a methylene bridge joining the 2′-O and 4′-C atoms of the ribose in a locked nucleic acid) or sugar analog such as a morpholine ring (e.g., as in a phosphorodiamidate morpholino). Examples of such analogs and/or modified residues include, but are not limited to diaminopurine, 5-fluorouracil, 5-bromouracil, 5-chlorouracil, 5-iodouracil, hypoxanthine, xantine, 4-acetylcytosine, 5-(carboxyhydroxylmethyl) uracil, 5-carboxymethylaminomethyl-2-thiouridine, 5-carboxymethylaminomethyluracil, dihydrouracil, beta-D-galactosylqueosine, inosine, N6-isopentenyladenine, 1-methylguanine, 1-methylinosine, 2,2-dimethylguanine, 2-methyladenine, 2-methylguanine, 3-methylcytosine, 5-methylcytosine, N6-adenine, 7-methylguanine, 5-methylaminomethyluracil, 5-methoxyaminomethyl-2-thiouracil, beta-D-mannosylqueosine, 5′-methoxycarboxymethyluracil, 5-methoxyuracil, 2-methylthio-N6-isopentenyladenine, uracil-5-oxyacetic acid (v), wybutoxosine, pseudouracil, queosine, 2-thiocytosine, 5-methyl-2-thiouracil, 2-thiouracil, 4-thiouracil, 5-methyluracil, uracil-5-oxyacetic acid methylester, 5-methyl-2-thiouracil, 3-(3-amino-3-N-2-carboxypropyl) uracil, (acp3) w, 2,6-diaminopurine, methyl phosphonates, chiral-methyl phosphonates, 2′-O-methyl ribonucleotides, peptide-nucleic acids (PNAs), and the like. In some cases, nucleotides may include modifications in their phosphate moieties, including modifications to a triphosphate moiety. Non-limiting examples of such modifications include phosphate chains of greater length (e.g., a phosphate chain having, 4, 5, 6, 7, 8, 9, 10 or more phosphate moieties) and modifications with thiol moieties (e.g., alpha-thiotriphosphate and beta-thiotriphosphates). Such modified or substituted oligonucleotides are often preferred over native forms because of properties such as, for example, enhanced cellular uptake, reduced immunogenicity, and increased stability in the presence of nucleases. Thus, the terms “polynucleotide” and “oligonucleotide” can also include polymers or oligomers comprising non-naturally occurring monomers, or portions thereof, which function similarly.

[0097] Unless otherwise indicated, a particular nucleic acid sequence also implicitly encompasses conservatively modified variants thereof (e.g., degenerate codon substitutions), alleles, orthologs, SNPs, and complementary sequences as well as the sequence explicitly indicated. Specifically, degenerate codon substitutions may be achieved by generating sequences in which the third position of one or more selected (or all) codons is substituted with mixed-base and/or deoxyinosine residues (Batzer et al., Nucleic Acid Res., 19:5081 (1991); Ohtsuka et al., J. Biol. Chem., 260:2605-2608 (1985); Rossolini et al., Mol. Cell. Probes, 8:91-98 (1994)).

[0098] The present disclosure encompasses isolated or substantially purified nucleic acid molecules and compositions containing those molecules. As used herein, an “isolated” or “purified” DNA molecule or RNA molecule is a DNA molecule or RNA molecule that exists apart from its native environment. An isolated DNA molecule or RNA molecule may exist in a purified form or may exist in a non-native environment such as, for example, a transgenic host cell. For example, an “isolated” or “purified” nucleic acid molecule or biologically active portion thereof, is substantially free of other cellular material, or culture medium when produced by recombinant techniques, or substantially free of chemical precursors or other chemicals when chemically synthesized. In one embodiment, an “isolated” nucleic acid is free of sequences that naturally flank the nucleic acid (i.e., sequences located at the 5′ and 3′ ends of the nucleic acid) in the genomic DNA of the organism from which the nucleic acid is derived. For example, in some embodiments, the isolated nucleic acid molecule can contain less than about 5 kb, 4 kb, 3 kb, 2 kb, 1 kb, 0.5 kb, or 0.1 kb of nucleotide sequences that naturally flank the nucleic acid molecule in genomic DNA of the cell from which the nucleic acid is derived.

[0099] The term “vector,” as used herein, refers to a nucleic acid molecule capable of transporting another nucleic acid to which it has been linked. In some examples, a vector is an expression vector that is capable of directing the expression of nucleic acids to which they are operatively linked. The term “operably linked,” as used herein, means that the nucleotide sequence of interest is linked to regulatory sequence(s) in a manner that allows for expression of the nucleotide sequence. The term “regulatory sequence,” as used herein, includes, but is not limited to promoters, enhancers and other expression control elements. Such regulatory sequences are well known in the art and are described, for example, in Goeddel; Gene Expression Technology: Methods in Enzymology 185, Academic Press, San Diego, CA (1990). Examples of expression vectors include, but are not limited to, plasmid vectors, viral vectors based on vaccinia virus, poliovirus, adenovirus, adeno-associated virus, SV40, herpes simplex virus, human immunodeficiency virus, retrovirus (e.g., Murine Leukemia Virus, spleen necrosis virus, and vectors derived from retroviruses such as Rous Sarcoma Virus, Harvey Sarcoma Virus, avian leukosis virus, a lentivirus, human immunodeficiency virus, myeloproliferative sarcoma virus, and mammary tumor virus) and other recombinant vectors.

[0100] As used herein, the terms “protein,” “polypeptide,” and “peptide” are used interchangeably and refer to a polymer of amino acid residues linked via peptide bonds and which may be composed of two or more polypeptide chains. The terms “polypeptide,” “protein,” and “peptide” refer to a polymer of at least two amino acid monomers joined together through amide bonds. An amino acid may be the L-optical isomer or the D-optical isomer. More specifically, the terms “polypeptide,” “protein,” and “peptide” refer to a molecule composed of two or more amino acids in a specific order; for example, the order as determined by the base sequence of nucleotides in the gene or RNA coding for the protein. Proteins are essential for the structure, function, and regulation of the body's cells, tissues, and organs, and each protein has unique functions. Examples are hormones, enzymes, antibodies, and any fragments thereof. In some cases, a protein can be a portion of the protein, for example, a domain, a subdomain, or a motif of the protein. In some cases, a protein can be a variant (or mutation) of the protein, wherein one or more amino acid residues are inserted into, deleted from, and/or substituted into the naturally occurring (or at least a known) amino acid sequence of the protein. A protein or a variant thereof can be naturally occurring or recombinant. Methods for detection and/or measurement of polypeptides in biological material are well known in the art and include, but are not limited to, Western-blotting, flow cytometry, ELISAs, RIAs, and various proteomics techniques. An exemplary method to measure or detect a polypeptide is an immunoassay, such as an ELISA. This type of protein quantitation can be based on an antibody capable of capturing a specific antigen, and a second antibody capable of detecting the captured antigen. Exemplary assays for detection and/or measurement of polypeptides are described in Harlow, E. and Lane, D. Antibodies: A Laboratory Manual, (1988), Cold Spring Harbor Laboratory Press.

[0101] The term “sequence identity,” as used herein, refers to the amount of nucleotide which match exactly between two different sequences. When comparing RNA and DNA sequences Uracil and Thymine bases are considered to be the same base. Gaps are not counted and the measurement is typically in relation to the shorter of the two sequences.

[0102] For example:
[0103] A: AAGGCTT
[0104] B: AAGGC
[0105] C: AAGGCAT
[0106] Here identity (A,B)=100% (5 identical nucleotides/min (length (A),length (B))).
[0107] Identity (B,C)=100%, but identity (A,C)=85% ((6 identical nucleotides/7). So 100% identity does not mean two sequences are the same.

[0108] The term “sequence similarity,” as used herein, can be described as an optimal matching problem that finds the minimal number of edit operations (inserts, deletes, and substitutions) in order to transform the one sequence into an exact copy of the other sequence being aligned (edit distance). Using this, the percentage sequence similarity of the examples above are sim (A,B)=60%, sim (B,C)-60%, sim (A,C)-86% (semi-global, sim=1-(edit distance/unaligned length of the shorter sequence)).

[0109] A “subject” in need thereof, refers to an individual who has a disease, a symptom of the disease, or a predisposition toward the disease, with the purpose to cure, heal, alleviate, relieve, alter, remedy, ameliorate, improve, or affect the disease, the symptom of the disease, or the predisposition toward the disease. In some embodiments, the subject has hypercholesterolemia. In some embodiments, the subject has atherosclerotic vascular disease. In some embodiments, the subject has hypertriglyceridemia. In some embodiments, the subject has diabetes. The term “subject” or “patient” encompasses mammals. Examples of mammals include, but are not limited to, any member of the mammalian class: humans, non-human primates such as chimpanzees, and other apes and monkey species; farm animals such as cattle, horses, sheep, goats, swine; domestic animals such as rabbits, dogs, and cats; laboratory animals including rodents, such as rats, mice and guinea pigs, and the like.

[0110] The term “condition,” as used herein, includes diseases, disorders, and susceptibilities. In some embodiments, the condition is an atherosclerotic vascular disease. In some embodiments, the condition is a hypertriglyceridemia. In some embodiments, the condition is a diabetes.

[0111] The term “atherosclerosis” or “atherosclerotic vascular disease,” as used herein, refers to a disease in which the inside of an artery narrows due to the buildup of plaque. In some embodiments, it may result in coronary artery disease, stroke, peripheral artery disease, or kidney problems.

[0112] The term “hypertriglyceridemia,” as used herein, refers to high (hyper-) blood levels (-emia) of triglycerides, the most abundant fatty molecule in most organisms. In some embodiments, elevated levels of triglycerides are associated with atherosclerosis, even in the absence of hypercholesterolemia (high cholesterol levels), and predispose to cardiovascular disease. In some embodiments, very high triglyceride levels increase the risk of acute pancreatitis. In some embodiments, hypertriglyceridemia is associated with overeating, obesity, diabetes mellitus and insulin resistance, excess alcohol consumption, kidney failure, nephrotic syndrome, genetic predisposition (e.g., familial combined hyperlipidemia, i.e., Type II hyperlipidemia), lipoprotein lipase deficiency, lysosomal acid lipase deficiency, cholesteryl ester storage disease, certain medications (e.g., isotretinoin, hydrochlorothiazide diuretics, beta blockers, protease inhibitors), hypothyroidism (underactive thyroid), systemic lupus erythematosus and associated autoimmune responses, glycogen storage disease type 1, propofol, or HIV medications.

[0113] The term “diabetes,” as used herein, refers to a group of metabolic disorders characterized by a high blood sugar level over a prolonged period of time. In some embodiments, diabetes is type 1 diabetes that results from the pancreas's failure to produce enough insulin due to loss of beta cells. In some embodiments, diabetes is type 2 diabetes characterized by insulin resistance, a condition in which cells fail to respond to insulin properly. In some embodiments, diabetes is gestational diabetes that occurs when pregnant women without a previous history of diabetes develop high blood sugar levels.

[0114] The term “low-density lipoprotein (LDL),” as used herein, refers to a microscopic blob made up of an outer rim of lipoprotein and a cholesterol center. In some embodiments, LDL has a highly hydrophobic core composed of a polyunsaturated fatty acid known as linoleate and hundreds to thousands esterified and unesterified cholesterol molecules. In some embodiments, the core of LDL also carries triglycerides and other fats and is surrounded by a shell of phospholipids and unesterified cholesterol.

[0115] The term “high-density lipoprotein (HDL),” as used herein, refers to the smallest lipoprotein particles. In embodiments, plasma enzyme lecithin-cholesterol acyltransferase (LCAT) converts the free cholesterol into cholesteryl, which is then sequestered into the core of the lipoprotein particle, eventually causing the newly synthesized HDL to assume a spherical shape. In embodiments, HDL particles increase in size as they circulate through the bloodstream and incorporate more cholesterol and phospholipid molecules from cells and other lipoproteins.

[0116] The term “cholesterol,” as used herein, refers to a lipid with a unique structure composed of four linked hydrocarbon rings forming the bulky steroid structure. The term “triglyceride,” as used herein, refers to a tri-ester composed of a glycerol bound to three fatty acid molecules. In some embodiments, the fatty acids are saturated or unsaturated fatty acids.

[0117] The terms “treat,” “treating,” or “treatment,” and its grammatical equivalents as used herein, can include alleviating, abating, or ameliorating at least one symptom of a disease or a condition, preventing additional symptoms, inhibiting the disease or the condition, e.g., delaying, decreasing, suppressing, attenuating, diminishing, arresting, or stabilizing the development or progression of a disease or the condition, relieving the disease or the condition, causing regression of the disease or the condition, relieving a condition caused by the disease or the condition, reducing disease severity, or stopping the symptoms of the disease or the condition either prophylactically and/or therapeutically. “Treating” also includes lessening the frequency of occurrence or recurrence, or the severity, of any symptoms or other ill effects related to a disease or condition and/or the side effects associated with the disease or condition. “Treating” does not necessarily require curative results. It is appreciated that, although not precluded, treating a disorder or condition also does not require that the disorder, condition, or symptoms associated therewith be completely eliminated. The term “treating” encompasses the concept of “managing” which refers to reducing the severity of a particular disease or disorder in a patient or delaying its recurrence, e.g., lengthening the period of remission in a patient who had suffered from the disease. “Treating” may refer to the application or administration or a composition to a subject after the onset, or suspected onset, of a disease or condition.

[0118] The term “treating” further encompasses the concept of “prevent,” “preventing,” and “prevention.” The terms “prevent,” “preventing,” and “prevention,” as used herein, refer to a decrease in the occurrence of pathology of a condition in a subject, who does not have, but is at risk of or susceptible to developing a disease or condition. The prevention may be complete, e.g., the total absence of pathology of a condition in a subject. The prevention may also be partial, such that the occurrence of pathology of a condition in a subject is less than that which would have occurred without the present disclosure.

[0119] By “treating or preventing a condition,” for example, as compared with an equivalent untreated control, alleviating a symptom of a disorder may involve reduction or degree of prevention at least 3%, 5%, 10%, 20%, 40%, 50%, 60%, 80%, 90%, 95%, 98%, 99%, 99.5%, 99.9%, or 100% as measured by any standard technique. In some embodiments, alleviating a symptom of a disorder may involve reduction or degree of prevention by at least 2, 3, 4, 5, 10, 20, 25, 30, 40, 50, 60, 70, 80, 90, 100, 200, 300, 400, 500, 600, 700, 800, 900, 1000, 2000, 3000, 4000, 5000, 6000, 7000, 8000, 9000, or 10000 fold as compared with an equivalent untreated control.

[0120] As used therein, “delaying” the development of a disease means to defer, hinder, slow, retard, stabilize, and/or postpone progression of the disease. This delay can be of varying lengths of time, depending on the history of the disease and/or individuals being treated. A method that “delays” or alleviates the development of a disease, or delays the onset of the disease, is a method that reduces probability of developing one or more symptoms of the disease in a given time frame and/or reduces extent of the symptoms in a given time frame, when compared to not using the method. Such comparisons are typically based on clinical studies, using a number of subjects sufficient to give a statistically significant result.

[0121] “Development” or “progression” of a disease means initial manifestations and/or ensuing progression of the disease. Development of the disease can be detectable and assessed using standard clinical techniques as well known in the art. However, development also refers to progression that may be undetectable. For purpose of this disclosure, development or progression refers to the biological course of the symptoms. “Development” includes occurrence, recurrence, and onset.

[0122] As used herein “onset” or “occurrence” of a disease includes initial onset and/or recurrence.

[0123] “Administering” and its grammatical equivalents as used herein can refer to providing pharmaceutical compositions described herein to a subject or a patient. Conventional methods, known to those of ordinary skill in the art of medicine, can be used to administer the composition to the subject, depending upon the type of disease to be treated or the site of the disease. For example, the composition can be administered, e.g., orally, parenterally, by inhalation spray, topically, rectally, nasally, buccally, vaginally, via an implanted reservoir, or via infusion. One or more such routes can be employed.

[0124] The term “parenteral” as used herein includes subcutaneous, intracutaneous, intravenous, intramuscular, intraperitoneal, intradermal, intraarterial, intrasynovial, intrastemal, intrathecal, intravascular, intralesional, and intracranial injection or infusion techniques. In addition, it can be administered to the subject via injectable depot routes of administration such as using 1-, 3—, or 6-month depot injectable or biodegradable materials and methods.

[0125] By “co-administering” is meant administering one or more additional therapeutic regimens or agents or treatments and the composition of the disclosure sufficiently close in time to enhance the effect of one or more additional therapeutic agents, or vice versa. In this regard, the composition of the disclosure described herein can be administered simultaneously with one or more additional therapeutic regimens or agents or treatments, at a different time, or on an entirely different therapeutic schedule (e.g., the first treatment can be daily, while the additional treatment is weekly). For example, in embodiments, the secondary therapeutic regimens or agents or treatments are administered simultaneously, prior to, or subsequent to the composition of the disclosure.

[0126] The terms “pharmaceutical composition” and its grammatical equivalents as used herein can refer to a mixture or solution comprising a therapeutically effective amount of an active pharmaceutical ingredient together with one or more pharmaceutically acceptable excipients, carriers, and/or a therapeutic agent to be administered to a subject, e.g., a human in need thereof.

[0127] The term “pharmaceutically acceptable” and its grammatical equivalents as used herein can refer to an attribute of a material which is useful in preparing a pharmaceutical composition that is generally safe, non-toxic, and neither biologically nor otherwise undesirable and is acceptable for veterinary as well as human pharmaceutical use. “Pharmaceutically acceptable” can refer a material, such as a carrier or diluent, which does not abrogate the biological activity or properties of the compound, and is relatively nontoxic, i.e., the material may be administered to a subject without causing undesirable biological effects or interacting in a deleterious manner with any of the components of the pharmaceutical composition in which it is contained.

[0128] A “pharmaceutically acceptable excipient, carrier, or diluent” refers to an excipient, carrier, or diluent that can be administered to a subject, together with an agent, and which does not destroy the pharmacological activity thereof and is nontoxic when administered in doses sufficient to deliver a therapeutic amount of the agent.

[0129] A “pharmaceutically acceptable salt” may be an acid or base salt that is generally considered in the art to be suitable for use in contact with the tissues of human beings or animals without excessive toxicity, irritation, allergic response, or other problem or complication. Such salts include mineral and organic acid salts of basic residues such as amines, as well as alkali or organic salts of acidic residues such as carboxylic acids. Specific pharmaceutical salts include, but are not limited to, salts of acids such as hydrochloric, phosphoric, hydrobromic, malic, glycolic, fumaric, sulfuric, sulfamic, sulfanilic, formic, toluenesulfonic, methanesulfonic, benzene sulfonic, ethane disulfonic, 2-hydroxyethyl sulfonic, nitric, benzoic, 2-acetoxybenzoic, citric, tartaric, lactic, stearic, salicylic, glutamic, ascorbic, pamoic, succinic, fumaric, maleic, propionic, hydroxymaleic, hydroiodic, phenylacetic, alkanoic such as acetic, HOOC—(CH₂)n-COOH where n is 0-4, and the like. Similarly, pharmaceutically acceptable cations include, but are not limited to sodium, potassium, calcium, aluminum, lithium and ammonium. Those of ordinary skill in the art will recognize from this disclosure and the knowledge in the art that further pharmaceutically acceptable salts include those listed by Remington's Pharmaceutical Sciences, 17th ed., Mack Publishing Company, Easton, PA, p. 1418 (1985). In general, a pharmaceutically acceptable acid or base salt can be synthesized from a parent compound that contains a basic or acidic moiety by any conventional chemical method. Briefly, such salts can be prepared by reacting the free acid or base forms of these compounds with a stoichiometric amount of the appropriate base or acid in an appropriate solvent.

[0130] The term “therapeutic agent” can refer to any agent that, when administered to a subject, has a therapeutic, diagnostic, and/or prophylactic effect and/or elicits a desired biological and/or pharmacological effect. Therapeutic agents can also be referred to as “actives” or “active agents.” Such agents include, but are not limited to, cytotoxins, radioactive ions, chemotherapeutic agents, small molecule drugs, proteins, and nucleic acids.

[0131] “A therapeutically effective amount” as used herein refers to the amount of each composition of the present disclosure required to confer therapeutic effect on the subject, either alone or in combination with one or more other therapeutic agents. Hence, as used herein, the term “therapeutically effective amount” means an amount of an agent to be delivered (e.g., nucleic acid, composition, therapeutic agent, prophylactic agent, etc.) that is sufficient, when administered to a subject suffering from or susceptible to a disease, disorder, and/or condition, to treat, improve symptoms of, diagnose, prevent, and/or delay the onset of the disease, disorder, and/or condition. In terms of treatment, a “therapeutically effective amount” is an amount that is sufficient to palliate, ameliorate, stabilize, reverse or slow the progression of a disease or a condition, e.g., an atherosclerotic vascular disease, hypertriglyceridemia, or diabetes. A “therapeutically effective amount” varies, as recognized by those skilled in the art, depending on the particular condition being treated, the severity of the condition, the individual subject parameters including age, physical condition, size, gender and weight, the duration of the treatment, the nature of concurrent therapy (if any), the specific route of administration and like factors within the knowledge and expertise of the health practitioner. These factors are well known to those of ordinary skill in the art and can be addressed with no more than routine experimentation. It is generally preferred that a maximum dose of the individual components or combinations thereof be used, that is, the highest safe dose according to sound medical judgment. It will be understood by those of ordinary skill in the art, however, that a subject may insist upon a lower dose or tolerable dose for medical reasons, psychological reasons or for virtually any other reasons. Additionally, other medication the patient may be receiving will affect the determination of the therapeutically effective amount of the therapeutic agent to administer. Empirical considerations, such as the half-life, generally will contribute to the determination of the dosage. A “therapeutically effective amount” may be of any of the compositions of the disclosure used alone or in conjunction with one or more agents used to treat a condition. A therapeutically effective amount can be administered in one or more administrations.

[0132] An effective initial method to determine a “therapeutically effective amount” may be by carrying out cell culture assays (for example, using neuronal cells) or using animal models (for example, mice, rats, rabbits, dogs or pigs). A dose may be formulated in animal models to achieve a concentration range that includes the IC50 (i.e., the concentration of the composition which achieves a half-maximal inhibition of symptoms) as determined in cell culture. Such information can be used to more accurately determine useful doses in humans. In addition to determining the appropriate concentration range for an disclosure composition to be therapeutically effective, animal models may also yield other relevant information such as preferable routes of administration that will give maximum effectiveness. Adjusting the dose to achieve maximal efficacy in humans based on the methods described above and other methods is well within the capabilities of the ordinarily skilled artisan.

[0133] Ranges provided herein are understood to be shorthand for all of the values within the range. For example, a range of 1 to 50 is understood to include any number, combination of numbers, or sub-range from the group consisting of 1, 2, 3, 4, 5, 6, 7, 8, 9, 10, 11, 12, 13, 14, 15, 16, 17, 18, 19, 20, 21, 22, 23, 24, 25, 26, 27, 28, 29, 30, 31, 32, 33, 34, 35, 36, 37, 38, 39, 40, 41, 42, 43, 44, 45, 46, 47, 48, 49, or 50, as well as all intervening decimal values between the aforementioned integers such as, for example, 1.1, 1.2, 1.3, 1.4, 1.5, 1.6, 1.7, 1.8, and 1.9. With respect to sub-ranges, “nested sub-ranges” that extend from either end point of the range are specifically contemplated. For example, a nested sub-range of an exemplary range of 1 to 50 may comprise 1 to 10, 1 to 20, 1 to 30, and 1 to 40 in one direction, or 50 to 40, 50 to 30, 50 to 20, and 50 to 10 in the other direction.

[0134] The term “protospacer,” or “target sequence” and their grammatical equivalents as used herein can refer to a DNA sequence of a target gene. In the native state, a protospacer is adjacent to a PAM (protospacer adjacent motif). The term “spacer” can be the RNA version of the protospacer that binds to the complementary strand of the protospacer. A spacer can be within a guide RNA (gRNA). The site of cleavage by an RNA-guided nuclease is within a protospacer sequence. Please see FIG. 1A for an illustration.

[0135] The term “base editing,” “gene editing,” or “gene modification” and its grammatical equivalents as used herein can refer to genetic engineering in which one or more nucleotides are inserted, replaced, or removed from a genome. Gene editing can be performed using a nuclease (e.g., a natural-existing nuclease or an artificially engineered nuclease). Gene modification can include introducing a double stranded break, a non-sense mutation, a frameshift mutation, a splice site alteration, or an inversion in a polynucleotide sequence, e.g., a target polynucleotide sequence.

[0136] The term “base editor (BE)” or “nucleobase editor (NBE)” as used herein can refer to an agent that binds a polynucleotide and has nucleobase modifying activity. In various embodiments, the base editor comprises a nucleobase modifying polypeptide (e.g., a deaminase) and a nucleic acid programmable nucleotide binding domain in conjunction with a guide polynucleotide (e.g., guide RNA), or nucleic acids encoding the programmable nucleotide binding domain and the deaminase. In various embodiments, the agent is a biomolecular complex comprising a protein domain having base editing activity, i.e., a domain capable of modifying a base (e.g., A, T, C, G, or U) within a nucleic acid molecule (e.g., DNA), or a nucleic acid encoding the same. In some embodiments, the polynucleotide programmable DNA binding domain is fused or linked to a deaminase domain, resulting in a base editor fusion protein. In some embodiments, the base editor comprises a nucleic acid encoding the base editor fusion protein, e.g., a mRNA encoding the base editor fusion protein. The base editor fusion protein may comprise one or more linkers, for example, peptide linkers. In one embodiment, the agent is a fusion protein comprising a domain having base editing activity. In another embodiment, the protein domain having base editing activity is linked to the guide RNA (e.g., via an RNA binding motif on the guide RNA and an RNA binding domain fused to the deaminase). In some embodiments, the domain having base editing activity is capable of deaminating a base within a nucleic acid molecule. In some embodiments, the base editor is capable of deaminating one or more bases within a DNA molecule. In some embodiments, the base editor is capable of deaminating an adenosine (A) within DNA. In some embodiments, the base editor is an adenosine base editor (ABE). In some embodiments, the base editor is capable of deaminating an cytosine (C) within DNA. In some embodiments, the base editor is a cytosine base editor (CBE).

[0137] The term “base editor system” refers to a system for editing a nucleobase of a target nucleotide sequence. In various embodiments, the base editor system comprises (1) a polynucleotide programmable nucleotide binding domain (e.g., Cas9); (2) a deaminase domain (e.g., an adenosine deaminase or a cytidine deaminase) for deaminating said nucleobase; and (3) one or more guide polynucleotide (e.g., guide RNA). In some embodiments, the base editor system comprises a base editor fusion protein comprising (1) and (2). In some embodiments, the polynucleotide programmable nucleotide binding domain is a polynucleotide programmable DNA binding domain. In some embodiments, the base editor is an adenine or adenosine base editor (ABE). In some embodiments, the base editor is a cytosine base editor (CBE).

### Nucleobase Editor Systems

[0138] In some aspects, provided herein are base editor systems capable of nucleobase modifications. In some embodiments, the base editor system comprises (i) a guide polynucleotide or a nucleic acid encoding same, and (ii) a base editor fusion protein comprising a programmable DNA binding domain and a deaminase, or a nucleic acid encoding same. In some embodiments, the base editor system comprises a guide polynucleotide. In some embodiments, the base editor system comprises a nucleic acid encoding a guide polynucleotide. In some embodiments, the base editor system comprises a base editor fusion protein comprising a programmable DNA binding domain and a deaminase. In some embodiments, the base editor system comprises a nucleic acid encoding a base editor fusion protein comprising a programmable DNA binding domain and a deaminase.

[0139] In some embodiments, the guide polynucleotide directs the base editor system to effect a nucleobase alteration in a PCSK9 or ANGPTL3 gene in vivo when administered to a subject.

[0140] In some embodiments, the base alteration occurs in at least 35% of whole liver cells in the subject as measured by next generation sequencing or Sanger sequencing.

[0141] In some embodiments, the base alteration occurs in at least 1%, 2%, 3%, 4%, 5%, 6%, 7%, 8%, 9%, 10%, 15%, 20%, 25%, 30%, 35%, 40%, 45%, 50%, 55%, 60%, 65%, 70%, 75%, 80%, 85%, 90%, 95%, 97%, 98%, 99%, 99.3%, 99.5%, 99.7%, 99.8%, or 99.9% of whole liver cells in the subject as measured by next generation sequencing or Sanger sequencing. In some embodiments, the base alteration occurs in at most 1%, 2%, 3%, 4%, 5%, 6%, 7%, 8%, 9%, 10%, 15%, 20%, 25%, 30%, 35%, 40%, 45%, 50%, 55%, 60%, 65%, 70%, 75%, 80%, 85%, 90%, 95%, 97%, 98%, 99%, 99.3%, 99.5%, 99.7%, 99.8%, or 99.9% of whole liver cells in the subject as measured by next generation sequencing or Sanger sequencing. In some embodiments, the base alteration occurs in 1%-99.9%, 2%-99.9%, 3%-99.9%, 4%-99.9%, 5%-99.9%, 6%-99.9%, 7%-99.9%, 8%-99.9%, 9%-99.9%, 10%-99.9%, 15%-99.9%, 20%-99.9%, 25%-99.9%, 30%-99.9%, 35%-99.9%, 40%-99.9%, 45%-99.9%, 50%-99.9%, 55%-99.9%, 60%-99.9%, 65%-99.9%, 70%-99.9%, 75%-99.9%, 80%-99.9%, 85%-99.9%, 90%-99.9%, or 95-99.9% of whole liver cells in the subject as measured by next generation sequencing or Sanger sequencing. In some embodiments, the base alteration occurs in 1%-99.5%, 1%-99%, 1%-98%, 1%-97%, 1%-96%, 1%-95%, 1%-90%, 1%-85%, 1%-80%, 1%-75%, 1%-70%, 1%-65%, 1%-60%, 1%-55%, 1%-50%, 1%-45%, 1%-40%, 1%-35%, 1%-30%, 1%-25%, 1%-20%, 1%-15%, 1%-10%, 1%-9%, 1%-8%, 1%-7%, 1%-6%, 1%-5%, 1%-4%, 1%-3%, or 1%-2% of whole liver cells in the subject as measured by next generation sequencing or Sanger sequencing. In some embodiments, the base alteration occurs in 1%-90%, 5%-85%, 10%-80%, 15%-75%, 20%-70%, 25%-65%, 30%-60%, 35%-55%, or 40%-50% of whole liver cells in the subject as measured by next generation sequencing or Sanger sequencing. In some embodiments, the base alteration occurs in 100% of whole liver cells in the subject as measured by next generation sequencing or Sanger sequencing.

[0142] In some embodiments, the base alteration occurs in hepatocytes in the subject. In some embodiments, the base alteration occurs in at least 30% of hepatocytes in the subject as measured by next generation sequencing or Sanger sequencing. In some embodiments, the base alteration occurs in hepatocytes in the subject. In some embodiments, the base alteration occurs in at least % of hepatocytes in the subject as measured by next generation sequencing or Sanger sequencing. In some embodiments, the base alteration occurs in at least 1%, 2%, 3%, 4%, 5%, 6%, 7%, 8%, 9%, 10%, 15%, 20%, 25%, 30%, 35%, 40%, 45%, 50%, 55%, 60%, 65%, 70%, 75%, 80%, 85%, 90%, 95%, 97%, 98%, 99%, 99.3%, 99.5%, 99.7%, 99.8%, or 99.9% of hepatocytes in the subject as measured by next generation sequencing or Sanger sequencing. In some embodiments, the base alteration occurs in at most 1%, 2%, 3%, 4%, 5%, 10%, 15%, 20%, 25%, 30%, 35%, 40%, 45%, 50%, 55%, 60%, 65%, 70%, 75%, 80%, 85%, 90%, 95%, 97%, 98%, 99%, 99.3%, 99.5%, 99.7%, 99.8%, or 99.9% of hepatocytes in the subject as measured by next generation sequencing or Sanger sequencing. In some embodiments, the base alteration occurs in 1%-99.9%, 2%-99.9%, 3%-99.9%, 4%-99.9%, 5%-99.9%, 6%-99.9%, 7%-99.9%, 8%-99.9%, 9%-99.9%, 10%-99.9%, 15%-99.9%, 20%-99.9%, 25%-99.9%, 30%-99.9%, 35%-99.9%, 40%-99.9%, 45%-99.9%, 50%-99.9%, 55%-99.9%, 60%-99.9%, 65%-99.9%, 70%-99.9%, 75%-99.9%, 80%-99.9%, 85%-99.9%, 90%-99.9%, or 95-99.9% of hepatocytes in the subject as measured by next generation sequencing or Sanger sequencing. In some embodiments, the base alteration occurs in 1%-99.5%, 1%-99%, 1%-98%, 1%-97%, 1%-96%, 1%-95%, 1%-90%, 1%-85%, 1%-80%, 1%-75%, 1%-70%, 1%-65%, 1%-60%, 1%-55%, 1%-50%, 1%-45%, 1%-40%, 1%-35%, 1%-30%, 1%-25%, 1%-20%, 1%-15%, 1%-10%, 1%-9%, 1%-8%, 1%-7%, 1%-6%, 1%-5%, 1%-4%, 1%-3%, or 1%-2% hepatocytes in the subject as measured by next generation sequencing or Sanger sequencing. In some embodiments, the base alteration occurs in 1%-90%, 5%-85%, 10%-80%, 15%-75%, 20%-70%, 25%-65%, 30%-60%, 35%-55%, or 40%-50% of hepatocytes in the subject as measured by next generation sequencing or Sanger sequencing. In some embodiments, the base alteration occurs in 100% of hepatocytes in the subject as measured by next generation sequencing or Sanger sequencing.

[0143] In some embodiments, the base alteration occurred in whole liver cells in the subject is measured by next generation sequencing. In some embodiments, the base alteration occurred in whole liver cells in the subject is measured by Sanger sequencing. In some embodiments, the base alteration occurred in hepatocytes in the subject is measured by next generation sequencing. In some embodiments, the base alteration occurred in hepatocytes in the subject is measured by Sanger sequencing.

[0144] In some embodiments, the nucleobase alteration results in a reduction of at least 35% in blood PCSK9 protein level in the subject as compared to prior to the administration as measured by ELISA, Western blots, or LC-MS/MS. In some embodiments, the nucleobase alteration results in a reduction of at least 35% in blood ANGPTL3 protein level in the subject as compared to prior to the administration as measured by ELISA, Western blots, or LC-MS/MS

[0145] In some embodiments, the nucleobase alteration results in a reduction of at least 30%, 35%, 40%, 45%, 50%, 55%, 60%, 65%, 70%, 75%, 80%, 85%, 90%, 95%, 97%, 98%, or 99% in blood PCSK9 protein level in the subject as compared to prior to the administration as measured by ELISA, Western blots, or LC-MS/MS. In some embodiments, the nucleobase alteration results in a reduction of at least 1%, 2%, 3%, 4%, 5%, 6%, 7%, 8%, 9%, 10%, 15%, 20%, 25%, 30%, 31%, 32%, 33%, 34%, 35%, 36%, 37%, 38%, 39%, 40%, 45%, 50%, 55%, 60%, 65%, 70%, 71%, 72%, 73%, 74%, 75%, 76%, 77%, 78%, 79%, 80%, 85%, 90%, 95%, 97%, 98%, 90%, 95%, 97%, 98%, 99%, 99.3%, 99.5%, 99.7%, 99.8%, or 99.9% in blood PCSK9 protein level in the subject as compared to prior to the administration as measured by ELISA, Western blots, or LC-MS/MS. In some embodiments, the nucleobase alteration results in a reduction of at most 1%, 2%, 3%, 4%, 5%, 6%, 7%, 8%, 9%, 10%, 15%, 20%, 25%, 30%, 31%, 32%, 33%, 34%, 35%, 36%, 37%, 38%, 39%, 40%, 45%, 50%, 55%, 60%, 65%, 70%, 71%, 72%, 73%, 74%, 75%, 76%, 77%, 78%, 79%, 80%, 85%, 90%, 95%, 97%, 98%, 90%, 95%, 97%, 98%, 99%, 99.3%, 99.5%, 99.7%, 99.8%, or 99.9% in blood PCSK9 protein level in the subject as compared to prior to the administration as measured by ELISA, Western blots, or LC-MS/MS. In some embodiments, the nucleobase alteration results in a reduction of 1%-99.9%, 2%-99.9%, 3%-99.9%, 4%-99.9%, 5%-99.9%, 6%-99.9%, 7%-99.9%, 8%-99.9%, 9%-99.9%, 10%-99.9%, 15%-99.9%, 20%-99.9%, 25%-99.9%, 30%-99.9%, 31%-99.9%, 32%-99.9%, 33%-99.9%, 34%-99.9%, 35%-99.9%, 36%-99.9%, 37%-99.9%, 38%-99.9%, 39%-99.9%, 40%-99.9%, 45%-99.9%, 50%-99.9%, 55%-99.9%, 60%-99.9%, 65%-99.9%, 70%-99.9%, 75%-99.9%, 80%-99.9%, 85%-99.9%, 90%-99.9%, or 95-99.9% in blood PCSK9 protein level in the subject as compared to prior to the administration as measured by ELISA, Western blots, or LC-MS/MS. In some embodiments, the nucleobase alteration results in a reduction of 1%-99.5%, 1%-99%, 1%-98%, 1%-97%, 1%-96%, 1%-95%, 1%-90%, 1%-85%, 1%-80%, 1%-79%, 1%-78%, 1%-77%, 1%-76%, 1%-75%, 1%-74%, 1%-73%, 1%-72%, 1%-71%, 1%-70%, 1%-65%, 1%-60%, 1%-55%, 1%-50%, 1%-45%, 1%-40%, 1%-39%, 1%-38%, 1%-37%, 1%-36%, 1%-35%, 1%-34%, 1%-33%, 1%-32%, 1%-31%, 1%-30%, 1%-25%, 1%-20%, 1%-15%, 1%-10%, 1%-9%, 1%-8%, 1%-7%, 1%-6%, 1%-5%, 1%-4%, 1%-3%, or 1%-2% in blood PCSK9 protein level in the subject as compared to prior to the administration as measured by ELISA, Western blots, or LC-MS/MS. In some embodiments, the nucleobase alteration results in a reduction of 1%-99.9%, 5%-99.5%, 10%-99%, 15%-97%, 20%-95%, 25%-90%, 30%-85%, 31%-80%, 32%-79%, 33%-78%, 34%-77%, 35%-76%, 36%-76%, 37%-75%, 38%-74%, 39%-73%, 40%-72%, 45%-71%, 50%-70%, or 55%-65% in blood PCSK9 protein level in the subject as compared to prior to the administration as measured by ELISA, Western blots, or LC-MS/MS. In some embodiments, the nucleobase alteration results in a reduction of 100% in blood PCSK9 protein level in the subject as compared to prior to the administration as measured by ELISA, Western blots, or LC-MS/MS.

[0146] In some embodiments, the nucleobase alteration results in at least 1%, 2%, 3%, 4%, 5%, 6%, 7%, 8%, 9%, 10%, 11%, 12%, 13%, 14%, 15%, 20%, 25%, 30%, 35%, 40%, 50%, 75%, 90%, 100%, 110%, 120%, 130%, 140%, 150%, 160%, 170%, 180%, 190%, 200%, 210%, 220%, 230%, 240%, 250%, 260%, 270%, 280%, 290%, 300%, 400% 500%, 600%, 700%, 800%, 900%, 1000% less blood PCSK9 protein level in the subject as compared to prior to the administration as measured by ELISA, Western blots, or LC-MS/MS. In some embodiments, the nucleobase alteration results in at least 1.1-fold, 1.2-fold, 1.3-fold, 1.4-fold, 1.5-fold, 1.6-fold, 1.7-fold, 1.8-fold, 1.9-fold, 2-fold, 2.5-fold, 3-fold, 3.5-fold, 4-fold, 4.5-fold, 5-fold, 6-fold, 7-fold, 8-fold, 9-fold, 10-fold, or more than 10-fold less blood PCSK9 protein level in the subject as compared to prior to the administration as measured by ELISA, Western blots, or LC-MS/MS.

[0147] In some embodiments, the reduction of blood PCSK9 protein level or the blood PCSK9 protein level in the subject as compared to prior to the administration is measured by ELISA (enzyme-linked immunosorbent assay). In some embodiments, the reduction of blood PCSK9 protein level or the blood PCSK9 protein level in the subject as compared to prior to the administration is measured by Western blot analysis. In some embodiments, the reduction of blood PCSK9 protein level or the blood PCSK9 protein level in the subject as compared to prior to the administration is measured by LC-MS/MS (liquid chromatography-tandem mass spectrometry).

[0148] In some embodiments, the nucleobase alteration results in a reduction of at least 30%, 35%, 40%, 45%, 50%, 55%, 60%, 65%, 70%, 75%, 80%, 85%, 90%, 95%, 97%, 98%, or 99% in blood ANGPTL3 protein level in the subject as compared to prior to the administration as measured by ELISA, Western blots, or LC-MS/MS. In some embodiments, the nucleobase alteration results in a reduction of at least 1%, 2%, 3%, 4%, 5%, 6%, 7%, 8%, 9%, 10%, 15%, 20%, 25%, 30%, 31%, 32%, 33%, 34%, 35%, 36%, 37%, 38%, 39%, 40%, 45%, 50%, 55%, 60%, 65%, 70%, 71%, 72%, 73%, 74%, 75%, 76%, 77%, 78%, 79%, 80%, 85%, 90%, 95%, 97%, 98%, 90%, 95%, 97%, 98%, 99%, 99.3%, 99.5%, 99.7%, 99.8%, or 99.9% in blood ANGPTL3 protein level in the subject as compared to prior to the administration as measured by ELISA, Western blots, or LC-MS/MS. In some embodiments, the nucleobase alteration results in a reduction of at most 1%, 2%, 3%, 4%, 5%, 6%, 7%, 8%, 9%, 10%, 15%, 20%, 25%, 30%, 31%, 32%, 33%, 34%, 35%, 36%, 37%, 38%, 39%, 40%, 45%, 50%, 55%, 60%, 65%, 70%, 71%, 72%, 73%, 74%, 75%, 76%, 77%, 78%, 79%, 80%, 85%, 90%, 95%, 97%, 98%, 90%, 95%, 97%, 98%, 99%, 99.3%, 99.5%, 99.7%, 99.8%, or 99.9% in blood ANGPTL3 protein level in the subject as compared to prior to the administration as measured by ELISA, Western blots, or LC-MS/MS. In some embodiments, the nucleobase alteration results in a reduction of 1%-99.9%, 2%-99.9%, 3%-99.9%, 4%-99.9%, 5%-99.9%, 6%-99.9%, 7%-99.9%, 8%-99.9%, 9%-99.9%, 10%-99.9%, 15%-99.9%, 20%-99.9%, 25%-99.9%, 30%-99.9%, 31%-99.9%, 32%-99.9%, 33%-99.9%, 34%-99.9%, 35%-99.9%, 36%-99.9%, 37%-99.9%, 38%-99.9%, 39%-99.9%, 40%-99.9%, 45%-99.9%, 50%-99.9%, 55%-99.9%, 60%-99.9%, 65%-99.9%, 70%-99.9%, 75%-99.9%, 80%-99.9%, 85%-99.9%, 90%-99.9%, or 95-99.9% in blood ANGPTL3 protein level in the subject as compared to prior to the administration as measured by ELISA, Western blots, or LC-MS/MS. In some embodiments, the nucleobase alteration results in a reduction of 1%-99.5%, 1%-99%, 1%-98%, 1%-97%, 1%-96%, 1%-95%, 1%-90%, 1%-85%, 1%-80%, 1%-79%, 1%-78%, 1%-77%, 1%-76%, 1%-75%, 1%-74%, 1%-73%, 1%-72%, 1%-71%, 1%-70%, 1%-65%, 1%-60%, 1%-55%, 1%-50%, 1%-45%, 1%-40%, 1%-39%, 1%-38%, 1%-37%, 1%-36%, 1%-35%, 1%-34%, 1%-33%, 1%-32%, 1%-31%, 1%-30%, 1%-25%, 1%-20%, 1%-15%, 1%-10%, 1%-9%, 1%-8%, 1%-7%, 1%-6%, 1%-5%, 1%-4%, 1%-3%, or 1%-2% in blood ANGPTL3 protein level in the subject as compared to prior to the administration as measured by ELISA, Western blots, or LC-MS/MS. In some embodiments, the nucleobase alteration results in a reduction of 1%-99.9%, 5%-99.5%, 10%-99%, 15%-97%, 20%-95%, 25%-90%, 30%-85%, 31%-80%, 32%-79%, 33%-78%, 34%-77%, 35%-76%, 36%-76%, 37%-75%, 38%-74%, 39%-73%, 40%-72%, 45%-71%, 50%-70%, or 55%-65% in blood ANGPTL3 protein level in the subject as compared to prior to the administration as measured by ELISA, Western blots, or LC-MS/MS. In some embodiments, the nucleobase alteration results in a reduction of 100% in blood ANGPTL3 protein level in the subject as compared to prior to the administration as measured by ELISA, Western blots, or LC-MS/MS.

[0149] In some embodiments, the nucleobase alteration results in at least 1%, 2%, 3%, 4%, 5%, 6%, 7%, 8%, 9%, 10%, 11%, 12%, 13%, 14%, 15%, 20%, 25%, 30%, 35%, 40%, 50%, 75%, 90%, 100%, 110%, 120%, 130%, 140%, 150%, 160%, 170%, 180%, 190%, 200%, 210%, 220%, 230%, 240%, 250%, 260%, 270%, 280%, 290%, 300%, 400% 500%, 600%, 700%, 800%, 900%, 1000% less blood ANGPTL3 protein level in the subject as compared to prior to the administration as measured by ELISA, Western blots, or LC-MS/MS. In some embodiments, the nucleobase alteration results in at least 1.1-fold, 1.2-fold, 1.3-fold, 1.4-fold, 1.5-fold, 1.6-fold, 1.7-fold, 1.8-fold, 1.9-fold, 2-fold, 2.5-fold, 3-fold, 3.5-fold, 4-fold, 4.5-fold, 5-fold, 6-fold, 7-fold, 8-fold, 9-fold, 10-fold, or more than 10-fold less blood ANGPTL3 protein level in the subject as compared to prior to the administration as measured by ELISA, Western blots, or LC-MS/MS.

[0150] In some embodiments, the reduction of blood ANGPTL3 protein level or the blood ANGPTL3 protein level in the subject as compared to prior to the administration is measured by ELISA (enzyme-linked immunosorbent assay). In some embodiments, the reduction of blood ANGPTL3 protein level or the blood ANGPTL3 protein level in the subject as compared to prior to the administration is measured by Western blot analysis. In some embodiments, the reduction of blood ANGPTL3 protein level or the blood ANGPTL3 protein level in the subject as compared to prior to the administration is measured by LC-MS/MS (liquid chromatography-tandem mass spectrometry).

[0151] In some embodiments, the nucleobase alteration results in a reduction of at least 35% in blood or low-density lipoprotein cholesterol (LDL-C) levels in the subject as compared to prior to the administration. In some embodiments, the nucleobase alteration results in a reduction of at least 35%, 40%, 45%, 46%, 47%, 48%, 49%, 50%, 51%, 52%, 53%, 54%, 55%, 56%, 57%, 58%, 59%, 60%, 61%, 62%, 63%, 64%, 65%, 70%, 75%, 80%, 85%, 90%, 95%, 97%, 98%, or 99% in blood low-density lipoprotein cholesterol (LDL-C) level in the subject as compared to prior to the administration. In some embodiments, the nucleobase alteration results in a reduction of at least 1%, 2%, 3%, 4%, 5%, 6%, 7%, 8%, 9%, 10%, 15%, 20%, 25%, 30%, 35%, 40%, 45%, 46%, 47%, 48%, 49%, 50%, 51%, 52%, 53%, 54%, 55%, 56%, 57%, 58%, 59%, 60%, 61%, 62%, 63%, 64%, 65%, 70%, 75%, 80%, 85%, 90%, 95%, 97%, 98%, 99%, 99.3%, 99.5%, 99.7%, 99.8%, or 99.9% in blood low-density lipoprotein cholesterol (LDL-C) level in the subject as compared to prior to the administration. In some embodiments, the nucleobase alteration results in a reduction of at most 1%, 2%, 3%, 4%, 5%, 6%, 7%, 8%, 9%, 10%, 15%, 20%, 25%, 30%, 35%, 40%, 45%, 50%, 55%, 60%, 65%, 70%, 75%, 80%, 85%, 90%, 95%, 97%, 98%, 99%, 99.3%, 99.5%, 99.7%, 99.8%, or 99.9% in blood low-density lipoprotein cholesterol (LDL-C) level in the subject as compared to prior to the administration. In some embodiments, the nucleobase alteration results in a reduction of 1%-99.9%, 2%-99.9%, 3%-99.9%, 4%-99.9%, 5%-99.9%, 6%-99.9%, 7%-99.9%, 8%-99.9%, 9%-99.9%, 10%-99.9%, 15%-99.9%, 20%-99.9%, 25%-99.9%, 30%-99.9%, 35%-99.9%, 40%-99.9%, 45%-99.9%, 50%-99.9%, 55%-99.9%, 60%-99.9%, 65%-99.9%, 70%-99.9%, 75%-99.9%, 80%-99.9%, 85%-99.9%, 90%-99.9%, or 95-99.9% in blood low-density lipoprotein cholesterol (LDL-C) level in the subject as compared to prior to the administration. In some embodiments, the nucleobase alteration results in a reduction of 1%-99.5%, 1%-99%, 1%-98%, 1%-97%, 1%-96%, 1%-95%, 1%-90%, 1%-85%, 1%-80%, 1%-75%, 1%-70%, 1%-65%, 1%-60%, 1%-55%, 1%-50%, 1%-45%, 1%-40%, 1%-35%, 1%-30%, 1%-25%, 1%-20%, 1%-15%, 1%-10%, 1%-9%, 1%-8%, 1%-7%, 1%-6%, 1%-5%, 1%-4%, 1%-3%, or 1%-2% in blood low-density lipoprotein cholesterol (LDL-C) level in the subject as compared to prior to the administration. In some embodiments, the nucleobase alteration results in a reduction of 1%-99.9%, 5%-99.5%, 10%-99%, 15%-97%, 20%-95%, 25%-90%, 30%-85%, 35%-80%, 40%-75%, 45%-70%, 50%-65%, or 55%-60% in blood low-density lipoprotein cholesterol (LDL-C) level in the subject as compared to prior to the administration. In some embodiments, the nucleobase alteration results in a reduction of 100% in blood low-density lipoprotein cholesterol (LDL-C) level in the subject as compared to prior to the administration. In some embodiments, the nucleobase alteration results in at least 1%, 2%, 3%, 4%, 5%, 6%, 7%, 8%, 9%, 10%, 11%, 12%, 13%, 14%, 15%, 20%, 25%, 30%, 35%, 40%, 50%, 75%, 90%, 100%, 110%, 120%, 130%, 140%, 150%, 160%, 170%, 180%, 190%, 200%, 210%, 220%, 230%, 240%, 250%, 260%, 270%, 280%, 290%, 300%, 400% 500%, 600%, 700%, 800%, 900%, 1000% less blood low-density lipoprotein cholesterol (LDL-C) level in the subject as compared to prior to the administration. In some embodiments, the nucleobase alteration results in at least 1.1-fold, 1.2-fold, 1.3-fold, 1.4-fold, 1.5-fold, 1.6-fold, 1.7-fold, 1.8-fold, 1.9-fold, 2-fold, 2.5-fold, 3-fold, 3.5-fold, 4-fold, 4.5-fold, 5-fold, 6-fold, 7-fold, 8-fold, 9-fold, 10-fold, or more than 10-fold less blood low-density lipoprotein cholesterol (LDL-C) level in the subject as compared to prior to the administration.

[0152] In some embodiments, the nucleobase alteration results in a reduction of at least 35% in blood triglyceride levels in the subject as compared to prior to the administration. In some embodiments, the nucleobase alteration results in a reduction of at least 30%, 35%, 40%, 45%, 46%, 47%, 48%, 49%, 50%, 51%, 52%, 53%, 54%, 55%, 56%, 57%, 58%, 59%, 60%, 61%, 62%, 63%, 64%, 65%, 70%, 75%, 80%, 85%, 90%, 95%, 97%, 98%, or 99% in blood triglyceride level in the subject as compared to prior to the administration. In some embodiments, the nucleobase alteration results in a reduction of at least 1%, 2%, 3%, 4%, 5%, 6%, 7%, 8%, 9%, 10%, 15%, 20%, 25%, 30%, 35%, 40%, 45%, 46%, 47%, 48%, 49%, 50%, 51%, 52%, 53%, 54%, 55%, 56%, 57%, 58%, 59%, 60%, 61%, 62%, 63%, 64%, 65%, 70%, 75%, 80%, 85%, 90%, 95%, 97%, 98%, 99%, 99.3%, 99.5%, 99.7%, 99.8%, or 99.9% in blood triglyceride level in the subject as compared to prior to the administration. In some embodiments, the nucleobase alteration results in a reduction of at most 1%, 2%, 3%, 4%, 5%, 6%, 7%, 8%, 9%, 10%, 15%, 20%, 25%, 30%, 35%, 40%, 45%, 50%, 55%, 60%, 65%, 70%, 75%, 80%, 85%, 90%, 95%, 97%, 98%, 99%, 99.3%, 99.5%, 99.7%, 99.8%, or 99.9% in blood triglyceride level in the subject as compared to prior to the administration. In some embodiments, the nucleobase alteration results in a reduction of 1%-99.9%, 2%-99.9%, 3%-99.9%, 4%-99.9%, 5%-99.9%, 6%-99.9%, 7%-99.9%, 8%-99.9%, 9%-99.9%, 10%-99.9%, 15%-99.9%, 20%-99.9%, 25%-99.9%, 30%-99.9%, 35%-99.9%, 40%-99.9%, 45%-99.9%, 50%-99.9%, 55%-99.9%, 60%-99.9%, 65%-99.9%, 70%-99.9%, 75%-99.9%, 80%-99.9%, 85%-99.9%, 90%-99.9%, or 95-99.9% in blood triglyceride level in the subject as compared to prior to the administration. In some embodiments, the nucleobase alteration results in a reduction of 1%-99.5%, 1%-99%, 1%-98%, 1%-97%, 1%-96%, 1%-95%, 1%-90%, 1%-85%, 1%-80%, 1%-75%, 1%-70%, 1%-65%, 1%-60%, 1%-55%, 1%-50%, 1%-45%, 1%-40%, 1%-35%, 1%-30%, 1%-25%, 1%-20%, 1%-15%, 1%-10%, 1%-9%, 1%-8%, 1%-7%, 1%-6%, 1%-5%, 1%-4%, 1%-3%, or 1%-2% in blood triglyceride level in the subject as compared to prior to the administration. In some embodiments, the nucleobase alteration results in a reduction of 1%-99.9%, 5%-99.5%, 10%-99%, 15%-97%, 20%-95%, 25%-90%, 30%-85%, 35%-80%, 40%-75%, 45%-70%, 50%-65%, or 55%-60% in blood triglyceride level in the subject as compared to prior to the administration. In some embodiments, the nucleobase alteration results in a reduction of 100% in blood triglyceride level in the subject as compared to prior to the administration. In some embodiments, the nucleobase alteration results in at least 1%, 2%, 3%, 4%, 5%, 6%, 7%, 8%, 9%, 10%, 11%, 12%, 13%, 14%, 15%, 20%, 25%, 30%, 35%, 40%, 50%, 75%, 90%, 100%, 110%, 120%, 130%, 140%, 150%, 160%, 170%, 180%, 190%, 200%, 210%, 220%, 230%, 240%, 250%, 260%, 270%, 280%, 290%, 300%, 400% 500%, 600%, 700%, 800%, 900%, 1000% less blood triglyceride level in the subject as compared to prior to the administration. In some embodiments, the nucleobase alteration results in at least 1.1-fold, 1.2-fold, 1.3-fold, 1.4-fold, 1.5-fold, 1.6-fold, 1.7-fold, 1.8-fold, 1.9-fold, 2-fold, 2.5-fold, 3-fold, 3.5-fold, 4-fold, 4.5-fold, 5-fold, 6-fold, 7-fold, 8-fold, 9-fold, 10-fold, or more than 10-fold less blood triglyceride level in the subject as compared to prior to the administration.

[0153] In some embodiments, the blood triglyceride level or the reduction of blood triglyceride level in the subject as compared to prior to the administration is measured by any standard technique. In some embodiments, the blood low-density lipoprotein cholesterol (LDL-C) level or the reduction of blood low-density lipoprotein cholesterol (LDL-C) level in the subject as compared to prior to the administration is measured by any standard technique. For example, a clinical analyzer instrument may be used to measure a ‘lipid panel’ in serum samples which entails the direct measurement of cholesterol (total C), triglycerides (TG) and high-density lipoprotein cholesterol (HDL-C) enzymatically. Reagent kits specific for each analyte contain buffers, calibrators, blanks and controls. As used in the present disclosure, cholesterol, triglycerides and HDL-C may be quantified using absorbance measurements of specific enzymatic reaction products. LDL-C may be determined indirectly. In some instances, most of circulating cholesterol can be found in three major lipoprotein fractions: very low-density lipoproteins (VLDL), LDL and HDL. In some embodiments, total circulating cholesterol may be estimated with the formula [Total C]= [VLDL-C]+[LDL-C]+[HDL-C]. Thus the LDL-C can be calculated from measured values of total cholesterol, triglycerides and HDL-C according to the relationship: [LDL-C]=[total C]−[HDL-C]−[TG]/5, where [TG]/5 is an estimate of VLDL-cholesterol. A reagent kit specific for triglycerides containing buffers, calibrators, blanks and controls may be used. As used herein, serum samples from the study may be analyzed and triglycerides may be measured using a series of coupled enzymatic reactions. In some embodiments, H₂O₂ may be used to quantify the analyte. as the end product of the last one and its absorbance at 500 nm, and the color intensity is proportional to triglyceride concentrations.

[0154] In some embodiments, the guide polynucleotide is a guide RNA, wherein the guide RNA comprises a spacer sequence that binds to the complementary strand of a protospacer sequence of the PCSK9 gene with 0, 1, or 2 mismatches. In some embodiments, the guide RNA comprises a spacer sequence that binds to the complementary strand of a protospacer sequence of the PCSK9 gene with no mismatches. In some embodiments, the guide RNA comprises a spacer sequence that binds to the complementary strand of a protospacer sequence of the PCSK9 gene with 1 mismatch. In some embodiments, the guide RNA comprises a spacer sequence that binds to the complementary strand of a protospacer sequence of the PCSK9 gene with 2 mismatches. In some embodiments, the guide RNA comprises a spacer sequence that binds to the complementary strand of a protospacer sequence of the PCSK9 gene with 3 mismatches. In some embodiments, the guide RNA comprises a spacer sequence that binds to the complementary strand of a protospacer sequence of the PCSK9 gene with 4 mismatches. In some embodiments, the guide RNA comprises a spacer sequence that binds to the complementary strand of a protospacer sequence of the PCSK9 gene with 5 mismatches.

[0155] In some embodiments, the guide polynucleotide is a guide RNA, wherein the guide RNA comprises a spacer sequence that binds to the complementary strand of a protospacer sequence of the ANGPTL3 gene with 0, 1, or 2 mismatches. In some embodiments, the guide RNA comprises a spacer sequence that binds to the complementary strand of a protospacer sequence of the ANGPTL3 gene with no mismatches. In some embodiments, the guide RNA comprises a spacer sequence that binds to the complementary strand of a protospacer sequence of the ANGPTL3 gene with 1 mismatch. In some embodiments, the guide RNA comprises a spacer sequence that binds to the complementary strand of a protospacer sequence of the ANGPTL3 gene with 2 mismatches. In some embodiments, the guide RNA comprises a spacer sequence that binds to the complementary strand of a protospacer sequence of the ANGPTL3 gene with 3 mismatches. In some embodiments, the guide RNA comprises a spacer sequence that binds to the complementary strand of a protospacer sequence of the ANGPTL3 gene with 4 mismatches. In some embodiments, the guide RNA comprises a spacer sequence that binds to the complementary strand of a protospacer sequence of the ANGPTL3 gene with 5 mismatches.

[0156] In some embodiments, the nucleobase alteration is outside of the protospacer sequence in less than 1% of whole liver cells in the subject as measured by net nucleobase editing. In some embodiments, the nucleobase alteration is outside of the protospacer sequence in less than 1% of hepatocytes in the subject as measured by net nucleobase editing. In some embodiments, the nucleobase alteration is only within the protospacer sequence as measured by net nucleobase editing.

[0157] In some embodiments, the nucleobase alteration is outside of the protospacer sequence in less than 0.01%. 0.02%, 0.03% 0.04%, 0.05%, 0.06%, 0.07%, 0.08%, 0.09%, 0.1%, 0.2%, 0.3%, 0.4%, 0.5%, 0.6%, 0.7%, 0.8%, 0.9%, 1.0%, 2.0%, 3.0% 4.0%, 5.0%, 6.0%, 7.0%, 8.0%, 9.0%, 10%, 15%, 20%, 25%, 30%, 35%, 40%, 45%, 50%, 55%, 60%, 65%, 70%, 65%, 80%, 85%, 90% of whole liver cells in the subject as measured by net nucleobase editing. In some embodiments, the nucleobase alteration is outside of the protospacer sequence in less than 0.01%. 0.02%, 0.03% 0.04%, 0.05%, 0.06%, 0.07%, 0.08%, 0.09%, 0.1%, 0.2%, 0.3%, 0.4%, 0.5%, 0.6%, 0.7%, 0.8%, 0.9%, 1.0%, 2.0%, 3.0% 4.0%, 5.0%, 6.0%, 7.0%, 8.0%, 9.0%, 10%, 15%, 20%, 25%, 30%, 35%, 40%, 45%, 50%, 55%, 60%, 65%, 70%, 65%, 80%, 85%, 90% of hepatocytes in the subject as measured by net nucleobase editing. In some embodiments, the nucleobase alteration is outside of the protospacer sequence in less than 0.01%. 0.02%, 0.03% 0.04%, 0.05%, 0.06%, 0.07%, 0.08%, 0.09%, 0.1%, 0.2%, 0.3%, 0.4%, 0.5%, 0.6%, 0.7%, 0.8%, 0.9%, 1.0%, 2.0%, 3.0% 4.0%, 5.0%, 6.0%, 7.0%, 8.0%, 9.0%, 10%, 15%, 20%, 25%, 30%, 35%, 40%, 45%, 50%, 55%, 60%, 65%, 70%, 65%, 80%, 85%, 90% of cells in the subject as measured by net nucleobase editing.

[0158] In some embodiments, the deaminase is an adenine deaminase. In some embodiments, the nucleobase alteration is a A·T to G·C alteration. In some embodiments, the deaminase is an adenine deaminase and the nucleobase alteration is a A·T to G·C alteration. In some embodiments, the programmable DNA binding domain comprises a nuclease inactive Cas9 or a Cas9 nickase. In some embodiments, the programmable DNA binding domain comprises a Cas9.

[0159] In some embodiments, the nucleobase alteration is at a splice site of the PCSK9 gene. In some embodiments, the nucleobase alteration is at a splice donor site of the PCSK9 gene. In some embodiments, the splice donor site is at 5′ end of PCSK9 intron 1 as referenced in SEQ ID NO: 5. In some embodiments, the nucleobase alteration is at a splice acceptor site of the PCSK9 gene. In some embodiments, the nucleobase alteration results in a frame shift, a premature stop codon, a insertion or deletion in a transcript encoded by the PCSK9 gene. In some embodiments, the nucleobase alteration results in an aberrant transcript encoded by the PCSK9 gene. In some embodiments, the guide polynucleotide is a guide RNA. In some embodiments, the guide RNA is chemically modified. In some embodiments, the guide RNA comprises a tracrRNA sequence. In some embodiments, the guide RNA comprises a chemical modification as set forth in Table 1 or Table 24.

[0160] In some embodiments, the nucleobase alteration is at a splice site of the ANGPTL3 gene. In some embodiments, the nucleobase alteration is at a splice donor site of the ANGPTL3 gene. In some embodiments, the splice donor site is at 5′ end of ANGPTL3 intron 6 as referenced in SEQ ID NO: 7. In some embodiments, the nucleobase alteration is at a splice acceptor site of the ANGPTL3 gene. In some embodiments, the nucleobase alteration results in a frame shift, a premature stop codon, a insertion or deletion in a transcript encoded by the ANGPTL3 gene. In some embodiments, the nucleobase alteration results in an aberrant transcript encoded by the ANGPTL3 gene. In some embodiments, the guide polynucleotide is a guide RNA. In some embodiments, the guide RNA is chemically modified. In some embodiments, the guide RNA comprises a tracrRNA sequence. In some embodiments, the guide RNA comprises a chemical modification as set forth in Table 1 or Table 24.

[0161] In some embodiments, the guide RNA comprises a guide RNA sequence set forth in Table 1 or Table 24. In some embodiments, the guide RNA comprises the sequence

(SEQ ID NO: 9)
5′-5′-cscscsGCACCUUGGCGCAGCGGgUUUUAGagcuaGaaauagca
aGUUaAaAuAaggCUaGUCcG UUAucAAcuuGaaaaaguGgcaccgAgU
Cggugcusususu-3′,
(SEQ ID NO: 9)
5′-cscscsGCACCUUGGCGCAGCGGgUUUUAGagcuagaaauagcaaGU
UaAaAuAaggcuaGUccGU UAucAAcuugaaaaagugGcaccgagucgg
ugcusususu-3′,
(SEQ ID NO: 9)
5′-cscscsGCACCUUGGCGCAGCGGgUUUUAGagcuaGaaauagcaaGU
UaAaAuAaggcuaGUccGUUAucAAcuuGaaaaagugGcaccgagucggu
gcusususu-3′ (GA346),
(SEQ ID NO: 10)
5′-cscscsGCACCUUGGCGCAGCGGgUUUUAGagcuagaaauagcaaGU
UaAaAuAaggcuaGUccGUUAacAAcuugaaaaagugGcaccgagucggu
gcusususu-3′ (GA374),
(SEQ ID NO: 11)
5′-cscscsGCACCUUGGCGCAGCGGgUUUUAGagcuagaaauagcaaGU
UaAaAuAaggcuaGUccGUUAucAAcuugaaaaagugGcaccgagucggu
gcusususuuuu-3′ (GA385),
(SEQ ID NO: 11)
5′-cscscsGCACCUUGGCGCAGCGGgUUUUAGagcuagaaauagcaaGU
UaAaAuAaggcuaGUccGUUAucAAcuugaaaaagugGcaccgagucggu
gcusususuuUu-3′ (GA386)
or
(SEQ ID NO: 12)
5′-cscscsGCACCUUGGCGCAGCGgUUUUAGagcuaGaaauagcaaGUU
aAaAuAaggcuaGUccGUUAucAAcuuGaaaaagugGcaccgagucggug
cuususuuuu-3′ (GA387).

[0162] In some embodiments, the protospacer sequence comprises a protospacer sequence set forth in Table 1 or Table 24. In some embodiments, the protospacer comprises the sequence

(SEQ ID NO: 13)
5′-CCCGCACCTTGGCGCAGCGG-3′,
(SEQ ID NO: 14)
AAGATACCTGAATAACTCTC-3′,
and
(SEQ ID NO: 15)
5′-AAGATACCTGAATAACCCTC-3′.

[0163] In some embodiments, the base editor fusion protein comprises the sequence of SEQ ID NO: 3. In some embodiments, the adenosine deaminase comprises an amino acid sequence that is at least 60%, at least 65%, at least 70%, at least 75%, at least 80%, at least 85%, at least 90%, at least 95%, at least 96%, at least 97%, at least 98%, at least 99%, or at least 99.5% identical to the amino acid sequence set forth in SEQ ID NO: 3 or to any of the adenosine deaminases provided herein. It should be appreciated that adenosine deaminases provided herein may include one or more mutations (e.g., any of the mutations provided herein). The disclosure provides any deaminase domains with a certain percent identity plus any of the mutations or combinations thereof described herein. In some embodiments, the adenosine deaminase comprises an amino acid sequence that has 1, 2, 3, 4, 5, 6, 7, 8, 9, 10, 11, 12, 13, 14, 15, 16, 17, 18, 19, 20, 21, 22, 21, 24, 25, 26, 27, 28, 29, 30, 31, 32, 33, 34, 35, 36, 37, 38, 39, 40, 41, 42, 43, 44, 45, 46, 47, 48, 49, 50, or more mutations compared to the amino acid sequence set forth in SEQ ID NO: 3 or any of the adenosine deaminases provided herein. In some embodiments, the adenosine deaminase comprises an amino acid sequence that has at least 5, at least 10, at least 15, at least 20, at least 25, at least 30, at least 35, at least 40, at least 45, at least 50, at least 60, at least 70, at least 80, at least 90, at least 100, at least 110, at least 120, at least 130, at least 140, at least 150, at least 160, or at least 170 identical contiguous amino acid residues as compared to any one of the amino acid sequences set forth in SEQ ID NO: 3 or any of the adenosine deaminases provided herein.

[0164] In some embodiments, the nucleic acid encoding the base editor fusion protein is a mRNA. The mRNA may comprise modifications, for example, modifications at 3′ or 5′ end of the mRNA. In some embodiments, the mRNA comprises a cap analog.

[0165] In some embodiments, the mRNA comprises at least 1, 2, or 3 nucleotides at the 5′ end that comprises 2′-hydroxyl group, 2′-O-methyl group, or additional 2′ chemical modification or a combination thereof. In some embodiments, the mRNA comprises at least 1, 2, or 3 nucleotides at the 5′ end that comprises 2′-hydroxyl group, 2′-O-methyl group, or additional 2′ chemical modification or a combination thereof. In some embodiments, the mRNA comprises at least 1 nucleotide at the 5′ end that comprises 2′-hydroxyl group, 2′-O-methyl group, or additional 2′ chemical modification or a combination thereof. In some embodiments, the mRNA comprises at least 2 nucleotides at the 5′ end that comprises 2′-hydroxyl group, 2′-O-methyl group, or additional 2′ chemical modification or a combination thereof. In some embodiments, the mRNA comprises at least 3 nucleotides at the 5′ end that comprises 2′-hydroxyl group, 2′-O-methyl group, or additional 2′ chemical modification or a combination thereof. In some embodiments, the mRNA comprises at least 4 nucleotides at the 5′ end that comprises 2′-hydroxyl group, 2′-O-methyl group, or additional 2′ chemical modification or a combination thereof. In some embodiments, the mRNA comprises at least 5 nucleotides at the 5′ end that comprises 2′-hydroxyl group, 2′-O-methyl group, or additional 2′ chemical modification or a combination thereof. In some embodiments, the mRNA comprises at least 6 nucleotides at the 5′ end that comprises 2′-hydroxyl group, 2′-O-methyl group, or additional 2′ chemical modification or a combination thereof. In some embodiments, the mRNA comprises at least 7 nucleotides at the 5′ end that comprises 2′-hydroxyl group, 2′-O-methyl group, or additional 2′ chemical modification or a combination thereof. In some embodiments, the mRNA comprises at least 8 nucleotides at the 5′ end that comprises 2′-hydroxyl group, 2′-O-methyl group, or additional 2′ chemical modification or a combination thereof. In some embodiments, the mRNA comprises at least 9 nucleotides at the 5′ end that comprises 2′-hydroxyl group, 2′-O-methyl group, or additional 2′ chemical modification or a combination thereof. In some embodiments, the mRNA comprises at least 10 nucleotides at the 5′ end that comprises 2′-hydroxyl group, 2′-O-methyl group, or additional 2′ chemical modification or a combination thereof.

[0166] In some embodiments, the mRNA comprises a poly A tail. The poly A tail may be at the 3′ end of the mRNA.

[0167] In some embodiments, the GC % content of the mRNA sequence is greater than or equal to 40%, 41%, 42%, 43%, 44%, 45%, 46%, 47%, 48%, 49%, 50%, 51%, 52%, 53%, 54%, 55%, 56%, 57%, 58%, 59%, 60%, 61%, 62%, 63%, 64%, 65%, 66%, 67%, 68%, 69%, 70%, 71%, 72%, 73%, 74%, 75%, 76%, 77%, 78%, 79%, 80%, 81%, 82%, 83%, 84%, 85%, 86%, 87%, 88%, 89% or 90%. In some embodiments, the GC % content of the mRNA sequence is greater than or equal to 40%, 45%, 50%, 55%, 60%, 65%, 70%, 75% or 80%.

[0168] In some embodiments, the mRNA sequence comprises an adenine tTNA deaminase (TadA) region. In some embodiments, the GC % of the TadA region is greater than or equal to 40%, 41%, 42%, 43%, 44%, 45%, 46%, 47%, 48%, 49%, 50%, 51%, 52%, 53%, 54%, 55%, 56%, 57%, 58%, 59%, 60%, 61%, 62%, 63%, 64%, 65%, 66%, 67%, 68%, 69%, 70%, 71%, 72%, 73%, 74%, 75%, 76%, 77%, 78%, 79%, 80%, 81%, 82%, 83%, 84%, 85%, 86%, 87%, 88%, 89% or 90%. In some embodiments, the GC % content of the TadA region is greater than or equal to 40%, 45%, 50%, 55%, 60%, 65%, 70%, 75% or 80%.

[0169] In some embodiments, the mRNA sequence comprises a Cas9 region. In some embodiments, the GC % of the Cas9 region is greater than or equal to 40%, 41%, 42%, 43%, 44%, 45%, 46%, 47%, 48%, 49%, 50%, 51%, 52%, 53%, 54%, 55%, 56%, 57%, 58%, 59%, 60%, 61%, 62%, 63%, 64%, 65%, 66%, 67%, 68%, 69%, 70%, 71%, 72%, 73%, 74%, 75%, 76%, 77%, 78%, 79%, 80%, 81%, 82%, 83%, 84%, 85%, 86%, 87%, 88%, 89% or 90%. In some embodiments, the GC % content of the Cas9 region is greater than or equal to 40%, 45%, 50%, 55%, 60%, 65%, 70%, 75% or 80%.

[0170] In some embodiments, the mRNA sequence comprises a NLS region. In some embodiments, the GC % of the NLS region is greater than or equal to 40%, 41%, 42%, 43%, 44%, 45%, 46%, 47%, 48%, 49%, 50%, 51%, 52%, 53%, 54%, 55%, 56%, 57%, 58%, 59%, 60%, 61%, 62%, 63%, 64%, 65%, 66%, 67%, 68%, 69%, 70%, 71%, 72%, 73%, 74%, 75%, 76%, 77%, 78%, 79%, 80%, 81%, 82%, 83%, 84%, 85%, 86%, 87%, 88%, 89% or 90%. In some embodiments, the GC % content of the NLS region is greater than or equal to 40%, 45%, 50%, 55%, 60%, 65%, 70%, 75% or 80%.

[0171] In some embodiments, the mRNA sequence comprises a first linker region that connects the TadA region and the Cas9 region. In some embodiments, the GC % of the first linker region is greater than or equal to 40%, 41%, 42%, 43%, 44%, 45%, 46%, 47%, 48%, 49%, 50%, 51%, 52%, 53%, 54%, 55%, 56%, 57%, 58%, 59%, 60%, 61%, 62%, 63%, 64%, 65%, 66%, 67%, 68%, 69%, 70%, 71%, 72%, 73%, 74%, 75%, 76%, 77%, 78%, 79%, 80%, 81%, 82%, 83%, 84%, 85%, 86%, 87%, 88%, 89% or 90%. In some embodiments, the GC % content of the first linker region is greater than or equal to 40%, 45%, 50%, 55%, 60%, 65%, 70%, 75% or 80%.

[0172] In some embodiments, the mRNA sequence comprises a second linker region that connects the Cas9 region and the NLS region. In some embodiments, the GC % of the second linker region is greater than or equal to 40%, 41%, 42%, 43%, 44%, 45%, 46%, 47%, 48%, 49%, 50%, 51%, 52%, 53%, 54%, 55%, 56%, 57%, 58%, 59%, 60%, 61%, 62%, 63%, 64%, 65%, 66%, 67%, 68%, 69%, 70%, 71%, 72%, 73%, 74%, 75%, 76%, 77%, 78%, 79%, 80%, 81%, 82%, 83%, 84%, 85%, 86%, 87%, 88%, 89% or 90%. In some embodiments, the GC % content of the second linker region is greater than or equal to 40%, 45%, 50%, 55%, 60%, 65%, 70%, 75% or 80%.

[0173] In some embodiments, the base editor system as provided herein further comprises a lipid nanoparticle (LNP) enclosing a guide polynucleotide or a nucleic acid encoding the guide polynucleotide (i). In some embodiments, the LNP further encloses a base editor fusion protein comprising a programmable DNA binding domain and a deaminase, or a nucleic acid encoding same (ii). In some embodiments, the base editor system further comprises a second LNP enclosing a base editor fusion protein comprising a programmable DNA binding domain and a deaminase, or a nucleic acid encoding same (ii).

[0174] A base editor system as provided herein can include one or more LNPs. For example, a base editor system may comprise a LNP enclosing both a guide polynucleotide and a nucleic acid encoding the base editor fusion protein, e.g. an mRNA encoding the base editor fusion protein. In another example, a base editor system may comprise a LNP enclosing a guide polynucleotide, e.g. a guide RNA, and a LNP enclosing a nucleic acid, e.g. an mRNA, encoding the base editor fusion protein. LNPs separately enclosing the guide polynucleotide and the base editor fusion protein or mRNA encoding the base editor fusion protein may allow for flexible dosing and administration of the base editor system. For example, a LNP enclosing a guide RNA can be administered first, followed by administration of a LNP enclosing a mRNA encoding the base editor fusion protein. In some embodiments, a LNP enclosing a guide RNA and a second LNP enclosing a mRNA encoding the base editor fusion protein are administered to a subject at the same time. In some embodiments, a LNP enclosing a guide RNA and a LNP enclosing a mRNA encoding the base editor protein are administered to a subject sequentially. In some embodiments, a LNP enclosing mRNA encoding the base editor fusion protein is administered to a subject, followed by multiple administration or doses of a second LNP enclosing a guide RNA after 1 day, 2 days, 3 days, 4 days, 5 days, 6 days, 7 days, 2 weeks, 3 weeks, 4 weeks, 5 weeks, 6 weeks, 7 weeks, 8 weeks, 9 weeks, 10 weeks, 11 weeks, or 12 weeks or more. The multiple doses of the second LNP may be administered with intervals of 1, 2, 3, 4, 5, 6, 7, 8, 9, 10, 11, 12, 13, 14, 15, 16, 17, 18, 19, or 20 days or more.

[0175] In some embodiments, the ratio of the guide polynucleotide and the nucleic acid encoding the base editor fusion protein is about 1:10 to about 10:1 by weight. In some embodiments, the ratio of the guide polynucleotide and the nucleic acid encoding the base editor fusion protein is about 1:1, 1.5:1, 2:1, 3:1, 4:1, 1:1.5, 1:2, 1:3, 1:4 or any ratio between 4:1 or 1:4 by weight. In some embodiments, the ratio of the guide polynucleotide and the nucleic acid encoding the base editor fusion protein can be determined by titration of the guide polynucleotide and the nucleic acid encoding the base editor fusion protein.

[0176] In some embodiments, the molar ratio of the guide polynucleotide and the nucleic acid encoding the base editor fusion protein is about 500:1 to about 1:500.

[0177] In some embodiments, the ratio of the guide polynucleotide and the nucleic acid encoding the base editor fusion protein is about 1000:1 to about 1:1000 by weight. In some embodiments, the ratio of the guide polynucleotide and the nucleic acid encoding the base editor fusion protein is about 1000:1, 950:1, 900:1, 850:1, 800:1, 750:1, 700:1, 650:1, 600:1, 550:1, 500:1, 450:1, 400:1, 350:1, 300:1, 250:1, 200:1, 100:1, 95:1, 90:1, 85:1, 80:1, 75:1, 70:1, 65:1, 60:1, 55:1, 50:1, 45:1, 40:1, 35:1, 30:1, 25:1, 20:1, 19:1, 18:1, 17:1, 17:1, 15:1, 14:1, 13:1, 12:1, 11:1, 10:1, 9:1, 8:1, 7:1, 6:1, 5:1, 4:1, 3:1, 2; 1, 1.9:1, 1.8:1, 1.7:1, 1.6:1, 1.5:1, 1.4:1, 1.3:1, 1.2:1, 1.1:1, 1.0:1, 0.9:1, 0.8:1, 0.7:1, 0.6:1, 0.5:1, 0.4:1, 0.3:1, 0.2:1, or 0.1 by weight. In some embodiments, the ratio of the guide polynucleotide and the nucleic acid encoding the base editor fusion protein is about 1:0.1, 1:0.2, 1:0.3, 1:0.4, 1:0.5, 1:0.6, 1:0.7, 1:0.8, 1:0.9, 1:1.0, 1:1.1, 1:1.2, 1:1.3, 1:1.4, 1:1.5, 1:1.6, 1:1.7, 1:1.8, 1:1.9, 1:2, 1:3, 1:4, 1:5, 1:6, 1:7, 1:8, 1:9, 1:10, 1:11, 1:12, 1:13, 1:14, 1:15, 1:16, 1:17, 1:18, 1:19, 1:20, 1:25, 1:30, 1:35, 1:40, 1:45, 1:50, 1:55, 1:60, 1:65, 1:70, 1:75, 1:80, 1:85, 1:90, 1:95, 1:100, 1:150, 1:200, 1:250, 1:300, 1:350, 1:400, 1:450, 1:500, 1:550, 1:600, 1:650, 1:700, 1:750, 1:800, 1:850, 1:900, 1:950, or 1:1000 by weight. In some embodiments, the ratio of the guide polynucleotide and the nucleic acid encoding the base editor fusion protein is at least about 1000:1, 950:1, 900:1, 850:1, 800:1, 750:1, 700:1, 650:1, 600:1, 550:1, 500:1, 450:1, 400:1, 350:1, 300:1, 250:1, 200:1, 100:1, 95:1, 90:1, 85:1, 80:1, 75:1, 70:1, 65:1, 60:1, 55:1, 50:1, 45:1, 40:1, 35:1, 30:1, 25:1, 20:1, 19:1, 18:1, 17:1, 17:1, 15:1, 14:1, 13:1, 12:1, 11:1, 10:1, 9:1, 8:1, 7:1, 6:1, 5:1, 4:1, 3:1, 2;1, 1.9:1, 1.8:1, 1.7:1, 1.6:1, 1.5:1, 1.4:1, 1.3:1, 1.2:1, 1.1:1, 1.0:1, 0.9:1, 0.8:1, 0.7:1, 0.6:1, 0.5:1, 0.4:1, 0.3:1, 0.2:1, or 0.1 by weight. In some embodiments, the ratio of the guide polynucleotide and the nucleic acid encoding the base editor fusion protein is at least about 1:0.1, 1:0.2, 1:0.3, 1:0.4, 1:0.5, 1:0.6, 1:0.7, 1:0.8, 1:0.9, 1:1.0, 1:1.1, 1:1.2, 1:1.3, 1:1.4, 1:1.5, 1:1.6, 1:1.7, 1:1.8, 1:1.9, 1:2, 1:3, 1:4, 1:5, 1:6, 1:7, 1:8, 1:9, 1:10, 1:11, 1:12, 1:13, 1:14, 1:15, 1:16, 1:17, 1:18, 1:19, 1:20, 1:25, 1:30, 1:35, 1:40, 1:45, 1:50, 1:55, 1:60, 1:65, 1:70, 1:75, 1:80, 1:85, 1:90, 1:95, 1:100, 1:150, 1:200, 1:250, 1:300, 1:350, 1:400, 1:450, 1:500, 1:550, 1:600, 1:650, 1:700, 1:750, 1:800, 1:850, 1:900, 1:950, or 1:1000 by weight. In some embodiments, the ratio of the guide polynucleotide and the nucleic acid encoding the base editor fusion protein is at most about 1000:1, 950:1, 900:1, 850:1, 800:1, 750:1, 700:1, 650:1, 600:1, 550:1, 500:1, 450:1, 400:1, 350:1, 300:1, 250:1, 200:1, 100:1, 95:1, 90:1, 85:1, 80:1, 75:1, 70:1, 65:1, 60:1, 55:1, 50:1, 45:1, 40:1, 35:1, 30:1, 25:1, 20:1, 19:1, 18:1, 17:1, 17:1, 15:1, 14:1, 13:1, 12:1, 11:1, 10:1, 9:1, 8:1, 7:1, 6:1, 5:1, 4:1, 3:1, 2;1, 1.9:1, 1.8:1, 1.7:1, 1.6:1, 1.5:1, 1.4:1, 1.3:1, 1.2:1, 1.1:1, 1.0:1, 0.9:1, 0.8:1, 0.7:1, 0.6:1, 0.5:1, 0.4:1, 0.3:1, 0.2:1, or 0.1 by weight. In some embodiments, the ratio of the guide polynucleotide and the nucleic acid encoding the base editor fusion protein is at most about 1:0.1, 1:0.2, 1:0.3, 1:0.4, 1:0.5, 1:0.6, 1:0.7, 1:0.8, 1:0.9, 1:1.0, 1:1.1, 1:1.2, 1:1.3, 1:1.4, 1:1.5, 1:1.6, 1:1.7, 1:1.8, 1:1.9, 1:2, 1:3, 1:4, 1:5, 1:6, 1:7, 1:8, 1:9, 1:10, 1:11, 1:12, 1:13, 1:14, 1:15, 1:16, 1:17, 1:18, 1:19, 1:20, 1:25, 1:30, 1:35, 1:40, 1:45, 1:50, 1:55, 1:60, 1:65, 1:70, 1:75, 1:80, 1:85, 1:90, 1:95, 1:100, 1:150, 1:200, 1:250, 1:300, 1:350, 1:400, 1:450, 1:500, 1:550, 1:600, 1:650, 1:700, 1:750, 1:800, 1:850, 1:900, 1:950, or 1:1000 by weight.

[0178] In some embodiments, the molar ratio of the guide polynucleotide and the nucleic acid encoding the base editor fusion protein is about 10000:1 to about 1:10000. In some embodiments, the molar ratio of the guide polynucleotide and the nucleic acid encoding the base editor fusion protein is about 10000:1, 9500:1, 9000:1, 8500:1, 8000:1, 7500:1, 7000:1, 6500:1, 6000:1, 5500:1, 5000:1, 4500:1, 4000:1, 3500:1, 3000:1, 2500:1, 2000:1, 1500:1, 1000:1, 950:1, 900:1, 850:1, 800:1, 750:1, 700:1, 650:1, 600:1, 550:1, 500:1, 450:1, 400:1, 350:1, 300:1, 250:1, 200:1, 190:1, 180:1, 170:1, 160:1, 150:1, 140:1, 130:1, 120:1, 110:1, 100:1, 95:1, 90:1, 85:1, 80:1, 75:1, 70:1, 69:1, 68:1, 67:1, 66:1, 65:1, 64:1, 63:1, 62:1, 61:1, 60:1, 59:1, 58:1, 57:1, 56:1, 55:1, 54:1, 53:1, 52:1, 51:1, 50:1, 49:1, 48:1, 47:1, 46:1, 45:1, 44:1, 43:1, 42:1, 41:1, 40:1, 39:1, 38:1, 37:1, 36:1, 35:1, 34:1, 33:1, 32:1, 31:1, 30:1, 29:1, 28:1, 27:1, 26:1, 25:1, 24:1, 23:1, 22:1, 21:1, 20:1, 19:1, 18:1, 17:1, 16:1, 15:1, 14:1, 13:1, 12:1, 11:1, 10:1, 9:1, 8:1, 7:1, 6:1, 5:1, 4:1, 3:1, 2:1, 1:1, 0.9:1, 0.8:1, 0.7:1, 0.6:1, 0.5:1, 0.4:1, 0.3:1, 0.2:1, or 0.1:1. In some embodiments, the molar ratio of the guide polynucleotide and the nucleic acid encoding the base editor fusion protein is at least about 1:10000, 1:9500, 1:9000, 1:8500, 1:8000, 1:7500, 1:7000, 1:6500, 1:6000, 1:5500, 1:5000, 1:4500, 1:4000, 1:3500, 1:3000, 1:2500, 1:2000, 1:1500, 1:1000, 1:950, 1:900, 1:850, 1:800, 1:750, 1:700, 1:650, 1:600, 1:550, 1:500, 1:450, 1:400, 1:350, 1:300, 1:250, 1:200, 1:190, 1:180, 1:170, 1:160, 1:150, 1:140, 1:130, 1:120, 1:110, 1:100, 1:95, 1:90, 1:85, 1:80, 1:75, 1:70, 1:69, 1:68, 1:67, 1:66, 1:65, 1:64, 1:63, 1:62, 1:61, 1:60, 1:59, 1:58, 1:57, 1:56, 1:55, 1:54, 1:53, 1:52, 1:51, 1:50, 1:49, 1:48, 1:47, 1:46, 1:45, 1:44, 1:43, 1:42, 1:41, 1:40, 1:39, 1:38, 1:37, 1:36, 1:35, 1:34, 1:33, 1:32, 1:31, 1:30, 1:29, 1:28, 1:27, 1:26, 1:25, 1:24, 1:23, 1:22, 1:21, 1:20, 1:19, 1:18, 1:17, 1:16, 1:15, 1:14, 1:13, 1:12, 1:11, 1:10, 1:9, 1:8, 1:7, 1:6, 1:5, 1:4, 1:3, 1:2, 1:1, 1:0.9, 1:0.8, 1:0.7, 1:0.6, 1:0.5, 1:0.4, 1:0.3, 1:0.2, or 1:0.1. In some embodiments, the molar ratio of the guide polynucleotide and the nucleic acid encoding the base editor fusion protein is at least about 10000:1, 9500:1, 9000:1, 8500:1, 8000:1, 7500:1, 7000:1, 6500:1, 6000:1, 5500:1, 5000:1, 4500:1, 4000:1, 3500:1, 3000:1, 2500:1, 2000:1, 1500:1, 1000:1, 950:1, 900:1, 850:1, 800:1, 750:1, 700:1, 650:1, 600:1, 550:1, 500:1, 450:1, 400:1, 350:1, 300:1, 250:1, 200:1, 190:1, 180:1, 170:1, 160:1, 150:1, 140:1, 130:1, 120:1, 110:1, 100:1, 95:1, 90:1, 85:1, 80:1, 75:1, 70:1, 69:1, 68:1, 67:1, 66:1, 65:1, 64:1, 63:1, 62:1, 61:1, 60:1, 59:1, 58:1, 57:1, 56:1, 55:1, 54:1, 53:1, 52:1, 51:1, 50:1, 49:1, 48:1, 47:1, 46:1, 45:1, 44:1, 43:1, 42:1, 41:1, 40:1, 39:1, 38:1, 37:1, 36:1, 35:1, 34:1, 33:1, 32:1, 31:1, 30:1, 29:1, 28:1, 27:1, 26:1, 25:1, 24:1, 23:1, 22:1, 21:1, 20:1, 19:1, 18:1, 17:1, 16:1, 15:1, 14:1, 13:1, 12:1, 11:1, 10:1, 9:1, 8:1, 7:1, 6:1, 5:1, 4:1, 3:1, 2:1, 1:1, 0.9:1, 0.8:1, 0.7:1, 0.6:1, 0.5:1, 0.4:1, 0.3:1, 0.2:1, or 0.1:1. In some embodiments, the molar ratio of the guide polynucleotide and the nucleic acid encoding the base editor fusion protein is at least about 1:10000, 1:9500, 1:9000, 1:8500, 1:8000, 1:7500, 1:7000, 1:6500, 1:6000, 1:5500, 1:5000, 1:4500, 1:4000, 1:3500, 1:3000, 1:2500, 1:2000, 1:1500, 1:1000, 1:950, 1:900, 1:850, 1:800, 1:750, 1:700, 1:650, 1:600, 1:550, 1:500, 1:450, 1:400, 1:350, 1:300, 1:250, 1:200, 1:190, 1:180, 1:170, 1:160, 1:150, 1:140, 1:130, 1:120, 1:110, 1:100, 1:95, 1:90, 1:85, 1:80, 1:75, 1:70, 1:69, 1:68, 1:67, 1:66, 1:65, 1:64, 1:63, 1:62, 1:61, 1:60, 1:59, 1:58, 1:57, 1:56, 1:55, 1:54, 1:53, 1:52, 1:51, 1:50, 1:49, 1:48, 1:47, 1:46, 1:45, 1:44, 1:43, 1:42, 1:41, 1:40, 1:39, 1:38, 1:37, 1:36, 1:35, 1:34, 1:33, 1:32, 1:31, 1:30, 1:29, 1:28, 1:27, 1:26, 1:25, 1:24, 1:23, 1:22, 1:21, 1:20, 1:19, 1:18, 1:17, 1:16, 1:15, 1:14, 1:13, 1:12, 1:11, 1:10, 1:9, 1:8, 1:7, 1:6, 1:5, 1:4, 1:3, 1:2, 1:1, 1:0.9, 1:0.8, 1:0.7, 1:0.6, 1:0.5, 1:0.4, 1:0.3, 1:0.2, or 1:0.1. In some embodiments, the molar ratio of the guide polynucleotide and the nucleic acid encoding the base editor fusion protein is at most about 10000:1, 9500:1, 9000:1, 8500:1, 8000:1, 7500:1, 7000:1, 6500:1, 6000:1, 5500:1, 5000:1, 4500:1, 4000:1, 3500:1, 3000:1, 2500:1, 2000:1, 1500:1, 1000:1, 950:1, 900:1, 850:1, 800:1, 750:1, 700:1, 650:1, 600:1, 550:1, 500:1, 450:1, 400:1, 350:1, 300:1, 250:1, 200:1, 190:1, 180:1, 170:1, 160:1, 150:1, 140:1, 130:1, 120:1, 110:1, 100:1, 95:1, 90:1, 85:1, 80:1, 75:1, 70:1, 69:1, 68:1, 67:1, 66:1, 65:1, 64:1, 63:1, 62:1, 61:1, 60:1, 59:1, 58:1, 57:1, 56:1, 55:1, 54:1, 53:1, 52:1, 51:1, 50:1, 49:1, 48:1, 47:1, 46:1, 45:1, 44:1, 43:1, 42:1, 41:1, 40:1, 39:1, 38:1, 37:1, 36:1, 35:1, 34:1, 33:1, 32:1, 31:1, 30:1, 29:1, 28:1, 27:1, 26:1, 25:1, 24:1, 23:1, 22:1, 21:1, 20:1, 19:1, 18:1, 17:1, 16:1, 15:1, 14:1, 13:1, 12:1, 11:1, 10:1, 9:1, 8:1, 7:1, 6:1, 5:1, 4:1, 3:1, 2:1, 1:1, 0.9:1, 0.8:1, 0.7:1, 0.6:1, 0.5:1, 0.4:1, 0.3:1, 0.2:1, or 0.1:1. In some embodiments, the molar ratio of the guide polynucleotide and the nucleic acid encoding the base editor fusion protein is at most about 1:10000, 1:9500, 1:9000, 1:8500, 1:8000, 1:7500, 1:7000, 1:6500, 1:6000, 1:5500, 1:5000, 1:4500, 1:4000, 1:3500, 1:3000, 1:2500, 1:2000, 1:1500, 1:1000, 1:950, 1:900, 1:850, 1:800, 1:750, 1:700, 1:650, 1:600, 1:550, 1:500, 1:450, 1:400, 1:350, 1:300, 1:250, 1:200, 1:190, 1:180, 1:170, 1:160, 1:150, 1:140, 1:130, 1:120, 1:110, 1:100, 1:95, 1:90, 1:85, 1:80, 1:75, 1:70, 1:69, 1:68, 1:67, 1:66, 1:65, 1:64, 1:63, 1:62, 1:61, 1:60, 1:59, 1:58, 1:57, 1:56, 1:55, 1:54, 1:53, 1:52, 1:51, 1:50, 1:49, 1:48, 1:47, 1:46, 1:45, 1:44, 1:43, 1:42, 1:41, 1:40, 1:39, 1:38, 1:37, 1:36, 1:35, 1:34, 1:33, 1:32, 1:31, 1:30, 1:29, 1:28, 1:27, 1:26, 1:25, 1:24, 1:23, 1:22, 1:21, 1:20, 1:19, 1:18, 1:17, 1:16, 1:15, 1:14, 1:13, 1:12, 1:11, 1:10, 1:9, 1:8, 1:7, 1:6, 1:5, 1:4, 1:3, 1:2, 1:1, 1:0.9, 1:0.8, 1:0.7, 1:0.6, 1:0.5, 1:0.4, 1:0.3, 1:0.2, or 1:0.1.

[0179] In some embodiments, the ratio of a nucleic acid encoding the guide polynucleotide and the nucleic acid encoding the base editor fusion protein is about 10:1 to about 1:10 by weight. In some embodiments, the ratio of a nucleic acid encoding the guide polynucleotide and the nucleic acid encoding the base editor fusion protein is about 4:1, 3;1, 2:1, 1.5:1, 1:1, 1:1.5, 1:2, 1:3, or 1:4 by weight. In some embodiments, the molar ratio of a nucleic acid encoding the guide polynucleotide and the nucleic acid encoding the base editor fusion protein is about 500:1 to about 1:500.

[0180] In some embodiments, the ratio of a nucleic acid encoding the guide polynucleotide and the nucleic acid encoding the base editor fusion protein is about 1000:1 to about 1:1000 by weight. In some embodiments, the ratio of a nucleic acid encoding the guide polynucleotide and the nucleic acid encoding the base editor fusion protein is about 1000:1, 950:1, 900:1, 850:1, 800:1, 750:1, 700:1, 650:1, 600:1, 550:1, 500:1, 450:1, 400:1, 350:1, 300:1, 250:1, 200:1, 100:1, 95:1, 90:1, 85:1, 80:1, 75:1, 70:1, 65:1, 60:1, 55:1, 50:1, 45:1, 40:1, 35:1, 30:1, 25:1, 20:1, 19:1, 18:1, 17:1, 17:1, 15:1, 14:1, 13:1, 12:1, 11:1, 10:1, 9:1, 8:1, 7:1, 6:1, 5:1, 4:1, 3:1, 2;1, 1.9:1, 1.8:1, 1.7:1, 1.6:1, 1.5:1, 1.4:1, 1.3:1, 1.2:1, 1.1:1, 1.0:1, 0.9:1, 0.8:1, 0.7:1, 0.6:1,0.5:1, 0.4:1, 0.3:1, 0.2:1, or 0.1 by weight. In some embodiments, the ratio of a nucleic acid encoding the guide polynucleotide and the nucleic acid encoding the base editor fusion protein is about 1:0.1, 1:0.2, 1:0.3, 1:0.4, 1:0.5, 1:0.6, 1:0.7, 1:0.8, 1:0.9, 1:1.0, 1:1.1, 1:1.2, 1:1.3, 1:1.4, 1:1.5, 1:1.6, 1:1.7, 1:1.8, 1:1.9, 1:2, 1:3, 1:4, 1:5, 1:6, 1:7, 1:8, 1:9, 1:10, 1:11, 1:12, 1:13, 1:14, 1:15, 1:16, 1:17, 1:18, 1:19, 1:20, 1:25, 1:30, 1:35, 1:40, 1:45, 1:50, 1:55, 1:60, 1:65, 1:70, 1:75, 1:80, 1:85, 1:90, 1:95, 1:100, 1:150, 1:200, 1:250, 1:300, 1:350, 1:400, 1:450, 1:500, 1:550, 1:600, 1:650, 1:700, 1:750, 1:800, 1:850, 1:900, 1:950, or 1:1000 by weight. In some embodiments, the ratio of a nucleic acid encoding the guide polynucleotide and the nucleic acid encoding the base editor fusion protein is at least about 1000:1, 950:1, 900:1, 850:1, 800:1, 750:1, 700:1, 650:1, 600:1, 550:1, 500:1, 450:1, 400:1, 350:1, 300:1, 250:1, 200:1, 100:1, 95:1, 90:1, 85:1, 80:1, 75:1, 70:1, 65:1, 60:1, 55:1, 50:1, 45:1, 40:1, 35:1, 30:1, 25:1, 20:1, 19:1, 18:1, 17:1, 17:1, 15:1, 14:1, 13:1, 12:1, 11:1, 10:1, 9:1, 8:1, 7:1, 6:1, 5:1, 4:1, 3:1, 2;1, 1.9:1, 1.8:1, 1.7:1, 1.6:1, 1.5:1, 1.4:1, 1.3:1, 1.2:1, 1.1:1, 1.0:1, 0.9:1, 0.8:1, 0.7:1, 0.6:1, 0.5:1, 0.4:1, 0.3:1, 0.2:1, or 0.1 by weight. In some embodiments, the ratio of a nucleic acid encoding the guide polynucleotide and the nucleic acid encoding the base editor fusion protein is at least about 1:0.1, 1:0.2, 1:0.3, 1:0.4, 1:0.5, 1:0.6, 1:0.7, 1:0.8, 1:0.9, 1:1.0, 1:1.1, 1:1.2, 1:1.3, 1:1.4, 1:1.5, 1:1.6, 1:1.7, 1:1.8, 1:1.9, 1:2, 1:3, 1:4, 1:5, 1:6, 1:7, 1:8, 1:9, 1:10, 1:11, 1:12, 1:13, 1:14, 1:15, 1:16, 1:17, 1:18, 1:19, 1:20, 1:25, 1:30, 1:35, 1:40, 1:45, 1:50, 1:55, 1:60, 1:65, 1:70, 1:75, 1:80, 1:85, 1:90, 1:95, 1:100, 1:150, 1:200, 1:250, 1:300, 1:350, 1:400, 1:450, 1:500, 1:550, 1:600, 1:650, 1:700, 1:750, 1:800, 1:850, 1:900, 1:950, or 1:1000 by weight. In some embodiments, the ratio of a nucleic acid encoding the guide polynucleotide and the nucleic acid encoding the base editor fusion protein is at most about 1000:1, 950:1, 900:1, 850:1, 800:1, 750:1, 700:1, 650:1, 600:1, 550:1, 500:1, 450:1, 400:1, 350:1, 300:1, 250:1, 200:1, 100:1, 95:1, 90:1, 85:1, 80:1, 75:1, 70:1, 65:1, 60:1, 55:1, 50:1, 45:1, 40:1, 35:1, 30:1, 25:1, 20:1, 19:1, 18:1, 17:1, 17:1, 15:1, 14:1, 13:1, 12:1, 11:1, 10:1, 9:1, 8:1, 7:1, 6:1, 5:1, 4:1, 3:1, 2;1, 1.9:1, 1.8:1, 1.7:1, 1.6:1, 1.5:1, 1.4:1, 1.3:1, 1.2:1, 1.1:1, 1.0:1, 0.9:1, 0.8:1, 0.7:1, 0.6:1, 0.5:1, 0.4:1, 0.3:1, 0.2:1, or 0.1 by weight. In some embodiments, the ratio of a nucleic acid encoding the guide polynucleotide and the nucleic acid encoding the base editor fusion protein is at most about 1:0.1, 1:0.2, 1:0.3, 1:0.4, 1:0.5, 1:0.6, 1:0.7, 1:0.8, 1:0.9, 1:1.0, 1:1.1, 1:1.2, 1:1.3, 1:1.4, 1:1.5, 1:1.6, 1:1.7, 1:1.8, 1:1.9, 1:2, 1:3, 1:4, 1:5, 1:6, 1:7, 1:8, 1:9, 1:10, 1:11, 1:12, 1:13, 1:14, 1:15, 1:16, 1:17, 1:18, 1:19, 1:20, 1:25, 1:30, 1:35, 1:40, 1:45, 1:50, 1:55, 1:60, 1:65, 1:70, 1:75, 1:80, 1:85, 1:90, 1:95, 1:100, 1:150, 1:200, 1:250, 1:300, 1:350, 1:400, 1:450, 1:500, 1:550, 1:600, 1:650, 1:700, 1:750, 1:800, 1:850, 1:900, 1:950, or 1:1000 by weight.

[0181] In some embodiments, the molar ratio of a nucleic acid encoding the guide polynucleotide and the nucleic acid encoding the base editor fusion protein is about 10000:1 to about 1:10000. In some embodiments, the molar ratio of a nucleic acid encoding the guide polynucleotide and the nucleic acid encoding the base editor fusion protein is about 10000:1, 9500:1, 9000:1, 8500:1, 8000:1, 7500:1, 7000:1, 6500:1, 6000:1, 5500:1, 5000:1, 4500:1, 4000:1, 3500:1, 3000:1, 2500:1, 2000:1, 1500:1, 1000:1, 950:1, 900:1, 850:1, 800:1, 750:1, 700:1, 650:1, 600:1, 550:1, 500:1, 450:1, 400:1, 350:1, 300:1, 250:1, 200:1, 190:1, 180:1, 170:1, 160:1, 150:1, 140:1, 130:1, 120:1, 110:1, 100:1, 95:1, 90:1, 85:1, 80:1, 75:1, 70:1, 69:1, 68:1, 67:1, 66:1, 65:1, 64:1, 63:1, 62:1, 61:1, 60:1, 59:1, 58:1, 57:1, 56:1, 55:1, 54:1, 53:1, 52:1, 51:1, 50:1, 49:1, 48:1, 47:1, 46:1, 45:1, 44:1, 43:1, 42:1, 41:1, 40:1, 39:1, 38:1, 37:1, 36:1, 35:1, 34:1, 33:1, 32:1, 31:1, 30:1, 29:1, 28:1, 27:1, 26:1, 25:1, 24:1, 23:1, 22:1, 21:1, 20:1, 19:1, 18:1, 17:1, 16:1, 15:1, 14:1, 13:1, 12:1, 11:1, 10:1, 9:1, 8:1, 7:1, 6:1, 5:1, 4:1, 3:1, 2:1, 1:1, 0.9:1, 0.8:1, 0.7:1, 0.6:1, 0.5:1, 0.4:1, 0.3:1, 0.2:1, or 0.1:1. In some embodiments, the molar ratio of a nucleic acid encoding the guide polynucleotide and the nucleic acid encoding the base editor fusion protein is at least about 1:10000, 1:9500, 1:9000, 1:8500, 1:8000, 1:7500, 1:7000, 1:6500, 1:6000, 1:5500, 1:5000, 1:4500, 1:4000, 1:3500, 1:3000, 1:2500, 1:2000, 1:1500, 1:1000, 1:950, 1:900, 1:850, 1:800, 1:750, 1:700, 1:650, 1:600, 1:550, 1:500, 1:450, 1:400, 1:350, 1:300, 1:250, 1:200, 1:190, 1:180, 1:170, 1:160, 1:150, 1:140, 1:130, 1:120, 1:110, 1:100, 1:95, 1:90, 1:85, 1:80, 1:75, 1:70, 1:69, 1:68, 1:67, 1:66, 1:65, 1:64, 1:63, 1:62, 1:61, 1:60, 1:59, 1:58, 1:57, 1:56, 1:55, 1:54, 1:53, 1:52, 1:51, 1:50, 1:49, 1:48, 1:47, 1:46, 1:45, 1:44, 1:43, 1:42, 1:41, 1:40, 1:39, 1:38, 1:37, 1:36, 1:35, 1:34, 1:33, 1:32, 1:31, 1:30, 1:29, 1:28, 1:27, 1:26, 1:25, 1:24, 1:23, 1:22, 1:21, 1:20, 1:19, 1:18, 1:17, 1:16, 1:15, 1:14, 1:13, 1:12, 1:11, 1:10, 1:9, 1:8, 1:7, 1:6, 1:5, 1:4, 1:3, 1:2, 1:1, 1:0.9, 1:0.8, 1:0.7, 1:0.6, 1:0.5, 1:0.4, 1:0.3, 1:0.2, or 1:0.1. In some embodiments, the molar ratio of a nucleic acid encoding the guide polynucleotide and the nucleic acid encoding the base editor fusion protein is at least about 10000:1, 9500:1, 9000:1, 8500:1, 8000:1, 7500:1, 7000:1, 6500:1, 6000:1, 5500:1, 5000:1, 4500:1, 4000:1, 3500:1, 3000:1, 2500:1, 2000:1, 1500:1, 1000:1, 950:1, 900:1, 850:1, 800:1, 750:1, 700:1, 650:1, 600:1, 550:1, 500:1, 450:1, 400:1, 350:1, 300:1, 250:1, 200:1, 190:1, 180:1, 170:1, 160:1, 150:1, 140:1, 130:1, 120:1, 110:1, 100:1, 95:1, 90:1, 85:1, 80:1, 75:1, 70:1, 69:1, 68:1, 67:1, 66:1, 65:1, 64:1, 63:1, 62:1, 61:1, 60:1, 59:1, 58:1, 57:1, 56:1, 55:1, 54:1, 53:1, 52:1, 51:1, 50:1, 49:1, 48:1, 47:1, 46:1, 45:1, 44:1, 43:1, 42:1, 41:1, 40:1, 39:1, 38:1, 37:1, 36:1, 35:1, 34:1, 33:1, 32:1, 31:1, 30:1, 29:1, 28:1, 27:1, 26:1, 25:1, 24:1, 23:1, 22:1, 21:1, 20:1, 19:1, 18:1, 17:1, 16:1, 15:1, 14:1, 13:1, 12:1, 11:1, 10:1, 9:1, 8:1, 7:1, 6:1, 5:1, 4:1, 3:1, 2:1, 1:1, 0.9:1, 0.8:1, 0.7:1, 0.6:1, 0.5:1, 0.4:1, 0.3:1, 0.2:1, or 0.1:1. In some embodiments, the molar ratio of a nucleic acid encoding the guide polynucleotide and the nucleic acid encoding the base editor fusion protein is at least about 1:10000, 1:9500, 1:9000, 1:8500, 1:8000, 1:7500, 1:7000, 1:6500, 1:6000, 1:5500, 1:5000, 1:4500, 1:4000, 1:3500, 1:3000, 1:2500, 1:2000, 1:1500, 1:1000, 1:950, 1:900, 1:850, 1:800, 1:750, 1:700, 1:650, 1:600, 1:550, 1:500, 1:450, 1:400, 1:350, 1:300, 1:250, 1:200, 1:190, 1:180, 1:170, 1:160, 1:150, 1:140, 1:130, 1:120, 1:110, 1:100, 1:95, 1:90, 1:85, 1:80, 1:75, 1:70, 1:69, 1:68, 1:67, 1:66, 1:65, 1:64, 1:63, 1:62, 1:61, 1:60, 1:59, 1:58, 1:57, 1:56, 1:55, 1:54, 1:53, 1:52, 1:51, 1:50, 1:49, 1:48, 1:47, 1:46, 1:45, 1:44, 1:43, 1:42, 1:41, 1:40, 1:39, 1:38, 1:37, 1:36, 1:35, 1:34, 1:33, 1:32, 1:31, 1:30, 1:29, 1:28, 1:27, 1:26, 1:25, 1:24, 1:23, 1:22, 1:21, 1:20, 1:19, 1:18, 1:17, 1:16, 1:15, 1:14, 1:13, 1:12, 1:11, 1:10, 1:9, 1:8, 1:7, 1:6, 1:5, 1:4, 1:3, 1:2, 1:1, 1:0.9, 1:0.8, 1:0.7, 1:0.6, 1:0.5, 1:0.4, 1:0.3, 1:0.2, or 1:0.1. In some embodiments, the molar ratio of a nucleic acid encoding the guide polynucleotide and the nucleic acid encoding the base editor fusion protein is at most about 10000:1, 9500:1, 9000:1, 8500:1, 8000:1, 7500:1, 7000:1, 6500:1, 6000:1, 5500:1, 5000:1, 4500:1, 4000:1, 3500:1, 3000:1, 2500:1, 2000:1, 1500:1, 1000:1, 950:1, 900:1, 850:1, 800:1, 750:1, 700:1, 650:1, 600:1, 550:1, 500:1, 450:1, 400:1, 350:1, 300:1, 250:1, 200:1, 190:1, 180:1, 170:1, 160:1, 150:1, 140:1, 130:1, 120:1, 110:1, 100:1, 95:1, 90:1, 85:1, 80:1, 75:1, 70:1, 69:1, 68:1, 67:1, 66:1, 65:1, 64:1, 63:1, 62:1, 61:1, 60:1, 59:1, 58:1, 57:1, 56:1, 55:1, 54:1, 53:1, 52:1, 51:1, 50:1, 49:1, 48:1, 47:1, 46:1, 45:1, 44:1, 43:1, 42:1, 41:1, 40:1, 39:1, 38:1, 37:1, 36:1, 35:1, 34:1, 33:1, 32:1, 31:1, 30:1, 29:1, 28:1, 27:1, 26:1, 25:1, 24:1, 23:1, 22:1, 21:1, 20:1, 19:1, 18:1, 17:1, 16:1, 15:1, 14:1, 13:1, 12:1, 11:1, 10:1, 9:1, 8:1, 7:1, 6:1, 5:1, 4:1, 3:1, 2:1, 1:1, 0.9:1, 0.8:1, 0.7:1, 0.6:1, 0.5:1, 0.4:1, 0.3:1, 0.2:1, or 0.1:1. In some embodiments, the molar ratio of a nucleic acid encoding the guide polynucleotide and the nucleic acid encoding the base editor fusion protein is at most about 1:10000, 1:9500, 1:9000, 1:8500, 1:8000, 1:7500, 1:7000, 1:6500, 1:6000, 1:5500, 1:5000, 1:4500, 1:4000, 1:3500, 1:3000, 1:2500, 1:2000, 1:1500, 1:1000, 1:950, 1:900, 1:850, 1:800, 1:750, 1:700, 1:650, 1:600, 1:550, 1:500, 1:450, 1:400, 1:350, 1:300, 1:250, 1:200, 1:190, 1:180, 1:170, 1:160, 1:150, 1:140, 1:130, 1:120, 1:110, 1:100, 1:95, 1:90, 1:85, 1:80, 1:75, 1:70, 1:69, 1:68, 1:67, 1:66, 1:65, 1:64, 1:63, 1:62, 1:61, 1:60, 1:59, 1:58, 1:57, 1:56, 1:55, 1:54, 1:53, 1:52, 1:51, 1:50, 1:49, 1:48, 1:47, 1:46, 1:45, 1:44, 1:43, 1:42, 1:41, 1:40, 1:39, 1:38, 1:37, 1:36, 1:35, 1:34, 1:33, 1:32, 1:31, 1:30, 1:29, 1:28, 1:27, 1:26, 1:25, 1:24, 1:23, 1:22, 1:21, 1:20, 1:19, 1:18, 1:17, 1:16, 1:15, 1:14, 1:13, 1:12, 1:11, 1:10, 1:9, 1:8, 1:7, 1:6, 1:5, 1:4, 1:3, 1:2, 1:1, 1:0.9, 1:0.8, 1:0.7, 1:0.6, 1:0.5, 1:0.4, 1:0.3, 1:0.2, or 1:0.1.

[0182] Precision genome editing is a growing field with industrial, agricultural, and biomedical applications. One of the dominant genome-editing systems available today is clustered regularly interspaced short palindromic repeats (CRISPR)—CRISPR associated 9 (Cas9). Through the use of a guide RNA (gRNA) with a sequence homologous to that of a sequence of DNA in the target genome (known as the protospacer) adjacent to a specific protospacer-adjacent motif (PAM) comprising the sequence NGG (N is any standard base) in the DNA, Cas9 can be used to create a double-strand break (DSB) at the targeted sequence. Non-homologous end joining (NHEJ) at DSBs can be used to create indels and knock out genes at genetic loci; likewise, homology-directed repair (HDR) can be used, with an introduced template DNA, to insert genes or modify the targeted sequence. A variety of Cas9-based tools have been developed in recent years, including tools that methylate DNA, recognize broader sequence space, or create single-strand nicks. In 2016, Komor et al. described the use of CRISPR-Cas9 to convert a cytosine base to a thymine base without the introduction of a template DNA strand and without the need for DSBs (Komor A C, Kim Y B, Packer M S, et al. Programmable editing of a target base in genomic DNA without double-stranded DNA cleavage. Nature, 2016, 533:420-4, incorporated herein by reference in its entirety). After the cytidine deaminase domain of rat APOBEC1 was fused to the N-terminus of catalytically-dead Cas9 (dCas9) using the linker XTEN (resulting in a fusion protein called base editor 1, or BE1), conversion of cytosine to uracil was observed between position 4 and position 8 within the 20-nt protospacer region of DNA (or, to express it a different way, 13 to 17 nucleotides upstream of the PAM). Of note, any cytosine base within this “window” was amenable to editing, resulting in varied outcomes depending on how many and which cytosines were edited. After DNA replication or repair, each uracil was replaced by a thymine, completing the C to T base editing.3 The next version of base editor (BE2) incorporated a uracil glycosylase inhibitor fused to the C-terminus of dCas9 to help inhibit base excision repair of the uracil bases resulting from the cytidine deaminase activity (which otherwise would act to restore the original cytosine bases); this improved the efficiency of C to T base editing. The final version, BE3, used a Cas9 nickase rather than dCas9; the nickase cut the unedited strand opposite the edited C to T bases, stimulating the removal of the opposing guanidine through eukaryotic mismatch repair. BE2 and BE3 base editing was observed in both human and murine cell lines. The specificity of base editing has been further improved through the addition of mutations to the Cas9 nickase; in similar fashion, Cas9 has been mutated to narrow the width of the editing window from approximately 5 nucleotides to as little as 1-2 nucleotides (Rees H A, Komor A C, Yeh W H, et al. Improving the DNA specificity and applicability of base editing through protein engineering and protein delivery. Nat Commun, 2017, 8:15790, Kim Y B, Komor A C, Levy J M, et al. Increasing the genome-targeting scope and precision of base editing with engineered Cas9-cytidine deaminase fusions. Nat Biotechnol, 2017, 35:371-6, each of which is incorporated herein by reference in its entirety).

[0183] An alternative cytosine base editing platform is by linking the activation-induced cytosine deaminase domain PmCDA1 to dCas9 (Target-AID), they were able to demonstrate targeted C to T base editing in yeast. Furthermore, an alternative C to T editing strategy was also demonstrated without fusing a deaminase domain to Cas9; instead, a SH3 (Src 3 homology) domain was added to the C-terminus of dCas9 while a SHL (SH3 interaction ligand) was added to PmCDA1.6 Optimization of efficiency was achieved through the use of a Cas9 nickase rather than dCas9. Further, an uracil DNA glycosylase inhibitor was added to enhance base editing in the mammalian CHO cell line. The resulting platform was able to consistently edit bases within 3 to 5 bases of the 18th nucleotide upstream of the PAM sequence (Nishida K, Arazoe T, Yachie N, et al. Targeted nucleotide editing using hybrid prokaryotic and vertebrate adaptive immune systems. Science, 2016, 353: aaf8729, incorporated herein by reference in its entirety).

[0184] A distinct cytosine base editing platform used Cpf1 (also known as Cas12a) instead of Cas9 as the RNA-guided endonuclease. Catalytically-inactive Cpf1 was fused to APOBEC1 (dLbCpf1-BE0), leading to C to T conversion in a human cell line. While the Cas9 base editor variants BE3 and Target-AID recognize the PAM sequence NGG, dLbCpf1-BEO recognizes the T-rich PAM sequence TTTV. Although base editing was observed between positions 8 and 13 of the protospacer sequence with dLbCpf1-BEO, the introduction of additional mutations into Cpf1 was able to reduce the window to positions 10 to 12. However, narrowing of the base editing window correlated with a decrease in editing efficiency (Li X, Wang Y, Liu Y, et al. Base editing with a Cpf1-cytidine deaminase fusion. Nat Biotechnol, 2018, 36:324-7, incorporated herein by reference in its entirety).

[0185] Cytosine base editing is not wholly predictable; indels can occur at the target site, albeit at lower frequencies that those observed for C to T editing editors. Furthermore, cytosine base editors can occasionally cause C to A or C to G edits rather than the expected C to T edits. Adding linker lengths between Cas9 nickase and the rat APOBECI cytosine deaminase domain from 16 amino acids to 32 amino acids, the linker between the Cas9 nickase and the uracil glycosylase inhibitor from 4 amino acids to 9 amino acids, and using a second uracil glycosylase inhibitor was appended to the C-terminus of the new cytosine base editor using another 9 amino acid linker improved cytosine base editor termed “BE4” (Komor A C, Zhao K T, Packer M S, et al. Improved base excision repair inhibition and bacteriophage Mu Gam protein yields C: G-to-T: A base editors with higher efficiency and product purity. Sci Adv, 2017, 3: eaao4774. Incorporated herein by reference in its entirety).

[0186] By fusing Escherichia coli adenine tTNA deaminase TadA (ecTadA) to dCas9 and mutagenesis of the ecTadA domain in conjunction with selection for editing activity revealed that A106V and D108N mutations yielded a base editor capable of editing adenine to guanine in DNA, termed ABE7.10 (Gaudelli NM, Komor AC, Rees H A, et al. Programmable base editing of A·T to G·C in genomic DNA without DNA cleavage. Nature, 2017, 551:464-71. Incorporated herein by reference in its entirety). Koblan et al. improved the efficiency of ABE7.10 through modification of nuclear localization signals and codon optimization, yielding a version called ABEmax; a similar approach improved the efficiency of the cytosine base editor BE4.10 Huang et al. performed further development of both adenine and cytosine base editors to use alternative PAMs and to expand their editing windows, thereby increasing their targeting range (Improving cytidine and adenine base editors by expression optimization and ancestral reconstruction. Nat Biotechnol, 2018, 36:843-6, Incorporated herein by reference in its entirety).

[0187] The same has proven to be true of base editors, 12-14 although comparisons of Cas9, cytosine base editors, and adenine base editors using the same gRNAs have shown distinct off-target profiles.

[0188] A variety of studies have raised concern about gRNA-independent off-target base editing, caused by the deaminase domain acting in isolation (without the need for engagement of DNA by the Cas9-gRNA complex). Additional studies showed that the gRNA-independent off-target effects of base editors are not limited to DNA. RNA sequencing of cells treated with either cytosine base editors or adenine base editors revealed transcriptome-wide off-target editing of RNA, and that introduction of amino acid substitution in the deaminase domain of adenine base (e.g. R106W) editors reduced off-target editing of RNA without substantially reducing on-target DNA base-editing efficiency. Zuo E, Sun Y, Wei W, et al. Cytosine base editor generates substantial off-target single-nucleotide variants in mouse embryos. Science, 2019, 364:289-92; Jin S, Zong Y, Gao Q, et al. Cytosine, but not adenine, base editors induce genome-wide off-target mutations in rice. Science, 2019, 364:292-5; Grünewald J, Zhou R, Garcia S P, et al. Transcriptome-wide off-target RNA editing induced by CRISPR-guided DNA base editors. Nature, 2019, 569:433-7; Grünewald J, Zhou R, Iyer S, et al. CRISPR DNA base editors with reduced RNA off-target and self-editing activities. Nat Biotechnol, 2019, 37:1041-8; Zhou C, Sun Y, Yan R, et al. Off-target RNA mutation induced by DNA base editing and its elimination by mutagenesis. Nature, 2019, 571:275-8; Rees HA, Wilson C, Doman J L, et al. Analysis and minimization of cellular RNA editing by DNA adenine base editors. Sci Adv, 2019, 5: eaax5717, each of which is incorporated herein by reference in its entirety).

[0189] Correction of disease-causing mutations via precision editing with standard Cas9 genome editing has largely required HDR. Since HDR is limited to cells in S or G2 phase of mitosis, precision editing of non-mitotic cells is difficult. However, base editors are not reliant on HDR; the editing of postmitotic cochlear cells in mice is feasible with cytosine base editor BE3. By injecting BE3 and a gRNA in the form of a preassembled ribonucleoprotein via cationic liposomes, serine-33 in beta-catenin was edited to phenylalanine (TCT codon edited to TTT), allowing for the transdifferentiation of supporting cells into hair cells. Base editing of cochlear tissue was confirmed via sequencing, showing an editing rate between 0.7% and 3.0% depending on the region of the cochlea. In contrast, standard Cas9 editing via HDR showed negligible signs of efficacy in cochlear cells. A variant of SaBE3, delivered into the liver via adeno-associated viral (AAV) vectors, was reported to directly correct a pathogenic T to C mutation in the Pah gene with an editing rate as high as 29% and thereby treat the disease phenylketonuria in adult mice. Adenine base editing has also been demonstrated to generate mutations in mice. Yeh WH, Chiang H, Rees H A, et al. In vivo base editing of post-mitotic sensory cells. Nat Commun, 2018, 9:2184; Villiger L, Grisch-Chan H M, Lindsay H, et al. Treatment of a metabolic liver disease by in vivo genome base editing in adult mice. Nat Med, 2018, 24:1519-25; Ryu S M, Koo T, Kim K, et al. Adenine base editing in mouse embryos and an adult mouse model of Duchenne muscular dystrophy. Nat Biotechnol, 2018, 36:536-9; Song C Q, Jiang T, Richter M, et al. Adenine base editing in an adult mouse model of tyrosinaemia. Nat Biomed Eng, 2020, 4:125-30; Pisciotta L, Favari E, Magnolo L, et al. Characterization of three kindreds with familial combined hypolipidemia caused by loss-of-function mutations of ANGPTL3. Circ Cardiovasc Genet, 2012, 5:42-50. each of which is incorporated herein by reference in its entirety.

[0190] Provided herein are compositions of nucleobase editor systems that comprises nucleobase editor proteins, complexes, or compounds that is capable of making a modification or conversion to a nucleobase (e.g., A, T, C, G, or U) within a target nucleotide sequence.

[0191] A nucleobase editor or a base editor (BE) refers to an agent comprising a polypeptide that is capable of making a modification to a base (e.g., A, T, C, G, or U) within a nucleic acid sequence (e.g., DNA or RNA). In some embodiments, the base editor is capable of deaminating a base within a nucleic acid. In some embodiments, the base editor is capable of deaminating a base within a DNA molecule. In some embodiments, the base editor is capable of deaminating an adenine (A) in DNA.

[0192] In some embodiments, the base editor comprises a fusion protein comprising a programmable DNA binding protein fused to an adenosine deaminase. In some embodiments, the base editor comprises a fusion protein comprising a Cas9 protein and an adenosine deaminase. In some embodiments, the base editor is a Cas9 nickase (nCas9) fused to an adenosine deaminase. In some embodiments, the base editor is a nuclease-inactive Cas9 (dCas9) fused to an adenosine deaminase. In some embodiments, the base editor comprises a fusion protein comprising a programmable DNA binding protein fused to an cytidine deaminase. In some embodiments, the base editor comprises a fusion protein comprising a Cas9 protein and an cytidine deaminase. In some embodiments, the base editor is a Cas9 nickase (nCas9) fused to an cytidine deaminase. In some embodiments, the base editor is a nuclease-inactive Cas9 (dCas9) fused to an cytidine deaminase. In some embodiments, the base editor further comprises, an inhibitor of base excision repair, for example, a UGI domain. In some embodiments, the fusion protein comprises a Cas9 nickase fused to a deaminase and an inhibitor of base excision repair, such as a UGI or dISN domain. In some embodiments, the dCas9 domain of the fusion protein comprises a D10A and a H840A mutation as numbered in the wild type SpCas9 amino acid sequence. In some embodiments, the UGI comprises the following amino acid sequence:

(SEQ ID NO: 16)
>splP14739IUNGI_BPPB2 Uracil-DNA glycosylase
inhibitor
MTNLSDIIEKETGKQLVIQESILMLPEEVE
EVIGNKPESDILVHTAYDESTDENVMLLT
S D APE YKPW ALVIQDS NGENKIKML

[0193] In some embodiments, a base editor system provided herein comprises a base editor fusion protein. For example, a base editor fusion protein may comprise a programmable DNA binding protein and a deaminase, e.g. an adenosine deaminase. In some embodiments, any of the fusion proteins provided herein are base editors. In some embodiments, the programmable DNA binding protein is a Cas9 domain, a Cpf1 domain, a CasX domain, a CasY domain, a Cas12b domain, a C2c2 domain, aC2c3 domain, or an Argonaute domain. In some embodiments, the programmable DNA binding protein is a Cas9 domain. The Cas9 domain may be any of the Cas9 domains or Cas9 proteins (e.g., nuclease inactive Cas9 or Cas9 nickase, or a Cas9 variant from any species) provided herein. In some embodiments, any of the Cas9 domains or Cas9 proteins provided herein may be fused with any of the deaminases provided herein. In some embodiments, the base editor comprises a deaminase, e.g., an adenosine deaminase and a programmable DNA binding protein, e.g., a Cas9 domain joined via a linker. In some embodiments, the base editor comprises a fusion protein comprising a deaminase, e.g., an adenosine deaminase and a programmable DNA binding protein, e.g., a Cas9 domain joined via a linker. In some embodiments, the linker is a peptide linker. In some embodiments, a linker is present between the deaminase domain and the Cas9 domain. In some embodiments, an deaminase and a programmable DNA binding domain are fused via any of the peptide linkers provided herein. For example, an adenosine deaminase and a Cas9 domain may be fused via a linker that comprises between 1 and 200 amino acids. In some embodiments, the adenosine deaminase and the programmable DNA binding protein are fused via a linker that comprises from 1 to 5, 1 to 10, 1 to 20, 1 to 30, 1 to 40, 1 to 50, 1 to 60, 1 to 80, 1 to 100, 1 to 150, 1 to 200, 5 to 10, 5 to 20, 5 to 30, 5 to 40, 5 to 60, 5 to 80, 5 to 100, 5 to 150, 5 to 200, 10 to 20, 10 to 30, 10 to 40, 10 to 50, 10 to 60, 10 to 80, 10 to 100, 10 to 150, 10 to 200, 20 to 30, 20 to 40, 20 to 50, 20 to 60, 20 to 80, 20 to 100, 20 to 150, 20 to 200, 30 to 40, 30 to 50, 30 to 60, 30 to 80, 30 to 100, 30 to 150, 30 to 200, 40 to 50, 40 to 60, 40 to 80, 40 to 100, 40 to 150, 40 to 200, 50 to 60 50 to 80, 50 to 100, 50 to 150, 50 to 200, 60 to 80, 60 to 100, 60 to 150, 60 to 200, 80 to 100, 80 to 150, 80 to 200, 100 to 150, 100 to 200, or 150 to 200 amino acids in length. In some embodiments, the adenosine deaminase and the programmable DNA binding protein are fused via a linker that comprises 4, 16, 32, or 104 amino acids in length. In some embodiments, the adenosine deaminase and the programmable DNA binding protein are fused via a linker that comprises the amino acid sequence of SGSETPGTSESATPES (SEQ ID NO: 17), SGGS (SEQ ID NO: 18), SGGSSGSETPGTSESATPESSGGS (SEQ ID NO: 19), SGGSSGGSSGSETPGTSESATPESSGGSSGGS (SEQ ID NO: 20), or GGSGGSPGSPAGSPTSTEEGTSESATPESGPGTSTEPSEGSAPGSPAGSPTSTEEGTSTE PSEGSAPGTSTEPSEGSAPGTSESATPESGPGSEPATSGGSGGS (SEQ ID NO: 21). In some embodiments, the adenosine deaminase and the programmable DNA binding protein are fused via a linker comprising the amino acid sequence SGSETPGTSESATPES (SEQ ID NO: 17), which may also be referred to as the XTEN linker. In some embodiments, the linker is 24 amino acids in length. In some embodiments, the linker comprises the amino acid sequence SGGSSGGSSGSETPGTSESATPES (SEQ ID NO: 23). In some embodiments, the linker is 40 amino acids in length. In some embodiments, the linker comprises the amino acid sequence SGGSSGGSSGSETPGTSESATPESSGGSSGGSSGGSSGGS (SEQ ID NO: 24). In some embodiments, the linker is 64 amino acids in length. In some embodiments, the linker comprises the amino acid sequence SGGSSGGSSGSETPGTSESATPESSGGSSGGSSGGSSGGSSGSETPGTSESATPESSGGS SGGS (SEQ ID NO: 25). In some embodiments, the linker is 92 amino acids in length. In some embodiments, the linker comprises the amino acid sequence

(SEQ ID NO: 26)
PGSPAGSPTSTEEGTSESATPESGPGTSTEPSEGSAPGSPAGSPTSTEEG
TSTEPSEGSAPGTSTEPSEGSAPGTSESATPESGPGSEPATS

[0194] In some embodiments, a base editor system provided herein comprises a base editor comprising a fusion protein comprising an inhibitor of base repair. In some embodiments, a base editor comprises a fusion protein comprising a cytidine deaminase and a programmable DNA binding domain, e.g. a Cas9 domain. In some embodiments, a base editor comprises a fusion protein comprising an adenosine deaminase and a programmable DNA binding domain, e.g. a Cas9 domain. In some embodiments, the base editor or the fusion protein further comprises an inhibitor of base repair (IBR). In some embodiments, the IBR comprises an inhibitor of inosine base repair. In some embodiments, the IBR is an inhibitor of inosine base excision repair. In some embodiments, the inhibitor of inosine base excision repair is a catalytically inactive inosine specific nuclease (dISN). In some embodiments, a dISN may inhibit (e.g., by steric hindrance) inosine removing enzymes from excising the inosine residue from DNA. For example, catalytically dead inosine glycosylases (e.g., alkyl adenine glycosylase [AAG]) will bind inosine but will not create an abasic site or remove the inosine, thereby sterically blocking the newly-formed inosine moiety from potential DNA damage/repair mechanisms. Thus, this disclosure contemplates a fusion protein comprising a programmable DNA binding protein and an adenosine deaminase further fused to a dISN. This disclosure contemplates a fusion protein comprising any Cas9 domain, for example, a Cas9 nickase (nCas9) domain, a catalytically inactive Cas9 (dCas9) domain, a high fidelity Cas9 domain, or a Cas9 domain with reduced PAM exclusivity. It should be understood that the use of a dISN may increase the editing efficiency of a adenosine deaminase that is capable of catalyzing a A to I change. For example, fusion proteins comprising a dISN domain may be more efficient in deaminating A residues.

[0195] In some embodiments, the base editors provided herein comprise fusion proteins that further comprise one or more nuclear targeting sequences, for example, a nuclear localization sequence (NLS). In some embodiments, the fusion protein comprises multiple NLSs. In some embodiments, the fusion protein comprises a NLS at the N-terminus and the C-terminus of the fusion protein. In some embodiments, a NLS comprises an amino acid sequence that facilitates the importation of a protein, that comprises an NLS, into the cell nucleus. In some embodiments, the NLS is fused to the N-terminus of the fusion protein. In some embodiments, the NLS is fused to the C-terminus of the fusion protein. In some embodiments, the NLS is fused to the N-terminus of the programmable DNA binding protein, e.g. the Cas9. In some embodiments, the NLS is fused to the C-terminus of the programmable DNA binding protein. In some embodiments, the NLS is fused to the N-terminus of the adenosine deaminase. In some embodiments, the NLS is fused to the C-terminus of the adenosine deaminase. In some embodiments, the NLS is fused to the fusion protein via one or more linkers. In some embodiments, the NLS is fused to the fusion protein without a linker. In some embodiments, the NLS comprises an amino acid sequence of any one of the NLS sequences provided or referenced herein. In some embodiments, a NLS comprises the amino acid sequence PKKKRKV (SEQ ID NO: 27) or MDSLLMNRRKFLYQFKNVRWAKGRRETYLC (SEQ ID NO: 28). Additional nuclear localization sequences are known in the art and would be apparent to the skilled artisan. For example, NLS sequences are described in Plank et ah, PCT/EP2000/011690, the contents of which are incorporated herein by reference for their disclosure of exemplary nuclear localization sequences.

[0196] In some embodiments, the fusion proteins provided herein do not comprise a linker. In some embodiments, a linker is present between one or more of the domains or proteins (e.g., adenosine deaminase, napDNAbp, NLS, and/or IBR). In some embodiments, the “-” used in the general architecture above indicates the presence of an optional linker.

[0197] Some aspects of the disclosure provide base editors or fusion proteins that comprise a programmable DNA binding protein and at least two adenosine deaminase domains. Without wishing to be bound by any particular theory, dimerization of adenosine deaminases (e.g., in cis or in trans) may improve the ability (e.g., efficiency) of the fusion protein to modify a nucleic acid base, for example to deaminate adenine. In some embodiments, any of the fusion proteins may comprise 2, 3, 4 or 5 adenosine deaminase domains. In some embodiments, any of the fusion proteins provided herein comprise two adenosine deaminases. In some embodiments, any of the fusion proteins provided herein contain only two adenosine deaminases. In some embodiments, the adenosine deaminases are the same. In some embodiments, the adenosine deaminases are any of the adenosine deaminases provided herein. In some embodiments, the adenosine deaminases are different. In some embodiments, the first adenosine deaminase is any of the adenosine deaminases provided herein, and the second adenosine is any of the adenosine deaminases provided herein, but is not identical to the first adenosine deaminase. In some embodiments, the first adenosine deaminase comprises any one of the mutations provided herein as numbered in SEQ ID NO: 1. In some embodiments, the second adenosine deaminase comprises any one of the mutations provided herein as numbered in SEQ ID NO: 1. In some embodiments, the first adenosine deaminase comprises any one of the mutations provided herein as numbered in SEQ ID NO: 1, and the second adenosine deaminase comprises a wild type adenosine deaminase sequence. In some embodiments, the second adenosine deaminase comprises any one of the mutations provided herein as numbered in SEQ ID NO: 1, and the first adenosine deaminase comprises a wild type adenosine deaminase sequence. As one example, the fusion protein may comprise a first adenosine deaminase and a second adenosine deaminase that both comprise a A106V, D108N, D147Y, and E155V mutation from ecTadA (SEQ ID NO: 1). As another example, the fusion protein may comprise a first adenosine deaminase domain that comprises a A106V, D108N, D147Y, and E155V mutation from ecTadA (SEQ ID NO: 1), and a second adenosine deaminase that comprises a L84F, A106V, D108N, H123Y, D147Y, E155V, and I156F mutation from ecTadA (SEQ ID NO: 1).

[0198] In some embodiments, the adenosine deaminase comprises the amino acid sequence:

(SEQ ID NO: 1)
MSEVEFSHEYWMRHALTLAKRAWDEREVPVGAVLVHNNRVIGEGWNRPI
GRHDPTAHAEIMALRQGGLVMQNYRLIDATLYVTLEPCVMCAGAMIHSR
IGRVVFGARDAKTGAAGSLMDVLHHPGMNHRVEITEGILADECAALLSD
FFRMRRQEIKAQKKAQSSTD

[0199] In some embodiments, the fusion protein comprises two adenosine deaminases (e.g., a first adenosine deaminase and a second adenosine deaminase). In some embodiments, the first adenosine deaminase is N-terminal to the second adenosine deaminase in the fusion protein. In some embodiments, the first adenosine deaminase is C-terminal to the second adenosine deaminase in the fusion protein. In some embodiments, the first adenosine deaminase and the second deaminase are fused directly or via a linker. In some embodiments, the linker is any of the linkers provided herein, for example, any of the linkers described in the “Linkers” section. In some embodiments, the first adenosine deaminase is the same as the second adenosine deaminase. In some embodiments, the first adenosine deaminase and the second adenosine deaminase are any of the adenosine deaminases described herein. In some embodiments, the first adenosine deaminase and the second adenosine deaminase are different. In some embodiments, the first adenosine deaminase is any of the adenosine deaminases provided herein. In some embodiments, the second adenosine deaminase is any of the adenosine deaminases provided herein but is not identical to the first adenosine deaminase. In some embodiments, the first adenosine deaminase is an ecTadA adenosine deaminase. In some embodiments, the first adenosine deaminase comprises an amino acid sequence that is at least 60%, at least 65%, at least 70%, at least 75%, at least 80%, at least 85%, at least 90%, at least 95%, at least 96%, at least 97%, at least 98%, at least 99%, or at least 99.5% identical to the amino acid sequence set forth SEQ ID NO: 1 or to any of the adenosine deaminases provided herein. In some embodiments, the second adenosine deaminase comprises an amino acid sequence that is at least 60%, at least 65%, at least 70%, at least 75%, at least 80%, at least 85%, at least 90%, at least 95%, at least 96%, at least 97%, at least 98%, at least 99%, or at least 99.5% identical to the amino acid sequence set forth SEQ ID NO: 1 or to any of the adenosine deaminases provided herein. In some embodiments, the second adenosine deaminase comprises the amino acid sequence of SEQ ID NO: 1.

[0200] In some embodiments, the fusion proteins provided herein do not comprise a linker. In some embodiments, a linker is present between one or more of the domains or proteins (e.g., first adenosine deaminase, second adenosine deaminase, programmable DNA binding protein, and/or NLS).

[0201] It should be appreciated that the fusion proteins of the present disclosure may comprise one or more additional features. For example, in some embodiments, the fusion protein may comprise cytoplasmic localization sequences, export sequences, such as nuclear export sequences, or other localization sequences, as well as sequence tags that are useful for solubilization, purification, or detection of the fusion proteins. Suitable protein tags provided herein include, but are not limited to, biotin carboxylase carrier protein (BCCP) tags, myc-tags, calmodulin-tags, FLAG-tags, hemagglutinin (HA)-tags, polyhistidine tags, also referred to as histidine tags or His-tags, maltose binding protein (MBP)-tags, nus-tags, glutathione-S-transferase (GST)-tags, green fluorescent protein (GFP)-tags, thioredoxin-tags, S-tags, Softags (e.g., Softag 1, Softag 3), strep-tags, biotin ligase tags, FLASH tags, V5 tags, and SBP-tags. Additional suitable sequences will be apparent to those of skill in the art. In some embodiments, the fusion protein comprises one or more His tags.

[0202] In some embodiments, the fusion protein comprises an amino acid sequence that is at least 60%, at least 65%, at least 70%, at least 75%, at least 80%, at least 85%, at least 90%, at least 95%, at least 96%, at least 97%, at least 98%, at least 99%, at least 99.5%, at least 99.7%, or at least 99.9% identical to any one of the amino acid sequences listed in Table 23. In some embodiments, the fusion protein comprises any one of the amino acid sequences listed in Table 23. In some embodiments, the sequence of the fusion protein is any one of the amino acid sequences listed in Table 23. In some embodiments, the fusion protein comprises an amino acid sequence that is at least 60%, at least 65%, at least 70%, at least 75%, at least 80%, at least 85%, at least 90%, at least 95%, at least 96%, at least 97%, at least 98%, at least 99%, at least 99.5%, at least 99.7%, or at least 99.9% identical to any one of the amino acid sequences of SEQ ID NOs: 2137, 2149, 2154, 2158, 2188, 2140, 40, 2146, 2152, 2156, and 2160. In some embodiments, the fusion protein comprises any one of the amino acid sequences of SEQ ID NOs: 2137, 2149, 2154, 2158, 2188, 2140, 40, 2146, 2152, 2156, and 2160. In some embodiments, the sequence of the fusion protein is any one of the amino acid sequences of SEQ ID NOs: 2137, 2149, 2154, 2158, and 2188.

[0203] In some embodiments, the fusion protein is encoded by the polynucleotide sequence that is at least 60%, at least 65%, at least 70%, at least 75%, at least 80%, at least 85%, at least 90%, at least 95%, at least 96%, at least 97%, at least 98%, at least 99%, at least 99.5%, at least 99.7%, or at least 99.9% identical to any one of the polynucleotide sequences listed in Table 23. In some embodiments, the fusion protein is encoded by any one of the polynucleotide sequences listed in Table 23. In some embodiments, the fusion protein is expressed by the polynucleotide sequence that is at least 60%, at least 65%, at least 70%, at least 75%, at least 80%, at least 85%, at least 90%, at least 95%, at least 96%, at least 97%, at least 98%, at least 99%, at least 99.5%, at least 99.7%, or at least 99.9% identical to any one of the polynucleotide sequences listed in Table 23. In some embodiments, the fusion protein is expressed by any one of the polynucleotide sequences listed in Table 23. In some embodiments, the fusion protein is encoded by the polynucleotide sequence that comprises at least 60%, at least 65%, at least 70%, at least 75%, at least 80%, at least 85%, at least 90%, at least 95%, at least 96%, at least 97%, at least 98%, at least 99%, at least 99.5%, at least 99.7%, or at least 99.9% identical to any one of the polynucleotide sequences of SEQ ID NOs: 2192, 2148, 2153, 2157, 2161, 2168, 2174, 2180, 2186, 2189, 2139, 2142, 2145, 2151, 2155, 2159, 2162, 2164, 2167, 2169, 2171, 2173, 2175, 2177, 2179, 2181, 2183, 2185, 2187, and 2190. In some embodiments, the fusion protein is encoded by the polynucleotide sequence that comprises any one of the polynucleotide sequences of SEQ ID NOs: 2192, 2148, 2153, 2157, 2161, 2168, 2174, 2180, 2186, 2189, 2139, 2142, 2145, 2151, 2155, 2159, 2162, 2164, 2167, 2169, 2171, 2173, 2175, 2177, 2179, 2181, 2183, 2185, 2187, and 2190. In some embodiments, the fusion protein is encoded by any one of the polynucleotide sequences of SEQ ID NOs: 2192, 2148, 2153, 2157, 2161, 2168, 2174, 2180, 2186, and 2189. In some embodiments, the fusion protein is expressed by the polynucleotide sequence that comprises at least 60%, at least 65%, at least 70%, at least 75%, at least 80%, at least 85%, at least 90%, at least 95%, at least 96%, at least 97%, at least 98%, at least 99%, at least 99.5%, at least 99.7%, or at least 99.9% identical to any one of the polynucleotide sequences of SEQ ID NOs: 2192, 2148, 2153, 2157, 2161, 2168, 2174, 2180, 2186, 2189, 2139, 2142, 2145, 2151, 2155, 2159, 2162, 2164, 2167, 2169, 2171, 2173, 2175, 2177, 2179, 2181, 2183, 2185, 2187, 2190, 2138, 2147, 2158, or a combination thereof: In some embodiments, the fusion protein is encoded by the polynucleotide sequence that comprises any one of the polynucleotide sequences of SEQ ID NOs: 2192, 2148, 2153, 2157, 2161, 2168, 2174, 2180, 2186, 2189, 2139, 2142, 2145, 2151, 2155, 2159, 2162, 2164, 2167, 2169, 2171, 2173, 2175, 2177, 2179, 2181, 2183, 2185, 2187, 2190, 2138, 2147, 2158, or a combination thereof. In some embodiments, the fusion protein is expressed by any one of the polynucleotide sequences of SEQ ID NOs: 2192, 2148, 2153, 2157, 2161, 2168, 2174, 2180, 2186, and 2189. In some embodiments, the polynucleotide sequence further comprises at least 60%, at least 65%, at least 70%, at least 75%, at least 80%, at least 85%, at least 90%, at least 95%, at least 96%, at least 97%, at least 98%, at least 99%, at least 99.5%, at least 99.7%, or at least 99.9% identical to any one of the polynucleotide sequences of SEQ ID NOs: 2138, 2147, 2158, or a combination thereof. In some embodiments, the polynucleotide sequence further comprises any one of the polynucleotide sequences of SEQ ID NOs: 2138, 2147, 2158, or a combination thereof.

[0204] In some embodiments, the nucleobase editor ABE8.8 comprises a fusion protein comprising the sequence as provided below:

(SEQ ID NO: 3)
MSEVEFSHEYWMRHALTLAKRARDEREVPVGAVLVLNNRVIGEGWNRAI
GLHDPTAHAEIMALRQGGLVMQNYRLIDATLYVTFEPCVMCAGAMIHSR
IGRVVFGVRNAKTGAAGSLMDVLHHPGMNHRVEITEGILADECAALLCR
FFRMPRRVFNAQKKAQSSTDSGGSSGGSSGSETPGTSESATPESSGGSS
GGSDKKYSIGLAIGTNSVGWAVITDEYKVPSKKFKVLGNTDRHSIKKNL
IGALLFDSGETAEATRLKRTARRRYTRRKNRICYLQEIFSNEMAKVDDS
FFHRLEESFLVEEDKKHERHPIFGNIVDEVAYHEKYPTIYHLRKKLVDS
TDKADLRLIYLALAHMIKFRGHFLIEGDLNPDNSDVDKLFIQLVQTYNQ
LFEENPINASGVDAKAILSARLSKSRRLENLIAQLPGEKKNGLFGNLIA
LSLGLTPNFKSNFDLAEDAKLQLSKDTYDDDLDNLLAQIGDQYADLFLA
AKNLSDAILLSDILRVNTEITKAPLSASMIKRYDEHHQDLTLLKALVRQ
QLPEKYKEIFFDQSKNGYAGYIDGGASQEEFYKFIKPILEKMDGTEELL
VKLNREDLLRKQRTFDNGSIPHQIHLGELHAILRRQEDFYPFLKDNREK
IEKILTFRIPYYVGPLARGNSRFAWMTRKSEETITPWNFEEVVDKGASA
QSFTERMTNFDKNLPNEKVLPKHSLLYEYFTVYNELTKVKYVTEGMRKP
AFLSGEQKKAIVDLLFKTNRKVTVKQLKEDYFKKIECFDSVEISGVEDR
FNASLGTYHDLLKIIKDKDFLDNEENEDILEDIVLTLTLFEDREMIEER
LKTYAHLFDDKVMKQLKRRRYTGWGRLSRKLINGIRDKQSGKTILDFLK
SDGFANRNFMQLIHDDSLTFKEDIQKAQVSGQGDSLHEHIANLAGSPAI
KKGILQTVKVVDELVKVMGRHKPENIVIEMARENQTTQKGQKNSRERMK
RIEEGIKELGSQILKEHPVENTQLQNEKLYLYYLQNGRDMYVDQELDIN
RLSDYDVDHIVPQSFLKDDSIDNKVLTRSDKNRGKSDNVPSEEVVKKMK
NYWRQLLNAKLITQRKFDNLTKAERGGLSELDKAGFIKRQLVETRQITK
HVAQILDSRMNTKYDENDKLIREVKVITLKSKLVSDFRKDFQFYKVREI
NNYHHAHDAYLNAVVGTALIKKYPKLESEFVYGDYKVYDVRKMIAKSEQ
EIGKATAKYFFYSNIMNFFKTEITLANGEIRKRPLIETNGETGEIVWDK
GRDFATVRKVLSMPQVNIVKKTEVQTGGFSKESILPKRNSDKLIARKKD
WDPKKYGGFDSPTVAYSVLVVAKVEKGKSKKLKSVKELLGITIMERSSF
EKNPIDFLEAKGYKEVKKDLIIKLPKYSLFELENGRKRMLASAGELQKG
NELALPSKYVNFLYLASHYEKLKGSPEDNEQKQLFVEQHKHYLDEIIEQ
ISEFSKRVILADANLDKVLSAYNKHRDKPIREQAENIIHLFTLTNLGAP
AAFKYFDTTIDRKRYTSTKEVLDATLIHQSITGLYETRIDLSQLGGD

[0205] In some embodiments, the nucleobase editor comprises a fusion protein comprising a polypeptide encoded by the polynucleotide (herein also referenced as MA002) sequence as provided below:

(SEQ ID NO: 4)
ATGAGCGAGGTCGAGTTCTCTCACGAATATTGGATGAGACACGCTCTCA
CCCTGGCTAAGAGAGCCAGGGACGAAAGAGAGGTGCCAGTTGGCGCTGT
CCTGGTGTTGAACAATCGCGTCATCGGAGAAGGATGGAATCGCGCCATT
GGCCTGCACGATCCAACCGCACATGCCGAAATTATGGCTCTGCGGCAAG
GCGGCCTCGTGATGCAAAATTACAGACTGATCGATGCTACCCTCTACGT
CACCTTCGAGCCCTGTGTCATGTGTGCTGGGGCAATGATTCACTCCCGG
ATTGGCCGCGTGGTGTTTGGAGTGCGGAATGCCAAGACTGGCGCCGCTG
GATCTCTGATGGACGTCCTGCACcatCCTGGGATGAACCACCGGGTCGA
GATCACAGAGGGAATTCTGGCTGACGAGTGCGCTGCCCTGCTGTGCagg
TTCTTTAGAATGCCtAGAaggGTGTTCAACGCCCAGAAAAAAGCTCAGA
GCAGCACCGATTCCGGCGGAAGCAGCGGAGGATCTTCTGGAAGCGAAAC
CCCAGGCACCAGCGAGTCTGCCACACCAGAATCATCTGGCGGTAGCTCC
GGCGGCAGCGACAAGAAGTATTCTATCGGACTGGCCATCGGCACCAACT
CTGTTGGATGGGCCGTGATCACCGACGAGTACAAGGTGCCCAGCAAGAA
ATTCAAGGTGCTGGGCAACACCGACAGGCACAGCATCAAGAAGAACCTG
ATCGGCGCACTGCTGTTCGACTCTGGCGAAACAGCCGAGGCCACCAGAC
TGAAGAGAACAGCCCGCAGACGGTACACCAGAAGAAAGAACCGGATCTG
CTACCTCCAAGAGATCTTCAGCAACGAGATGGCCAAGGTGGACGACAGC
TTCTTCCACAGACTGGAAGAGTCCTTCCTGGTGGAAGAGGACAAGAAGC
ACGAGAGACACCCCATCTTCGGCAACATCGTGGACGAGGTGGCCTACCA
CGAGAAGTACCCCACCATCTACCACCTGAGAAAGAAACTGGTGGACAGC
ACCGACAAGGCCGACCTGAGACTGATCTATCTGGCCCTGGCTCACATGA
TCAAGTTCCGGGGCCACTTCCTGATCGAGGGCGACCTGAATCCTGACAA
CAGCGACGTGGACAAGCTGTTCATCCAGCTGGTGCAGACCTACAACCAG
CTGTTCGAGGAAAACCCCATCAACGCCAGCGGAGTGGATGCCAAGGCCA
TCCTGTCTGCCAGACTGAGCAAGAGCAGACGGCTGGAAAATCTGATCGC
CCAGCTGCCTGGCGAGAAGAAGAATGGCCTGTTCGGCAACCTGATTGCC
CTGAGCCTGGGCCTGACACCTAACTTCAAGAGCAACTTCGACCTGGCCG
AGGACGCCAAACTGCAGCTGAGCAAGGACACCTACGACGACGACCTGGA
CAATCTGCTGGCCCAGATCGGCGATCAGTACGCCGACTTGTTTCTGGCC
GCCAAGAATCTGAGCGACGCCATCCTGCTGTCCGACATCCTGAGAGTGA
CACCGAGATCACCAAGGCACCTCTGAGCGCCTCTATGATCAAGAGATAC
GACGAGCACCACCAGGATCTGACCCTGCTGAAGGCCCTCGTTAGACAGC
AGCTGCCAGAGAAGTACAAAGAGATTTTCTTCGACCAGAGCAAGAACGG
CTACGCCGGCTACATTGATGGCGGAGCCAGCCAAGAGGAATTCTACAAG
TTCATCAAGCCCATCCTCGAGAAGATGGACGGCACCGAGGAACTGCTGG
TCAAGCTGAACAGAGAGGACCTGCTGAGAAAGCAGAGAACCTTCGACAA
CGGCAGCATCCCTCACCAGATCCACCTGGGAGAACTGCACGCCATTCTG
CGGAGACAAGAGGACTTTTACCCATTCCTGAAGGACAACCGGGAAAAGA
TCGAGAAAATCCTGACCTTCAGGATCCCCTACTACGTGGGACCACTGGC
CAGAGGCAATAGCAGATTCGCCTGGATGACCAGAAAGAGCGAGGAAACC
ATCACTCCCTGGAACTTCGAGGAAGTGGTGGACAAGGGCGCCAGCGCTC
AGTCCTTCATCGAGCGGATGACCAACTTCGATAAGAACCTGCCTAACGA
GAAGGTGCTGCCCAAGCACAGCCTGCTGTACGAGTACTTCACCGTGTAC
AACGAGCTGACCAAAGTGAAATACGTGACCGAGGGAATGAGAAAGCCCG
CCTTTCTGAGCGGCGAGCAGAAAAAGGCCATCGTGGATCTGCTGTTCAA
GACCAACCGGAAAGTGACCGTGAAGCAGCTGAAAGAGGACTACTTCAAG
AAAATCGAGTGCTTCGACAGCGTCGAGATCTCCGGCGTGGAAGATCGGT
TCAATGCCAGCCTGGGCACATACCACGATCTGCTGAAAATTATCAAGGA
CAAGGACTTCCTGGACAACGAAGAGAACGAGGACATCCTTGAGGACATC
GTGCTGACACTGACCCTGTTTGAGGACAGAGAGATGATCGAGGAACGGC
TGAAAACATACGCCCACCTGTTCGACGACAAAGTGATGAAGCAACTGAA
GCGGCGGAGATACACCGGCTGGGGCAGACTGTCTCGGAAGCTGATCAAC
GGCATCCGGGATAAGCAGTCCGGCAAGACCATCCTGGACTTTCTGAAGT
CCGACGGCTTCGCCAACAGAAACTTCATGCAGCTGATTCACGACGACAG
CCTCACCTTCAAAGAGGATATCCAGAAAGCCCAGGTGTCCGGCCAGGGC
GATTCTCTGCATGAGCACATTGCCAACCTGGCCGGCTCTCCCGCCATTA
AGAAAGGCATCCTGCAGACAGTGAAGGTGGTGGACGAGCTTGTGAAAGT
GATGGGCAGACACAAGCCCGAGAACATCGTGATCGAAATGGCCAGAGAG
AACCAGACCACACAGAAGGGACAGAAGAACAGCCGCGAGAGAATGAAGC
GGATCGAAGAGGGCATCAAAGAGCTGGGCAGCCAGATCCTGAAAGAACA
CCCCGTGGAAAACACCCAGCTGCAGAACGAGAAGCTGTACCTGTACTAC
CTGCAGAATGGACGGGATATGTACGTGGACCAAGAGCTGGACATCAACA
GACTGTCCGACTACGATGTGGACCATATCGTGCCCCAGTCTTTTCTGAA
GGACGACTCCATCGACAACAAGGTCCTGACCAGATCCGACAAGAATCGG
GGCAAGAGCGACAACGTGCCCTCCGAAGAGGTGGTCAAGAAGATGAAGA
ACTACTGGCGACAGCTGCTGAACGCCAAGCTGATTACCCAGCGGAAGTT
CGACAATCTGACCAAGGCCGAAAGAGGCGGCCTGAGCGAACTGGATAAG
GCCGGCTTCATCAAGAGACAGCTGGTGGAAACCCGGCAGATCACAAAGC
ACGTGGCACAGATTCTGGACTCTCGGATGAACACTAAGTACGACGAGAA
CGACAAACTGATCCGCGAAGTGAAAGTCATCACCCTGAAGTCCAAGCTG
GTGTCCGATTTCCGGAAGGATTTCCAGTTCTACAAAGTGCGCGAGATCA
ACAACTACCATCACGCCCACGACGCCTACCTGAATGCCGTTGTTGGAAC
AGCCCTGATCAAAAAGTACCCTAAGCTGGAAAGCGAGTTCGTGTACGGC
GACTACAAGGTGTACGACGTGCGGAAGATGATCGCCAAGAGCGAGCAAG
AGATTGGCAAGGCAACCGCCAAGTACTTCTTCTACAGCAACATCATGAA
CTTTTTCAAGACAGAGATCACCCTCGCCAACGGCGAGATCAGAAAGCGG
CCTCTGATCGAGACAAACGGCGAAACCGGCGAGATTGTGTGGGATAAGG
GCAGAGACTTTGCCACAGTGCGGAAAGTGCTGAGCATGCCCCAAGTGAA
TATCGTGAAGAAAACCGAGGTGCAGACAGGCGGCTTCAGCAAAGAGTCT
ATCCTGCCTAAGCGGAACTCCGACAAGCTGATCGCCAGAAAGAAGGACT
GGGACCCCAAGAAGTACGGCGGCTTCGATTCTCCTACCGTGGCCTATAG
CGTGCTGGTGGTGGCCAAAGTGGAAAAGGGCAAGTCCAAGAAACTCAAG
AGCGTGAAAGAGCTGCTGGGGATCACCATCATGGAAAGAAGCAGCTTCG
AGAAGAATCCGATCGATTTCCTCGAGGCCAAGGGCTACAAAGAAGTGAA
AAAGGACCTGATCATCAAGCTCCCCAAGTACTCCCTGTTCGAGCTGGAA
AACGGCCGGAAGAGAATGCTGGCCTCTGCTGGCGAACTGCAGAAGGGAA
ACGAACTGGCCCTGCCTAGCAAATATGTGAACTTCCTGTACCTGGCCAG
CCACTATGAGAAGCTGAAGGGCAGCCCCGAGGACAATGAGCAAAAGCAG
CTGTTTGTGGAACAGCACAAGCACTACCTGGACGAGATCATCGAGCAGA
TCAGCGAGTTTAGCAAGAGAGTGATTCTGGCCGACGCCAATCTGGACAA
AGTGCTGTCCGCCTACAACAAGCACCGGGACAAGCCTATCAGAGAGCAG
GCCGAGAATATCATCCACCTGTTTACCCTGACCAACCTGGGAGCCCCTG
CCGCCTTCAAGTACTTTGACACCACCATCGACCGGAAGCGGTACACCTC
CACCAAAGAGGTGCTGGACGCCACTCTGATCCACCAGTCTATCACCGGC
CTGTACGAGACACGGATCGACCTGTCTCAACTCGGAGGCGACGAAGGCG
CCGATAAGAGAACCGCCGATGGCTCTGAGTTCGAGAGCCCCAAGAAAAA
GCGCAAAGTG

[0206] In an aspect, a nucleobase editor system provided herein comprises a guide polynucleotide. In some embodiments, the guide polynucleotide binds and forms a complex with the base editor fusion protein. In some embodiments, the guide polynucleotide directs the base editor fusion protein to effect a modification at a target sequence. The guide polynucleotide may comprise a single nucleic acid sequence or two separate nucleic acid sequences. In some embodiments, the guide polynucleotide is a single guide, e.g. a single guide RNA. In some embodiments, the single guide RNA comprises a spacer sequence that is capable of hybridizing with a target sequence. In some embodiments, the single guide RNA comprises a tracrRNA sequence that binds the programmable DNA binding protein, e.g. the Cas9 protein of the base editor fusion protein. In some embodiments, the single guide RNA comprises a stem loop structure, a tracrRNA sequence, a crRNA sequence, a direct repeat, and/or an anti-repeat. In some embodiments, the single guide RNA comprises a chemical modification. In some embodiments, the guide polynucleotide is any one of the guide polynucleotides provided herein, as described in the “Guide polynucleotide” section.

### Deaminase Domains

[0207] Disclosed herein are base editor systems for editing, modifying or altering a target nucleotide sequence of a polynucleotide.

[0208] A base editor system provided herein may comprise a programmable DNA binding protein and a deaminase. As used herein, a deaminase may refer to an enzyme that catalyzes the removal of an amine group from a molecule, or deamination, for example through hydrolysis. In some embodiments, the deaminase is a cytidine deaminase, catalyzing the deamination of cytidine (C) to uridine (U), deoxycytidine (dC) to deoxyuridine (dU), or 5-methyl-cytidine to thymidine (T, 5-methyl-U), respectively. Subsequent DNA repair mechanisms ensure that a dU is replaced by T, as described in Komor et al, Nature, Programmable editing of a target base in genomic DNA without double-stranded DNA cleavage, 533, 420-424 (2016), which is incorporated herein by reference in its entirety. In some embodiments, the deaminase is a cytosine deaminase, catalyzing and promoting the conversion of cytosine to uracil (e.g., in RNA) or thymine (e.g., in DNA). In some embodiments, the deaminase is an adenosine deaminase, catalyzing and promoting the conversion of adenine to guanine. In some embodiments, the deaminase is a naturally-occurring deaminase from an organism, such as a human, chimpanzee, gorilla, monkey, cow, dog, rat, or mouse. In some embodiments, the deaminase is a variant of a naturally-occurring deaminase from an organism, and the variants do not occur in nature. For example, in some embodiments, the deaminase or deaminase domain is at least 50%, at least 55%, at least 60%, at least 65%, at least 70%, at least 75% at least 80%, at least 85%, at least 90%, at least 95%, at least 96%, at least 97%, at least 98%, at least 99%, or at least 99.5% identical to a naturally-occurring deaminase from an organism

[0209] A cytidine deaminase (or cytosine deaminase) comprises an enzyme that catalyzes the chemical reaction “cytosine+H20→uracil+NH3” or “5-methyl-cytosine+H20→thymine +NH3.” In the context of a gene, such nucleotide change, or mutation, may in turn lead to an amino acid change in the protein, which may affect the protein's function, e.g., loss-of-function or gain-of-function. Subsequent DNA repair mechanisms ensure that uracil bases in DNA are replaced by T, as described in Komor et al. (Nature, Programmable editing of a target base in genomic DNA without double-stranded DNA cleavage, 533, 420-424 (2016), which is incorporated herein by reference in its entirety).

[0210] One exemplary suitable class of cytosine deaminases is the apolipoprotein B mRNA-editing complex (APOBEC) family of cytosine deaminases encompassing eleven proteins that serve to initiate mutagenesis in a controlled and beneficial manner. The apolipoprotein B editing complex 3 (APOBEC3) enzyme provides protection to human cells against a certain HIV-1 strain via the deamination of cytosines in reverse-transcribed viral ssDNA. These cytosine deaminases all require a Zn-coordinating motif (His-X-Glu-X23_26-Pro-Cys-X2_4-Cys (SEQ ID NO: 29)) and bound water molecule for catalytic activity. The glutamic acid residue acts to activate the water molecule to a zinc hydroxide for nucleophilic attack in the deamination reaction. Each family member preferentially deaminates at its own particular “hotspot,” for example, WRC (W is A or T, R is A or G) for hAID, or TTC for hAPOBEC3F. A recent crystal structure of the catalytic domain of APOBEC3G revealed a secondary structure comprising a five-stranded β-sheet core flanked by six a-helices, which is believed to be conserved across the entire family. The active center loops have been shown to be responsible for both ssDNA binding and in determining “hotspot” identity. Overexpression of these enzymes has been linked to genomic instability and cancer, thus highlighting the importance of sequence-specific targeting. Another suitable cytosine deaminase is the activation-induced cytidine deaminase (AID), which is responsible for the maturation of antibodies by converting cytosines in ssDNA to uracils in a transcription-dependent, strand-biased fashion.

[0211] An adenosine deaminase (or adenine deaminase) comprises an enzyme that catalyzes the hydrolytic deamination of adenosine or deoxy adenosine to inosine or deoxyinosine, respectively. In some embodiments, the adenosine deaminase catalyzes the hydrolytic deamination of adenine or adenosine in deoxyribonucleic acid (DNA). The adenosine deaminases (e.g. engineered adenosine deaminases, evolved adenosine deaminases) provided herein may be from any organism, such as a bacterium. In some embodiments, the deaminase or deaminase domain is a variant of a naturally-occurring deaminase from an organism. In some embodiments, the deaminase or deaminase domain does not occur in nature. For example, in some embodiments, the deaminase or deaminase domain is at least 50%, at least 55%, at least 60%, at least 65%, at least 70%, at least 75% at least 80%, at least 85%, at least 90%, at least 95%, at least 96%, at least 97%, at least 98%, at least 99%, or at least 99.5% identical to a naturally-occurring deaminase. In some embodiments, the adenosine deaminase is from a bacterium, such as, E. coli, S. aureus, S. typhi, S. putrefaciens, H. influenzae, or C. crescentus. In some embodiments, the adenosine deaminase is a TadA deaminase. In some embodiments, the TadA deaminase is an E. coli TadA deaminase. In some embodiments, the TadA deaminase is a truncated E. coli TadA deaminase. For example, the truncated ecTadA may be missing one or more N-terminal amino acids relative to a full-length ecTadA. In some embodiments, the truncated ecTadA may be missing 1, 2, 3, 4, 5, 6, 7, 8, 9, 10, 11, 12, 13, 14, 15, 6, 17, 18, 19, or 20 N-terminal amino acid residues relative to the full length ecTadA. In some embodiments, the truncated ecTadA may be missing 1, 2, 3, 4, 5, 6, 7, 8, 9, 10, 11, 12, 13, 14, 15, 6, 17, 18, 19, or 20 C-terminal amino acid residues relative to the full length ecTadA. In some embodiments, the ecTadA deaminase does not comprise an N-terminal methionine.

[0212] In some embodiments, the adenosine deaminase comprises an amino acid sequence that is at least 60%, at least 65%, at least 70%, at least 75%, at least 80%, at least 85%, at least 90%, at least 95%, at least 96%, at least 97%, at least 98%, at least 99%, or at least 99.5% identical to the amino acid sequence set forth in SEQ ID NO:1 or to any of the adenosine deaminases provided herein. It should be appreciated that adenosine deaminases provided herein may include one or more mutations (e.g., any of the mutations provided herein). The disclosure provides any deaminase domains with a certain percent identity plus any of the mutations or combinations thereof described herein. In some embodiments, the adenosine deaminase comprises an amino acid sequence that has 1, 2, 3, 4, 5, 6, 7, 8, 9, 10, 11, 12, 13, 14, 15, 16, 17, 18, 19, 20, 21, 22, 21, 24, 25, 26, 27, 28, 29, 30, 31, 32, 33, 34, 35, 36, 37, 38, 39, 40, 41, 42, 43, 44, 45, 46, 47, 48, 49, 50, or more mutations compared to the amino acid sequence set forth in SEQ ID NO:1 or any of the adenosine deaminases provided herein. In some embodiments, the adenosine deaminase comprises an amino acid sequence that has at least 5, at least 10, at least 15, at least 20, at least 25, at least 30, at least 35, at least 40, at least 45, at least 50, at least 60, at least 70, at least 80, at least 90, at least 100, at least 110, at least 120, at least 130, at least 140, at least 150, at least 160, or at least 170 identical contiguous amino acid residues as compared to any one of the amino acid sequences set forth in SEQ ID NO:1 or any of the adenosine deaminases provided herein.

[0213] In some embodiments, the adenosine deaminase comprises a D108X mutation in ecTadA SEQ ID NO: 1, or a corresponding mutation in another adenosine deaminase, where X indicates any amino acid other than the corresponding amino acid in the wild-type adenosine deaminase. In some embodiments, the adenosine deaminase comprises a D108G, D108N, D108V, D108A, or D108Y mutation in SEQ ID NO: 1, or a corresponding mutation in another adenosine deaminase. It should be appreciated, however, that additional deaminases may similarly be aligned to identify homologous amino acid residues that can be mutated as provided herein.

[0214] In some embodiments, the adenosine deaminase comprises an A106X mutation in ecTadA SEQ ID NO: 1, or a corresponding mutation in another adenosine deaminase, where X indicates any amino acid other than the corresponding amino acid in the wild-type adenosine deaminase. In some embodiments, the adenosine deaminase comprises an A106V mutation in SEQ ID NO: 1, or a corresponding mutation in another adenosine deaminase.

[0215] In some embodiments, the adenosine deaminase comprises a E155X mutation in SEQ ID NO: 1, or a corresponding mutation in another adenosine deaminase, where the presence of X indicates any amino acid other than the corresponding amino acid in the wild-type adenosine deaminase. In some embodiments, the adenosine deaminase comprises a E155D, E155G, or E155V mutation in SEQ ID NO: 1, or a corresponding mutation in another adenosine deaminase.

[0216] In some embodiments, the adenosine deaminase comprises a D147X mutation in SEQ ID NO: 1, or a corresponding mutation in another adenosine deaminase, where the presence of X indicates any amino acid other than the corresponding amino acid in the wild-type adenosine deaminase. In some embodiments, the adenosine deaminase comprises a D147Y, mutation in SEQ ID NO: 1, or a corresponding mutation in another adenosine deaminase.

[0217] It should be appreciated that any of the mutations provided herein (e.g., based on the ecTadA amino acid sequence of SEQ ID NO: 1) may be introduced into other adenosine deaminases, such as S. aureus TadA (saTadA), or other adenosine deaminases (e.g., bacterial adenosine deaminases). It would be apparent to the skilled artisan how to are homologous to the mutated residues in ecTadA. Thus, any of the mutations identified in ecTadA may be made in other adenosine deaminases that have homologous amino acid residues. It should also be appreciated that any of the mutations provided herein may be made individually or in any combination in ecTadA or another adenosine deaminase. For example, an adenosine deaminase may contain a D108N, a A106V, a E155V, and/or a D147Y mutation in ecTadA SEQ ID NO: 1, or a corresponding mutation in another adenosine deaminase. In some embodiments, an adenosine deaminase comprises the following group of mutations (groups of mutations are separated by a “;”) in ecTadA SEQ ID NO: 1, or corresponding mutations in another adenosine deaminase: D108N and A106V; D108N and E155V; D108N and D147Y; A106V and E155V; A106V and D147Y; E155V and D147Y; D108N, A106V, and E55V; D108N, A106V, and D147Y; D108N, E55V, and D147Y; A106V, E55V, and D 147Y; and D108N, A106V, E55V, and D147Y. It should be appreciated, however, that any combination of corresponding mutations provided herein may be made in an adenosine deaminase (e.g., ecTadA)

[0218] In some embodiments, the adenosine deaminase comprises one or more of a H8X, T17X, L18X, W23X, L34X, W45X, R51X, A56X, E59X, E85X, M94X, 195X, V102X, F104X, A106X, R107X, D108X, K110X, M118X, N127X, A138X, F149X, M151X, R153X, Q154X, 1156X, and/or K157X mutation in SEQ ID NO: 1, or one or more corresponding mutations in another adenosine deaminase, where the presence of X indicates any amino acid other than the corresponding amino acid in the wild-type adenosine deaminase. In some embodiments, the adenosine deaminase comprises one or more of H8Y, T17S, L18E, W23L, L34S, W45L, R51H, A56E, or A56S, E59G, E85K, or E85G, M94L, 1951, V102A, F104L, A106V, R107C, or R107H, or R107P, D108G, or D108N, or D108V, or D108A, or D108Y, K1101, M118K, N127S, A138V, F149Y, M151V, R153C, Q154L, 1156D, and/or K157R mutation in SEQ ID NO: 1, or one or more corresponding mutations in another adenosine deaminase. In some embodiments, the adenosine deaminase comprises one or more of the mutations corresponding to SEQ ID NO: 1, or one or more corresponding mutations in another adenosine deaminase. In some embodiments, the adenosine deaminase comprises the mutation or mutations of in any constructs shown in Table 23 corresponding to SEQ ID NO: 1, or a corresponding mutation or mutations in another adenosine deaminase. In some embodiments, the adenosine deaminase comprises one or more of a H8X, D108X, and/or N127X mutation in SEQ ID NO: 1, or one or more corresponding mutations in another adenosine deaminase, where X indicates the presence of any amino acid. In some embodiments, the adenosine deaminase comprises one or more of a H8Y, D108N, and/or N127S mutation in SEQ ID NO: 1, or one or more corresponding mutations in another adenosine deaminase.

[0219] In some embodiments, the adenosine deaminase comprises one or more of H8X, R26X, M61X, L68X, M70X, A106X, D108X, A109X, N127X, D147X, R152X, Q154X, E155X, K161X, Q163X, and/or T166X mutation in SEQ ID NO: 1, or one or more corresponding mutations in another adenosine deaminase, where X indicates the presence of any amino acid other than the corresponding amino acid in the wild-type adenosine deaminase. In some embodiments, the adenosine deaminase comprises one or more of H8Y, R26W, M61I, L68Q, M70V, A106T, D108N, A109T, N127S, D147Y, R152C, Q154H or Q154R, E155G or E155V or E155D, K161Q, Q163H, and/or T166P mutation in SEQ ID NO: 1, or one or more corresponding mutations in another adenosine deaminase.

[0220] In some embodiments, the adenosine deaminase comprises one, two, three, four, five, or six mutations selected from the group consisting of H8X, D108X, N127X, D147X, R152X, and Q154X in SEQ ID NO: 1, or a corresponding mutation or mutations in another adenosine deaminase, where X indicates the presence of any amino acid other than the corresponding amino acid in the wild-type adenosine deaminase. In some embodiments, the adenosine deaminase comprises one, two, three, four, five, six, seven, or eight mutations selected from the group consisting of H8X, M61X, M70X, D108X, N127X, Q154X, E155X, and Q163X in SEQ ID NO: 1, or a corresponding mutation or mutations in another adenosine deaminase, where X indicates the presence of any amino acid other than the corresponding amino acid in the wild-type adenosine deaminase. In some embodiments, the adenosine deaminase comprises one, two, three, four, or five mutations selected from the group consisting of H8X, D108X, N127X, E155X, and T166X in SEQ ID NO: 1, or a corresponding mutation or mutations in another adenosine deaminase, where X indicates the presence of any amino acid other than the corresponding amino acid in the wild-type adenosine deaminase. In some embodiments, the adenosine deaminase comprises one, two, three, four, five, or six mutations selected from the group consisting of H8X, A106X, D108X, mutation or mutations in another adenosine deaminase, where X indicates the presence of any amino acid other than the corresponding amino acid in the wild-type adenosine deaminase. In some embodiments, the adenosine deaminase comprises one, two, three, four, five, six, seven, or eight mutations selected from the group consisting of H8X, R126X, L68X, D108X, N127X, D147X, and E155X in SEQ ID NO: 1, or a corresponding mutation or mutations in another adenosine deaminase, where X indicates the presence of any amino acid other than the corresponding amino acid in the wild-type adenosine deaminase. In some embodiments, the adenosine deaminase comprises one, two, three, four, or five mutations selected from the group consisting of H8X, D108X, A109X, N127X, and E155X in SEQ ID NO: 1, or a corresponding mutation or mutations in another adenosine deaminase, where X indicates the presence of any amino acid other than the corresponding amino acid in the wild-type adenosine deaminase.

[0221] In some embodiments, the adenosine deaminase comprises one, two, three, four, five, or six mutations selected from the group consisting of H8Y, D108N, N127S, D147Y, R152C, and Q154H in SEQ ID NO: 1, or a corresponding mutation or mutations in another adenosine deaminase. In some embodiments, the adenosine deaminase comprises one, two, three, four, five, six, seven, or eight mutations selected from the group consisting of H8Y, M61I, M70V, D108N, N127S, Q154R, E155G and Q163H in SEQ ID NO: 1, or a corresponding mutation or mutations in another adenosine deaminase. In some embodiments, the adenosine deaminase comprises one, two, three, four, or five mutations selected from the group consisting of H8Y, D108N, N127S, E155V, and T166P in SEQ ID NO: 1, or a corresponding mutation or mutations in another adenosine deaminase. In some embodiments, the adenosine deaminase comprises one, two, three, four, five, or six mutations selected from the group consisting of H8Y, A106T, D108N, N127S, E155D, and K161Q in SEQ ID NO: 1, or a corresponding mutation or mutations in another adenosine deaminase. In some embodiments, the adenosine deaminase comprises one, two, three, four, five, six, seven, or eight mutations selected from the group consisting of H8Y, R126W, L68Q, D108N, N127S, D147Y, and E155V in SEQ ID NO: 1, or a corresponding mutation or mutations in another adenosine deaminase. In some embodiments, the adenosine deaminase comprises one, two, three, four, or five mutations selected from the group consisting of H8Y, D108N, A109T, N127S, and E155G in SEQ ID NO: 1, or a corresponding mutation or mutations in another adenosine deaminase.

[0222] In some embodiments, the adenosine deaminase comprises a D108N, D108G, or D108V mutation in SEQ ID NO: 1, or corresponding mutations in another adenosine deaminase. In some embodiments, the adenosine deaminase comprises a A106V and D108N mutation in SEQ ID NO: 1, or corresponding mutations in another adenosine deaminase. In some embodiments, the adenosine deaminase comprises R107C and D108N mutations in SEQ ID NO: 1, or corresponding mutations in another adenosine deaminase. In some embodiments, the adenosine deaminase comprises a H8Y, D108N, N127S, D147Y, and Q154H mutation in SEQ ID NO: 1, or corresponding mutations in another adenosine deaminase. In some embodiments, the adenosine deaminase comprises a H8Y, R24W, D108N, N127S, D147Y, and E155V mutation in SEQ ID NO: 1, or corresponding mutations in another adenosine deaminase. In some embodiments, the adenosine deaminase comprises a D108N, D147Y, and E155V mutation in SEQ ID NO: 1, or corresponding mutations in another adenosine deaminase. In some embodiments, the adenosine deaminase comprises a H8Y, D108N, and S 127S mutation in SEQ ID NO: 1, or corresponding mutations in another adenosine deaminase. In some embodiments, the adenosine deaminase comprises a A106V, D108N, D147Y and E155V mutation in SEQ ID NO: 1, or corresponding mutations in another adenosine deaminase.

[0223] In some embodiments, the adenosine deaminase comprises one or more of a S2X, H8X, 149X, L84X, H123X, N127X, 1156X and/or K160X mutation in SEQ ID NO: 1, or one or more corresponding mutations in another adenosine deaminase, where the presence of X indicates any amino acid other than the corresponding amino acid in the wild-type adenosine deaminase. In some embodiments, the adenosine deaminase comprises one or more of S2A, H8Y, 149F, L84F, H123Y, N127S, 1156F and/or K160S mutation in SEQ ID NO: 1, or one or more corresponding mutations in another adenosine deaminase. In some embodiments, the adenosine deaminase comprises one or more of the mutations in SEQ ID NO: 1, or one or more corresponding mutations in another adenosine deaminase. In some embodiments, the adenosine deaminase comprises the mutation or mutations of any one of clones corresponding to SEQ ID NO: 1, or a corresponding mutation or mutations in another adenosine deaminase.

[0224] In some embodiments, the adenosine deaminase comprises an L84X mutation adenosine deaminase, where X indicates any amino acid other than the corresponding amino acid in the wild-type adenosine deaminase. In some embodiments, the adenosine deaminase comprises an L84F mutation in SEQ ID NO: 1, or a corresponding mutation in another adenosine deaminase.

[0225] In some embodiments, the adenosine deaminase comprises an H123X mutation in ecTadA SEQ ID NO: 1, or a corresponding mutation in another adenosine deaminase, where X indicates any amino acid other than the corresponding amino acid in the wild-type adenosine deaminase. In some embodiments, the adenosine deaminase comprises an H123Y mutation in SEQ ID NO: 1, or a corresponding mutation in another adenosine deaminase.

[0226] In some embodiments, the adenosine deaminase comprises an 1157X mutation in ecTadA SEQ ID NO: 1, or a corresponding mutation in another adenosine deaminase, where X indicates any amino acid other than the corresponding amino acid in the wild-type adenosine deaminase. In some embodiments, the adenosine deaminase comprises an I157F mutation in SEQ ID NO: 1, or a corresponding mutation in another adenosine deaminase.

[0227] In some embodiments, the adenosine deaminase comprises one, two, three, four, five, six, or seven mutations selected from the group consisting of L84X, A106X, D108X, H123X, D147X, E155X, and I156X in SEQ ID NO: 1, or a corresponding mutation or mutations in another adenosine deaminase, where X indicates the presence of any amino acid other than the corresponding amino acid in the wild-type adenosine deaminase. In some embodiments, the adenosine deaminase comprises one, two, three, four, five, or six mutations selected from the group consisting of S2X, I49X, A106X, D108X, D147X, and E155X in SEQ ID NO: 1, or a corresponding mutation or mutations in another adenosine deaminase, where X indicates the presence of any amino acid other than the corresponding amino acid in the wild-type adenosine deaminase. In some embodiments, the adenosine deaminase comprises one, two, three, four, or five mutations selected from the group consisting of H8X, A106X, D108X, N127X, and K160X in SEQ ID NO: 1, or a corresponding mutation or mutations in another adenosine deaminase, where X indicates the presence of any amino acid other than the corresponding amino acid in the wild-type adenosine deaminase.

[0228] In some embodiments, the adenosine deaminase comprises one, two, three, four, five, six, or seven mutations selected from the group consisting of L84F, A106V, D108N, H123Y, D147Y, E155V, and I156F in SEQ ID NO: 1, or a corresponding mutation or mutations in another adenosine deaminase. In some embodiments, the adenosine deaminase comprises one, two, three, four, five, or six mutations selected from the group consisting of S2A, I49F, A106V, D108N, D147Y, and E155V in SEQ ID NO: 1, or a corresponding amino acid in another adenosine deaminase. In some embodiments, the adenosine deaminase comprises one, two, three, four, or five mutations selected from the group consisting of H8Y, A106T, D108N, N127S, and K160S in SEQ ID NO: 1, or a corresponding mutation or mutations in another adenosine deaminase. In some embodiments, the adenosine deaminase comprises one or more of a E25X, R26X, R107X, A142X, and/or A143X mutation in SEQ ID NO: 1, or one or more corresponding mutations in another adenosine deaminase, where the presence of X indicates any amino acid other than the corresponding amino acid in the wild-type adenosine deaminase. In some embodiments, the adenosine deaminase comprises one or more of E25M, E25D, E25A, E25R, E25V, E25S, E25Y, R26G, R26N, R26Q, R26C, R26L, R26K, R107P, R07K, R107A, R107N, R107W, R107H, R107S, A142N, A142D, A142G, A143D, A143G, A143E, A143L, A143W, A143M, A143S, A143Q and/or A143R mutation in SEQ ID NO: 1, or one or more corresponding mutations in another adenosine deaminase. In some embodiments, the adenosine deaminase comprises one or more of the mutations provided in Table 23 corresponding to SEQ ID NO: 1, or one or more corresponding mutations in another adenosine deaminase. In some embodiments, the adenosine deaminase comprises the mutation or mutations of any one shown in Table 23 corresponding to SEQ ID NO: 1, or a corresponding mutation or mutations in another adenosine deaminase.

[0229] In some embodiments, the adenosine deaminase comprises an E25X mutation in ecTadA SEQ ID NO: 1, or a corresponding mutation in another adenosine deaminase, where X indicates any amino acid other than the corresponding amino acid in the wild-type adenosine deaminase. In some embodiments, the adenosine deaminase comprises an E25M, E25D, E25A, E25R, E25V, E25S, or E25Y mutation in SEQ ID NO: 1, or a corresponding mutation in another adenosine deaminase.

[0230] In some embodiments, the adenosine deaminase comprises an R26X mutation in ecTadA SEQ ID NO: 1, or a corresponding mutation in another adenosine deaminase, where X indicates any amino acid other than the corresponding amino acid in the wild-type adenosine deaminase. In some embodiments, the adenosine deaminase comprises an, R26G, R26N, R26Q, R26C, R26L, or R26K mutation in SEQ ID NO: 1, or a corresponding mutation in another adenosine deaminase.

[0231] In some embodiments, the adenosine deaminase comprises an R107X mutation in ecTadA SEQ ID NO: 1, or a corresponding mutation in another adenosine deaminase, where X indicates any amino acid other than the corresponding amino acid in the wild-type adenosine deaminase. In some embodiments, the adenosine deaminase comprises an R107P, R07K, R107A, R107N, R107W, R107H, or R107S mutation in SEQ ID NO: 1, or a corresponding mutation in another adenosine deaminase.

[0232] In some embodiments, the adenosine deaminase comprises an A142X mutation in ecTadA SEQ ID NO: 1, or a corresponding mutation in another adenosine deaminase, where X indicates any amino acid other than the corresponding amino acid in the wild-type adenosine deaminase. In some embodiments, the adenosine deaminase comprises an A142N, A142D, A142G, mutation in SEQ ID NO: 1, or a corresponding mutation in another adenosine deaminase.

[0233] In some embodiments, the adenosine deaminase comprises an A143X mutation in ecTadA SEQ ID NO: 1, or a corresponding mutation in another adenosine deaminase, where X indicates any amino acid other than the corresponding amino acid in the wild-type adenosine deaminase. In some embodiments, the adenosine deaminase comprises an A143D, A143G, A143E, A143L, A143W, A143M, A143S, A143Q and/or A143R mutation in SEQ ID NO: 1, or a corresponding mutation in another adenosine deaminase.

[0234] In some embodiments, the adenosine deaminase comprises one or more of a H36X, N37X, P48X, 149X, R51X, M70X, N72X, D77X, E134X, S 146X, Q154X, K157X, and/or K161X mutation in SEQ ID NO: 1, or one or more corresponding mutations in another adenosine deaminase, where the presence of X indicates any amino acid other than the corresponding amino acid in the wild-type adenosine deaminase. In some embodiments, the adenosine deaminase comprises one or more of H36L, N37T, N37S, P48T, P48L, I49V, R51H, R51L, M70L, N72S, D77G, E134G, S 146R, S 146C, Q154H, K157N, and/or K161T mutation in SEQ ID NO: 1, or one or more corresponding mutations in another adenosine deaminase.

[0235] In some embodiments, the adenosine deaminase comprises an H36X mutation in ecTadA SEQ ID NO: 1, or a corresponding mutation in another adenosine deaminase, where X indicates any amino acid other than the corresponding amino acid in the wild-type adenosine deaminase. In some embodiments, the adenosine deaminase comprises an H36L mutation in SEQ ID NO: 1, or a corresponding mutation in another adenosine deaminase. In some embodiments, the adenosine deaminase comprises an N37X mutation in ecTadA SEQ ID NO: 1, or a corresponding mutation in another adenosine deaminase, where X indicates any amino acid other than the corresponding amino acid in the wild-type adenosine deaminase. In some embodiments, the adenosine deaminase comprises an N37T, or N37S mutation in SEQ ID NO: 1, or a corresponding mutation in another adenosine deaminase.

[0236] In some embodiments, the adenosine deaminase comprises an P48X mutation in ecTadA SEQ ID NO: 1, or a corresponding mutation in another adenosine deaminase, where X indicates any amino acid other than the corresponding amino acid in the wild-type adenosine deaminase. In some embodiments, the adenosine deaminase comprises an P48T, or P48L mutation in SEQ ID NO: 1, or a corresponding mutation in another adenosine deaminase.

[0237] In some embodiments, the adenosine deaminase comprises an R51X mutation in ecTadA SEQ ID NO: 1, or a corresponding mutation in another adenosine deaminase, where X indicates any amino acid other than the corresponding amino acid in the wild-type adenosine deaminase. In some embodiments, the adenosine deaminase comprises an R51H, or R51L mutation in SEQ ID NO: 1, or a corresponding mutation in another adenosine deaminase.

[0238] In some embodiments, the adenosine deaminase comprises an S 146X mutation in ecTadA SEQ ID NO: 1, or a corresponding mutation in another adenosine deaminase, where X indicates any amino acid other than the corresponding amino acid in the wild-type adenosine deaminase. In some embodiments, the adenosine deaminase comprises an S 146R, or S 146C mutation in SEQ ID NO: 1, or a corresponding mutation in another adenosine deaminase.

[0239] In some embodiments, the adenosine deaminase comprises an K157X mutation in ecTadA SEQ ID NO: 1, or a corresponding mutation in another adenosine deaminase, where X indicates any amino acid other than the corresponding amino acid in the wild-type adenosine deaminase. In some embodiments, the adenosine deaminase comprises a K157N mutation in SEQ ID NO: 1, or a corresponding mutation in another adenosine deaminase.

[0240] In some embodiments, the adenosine deaminase comprises an P48X mutation in ecTadA SEQ ID NO: 1, or a corresponding mutation in another adenosine deaminase, where X indicates any amino acid other than the corresponding amino acid in the wild-type adenosine deaminase. In some embodiments, the adenosine deaminase comprises a P48S, P48T, or P48A mutation in SEQ ID NO: 1, or a corresponding mutation in another adenosine deaminase.

[0241] In some embodiments, the adenosine deaminase comprises an A142X mutation in ecTadA SEQ ID NO: 1, or a corresponding mutation in another adenosine deaminase, where X indicates any amino acid other than the corresponding amino acid in the wild-type adenosine deaminase. In some embodiments, the adenosine deaminase comprises a A142N mutation in SEQ ID NO: 1, or a corresponding mutation in another adenosine deaminase.

[0242] In some embodiments, the adenosine deaminase comprises an W23X mutation in ecTadA SEQ ID NO: 1, or a corresponding mutation in another adenosine deaminase, where X indicates any amino acid other than the corresponding amino acid in the wild-type adenosine deaminase. In some embodiments, the adenosine deaminase comprises a W23R, or W23L mutation in SEQ ID NO: 1, or a corresponding mutation in another adenosine deaminase.

[0243] In some embodiments, the adenosine deaminase comprises an R152X mutation in ecTadA SEQ ID NO: 1, or a corresponding mutation in another adenosine deaminase, where X indicates any amino acid other than the corresponding amino acid in the wild-type adenosine deaminase. In some embodiments, the adenosine deaminase comprises a R152P, or R52H mutation in SEQ ID NO: 1, or a corresponding mutation in another adenosine deaminase.

[0244] Additional adenosine deaminase mutations and variants are described in Patent Application WO2018119354, which is incorporated herein by reference in its entirety.

[0245] Additional adenosine deaminases useful in the present application would be apparent to the skilled artisan and are within the scope of this disclosure. For example, the adenosine deaminase may be a homolog of an AD AT. Exemplary AD AT homologs include, without limitation:

(SEQ ID NO: 30)
Staphylococcus aureus TadA:
MGSHMTNDIYFMTLAIEEAKKAAQLGEVPIGAIITKDDEVIARA
HNLRETLQQPTAHAEHIAIERAAKVLGSWRLEGCTLYVTLEPCV
MCAGTIVMSRIPRVVYGADDPKGGCSGS LMNLLQQS NFNHRA
IVDKG VLKE AC S TLLTTFFKNLRANKKS TN
Bacillus subtilis TadA:
(SEQ ID NO: 31)
MTQDELYMKEAIKEAKKAEEKGEVPIGAVLVINGEIIARAHNL
RETEQRSIAHAEMLVIDE AC KALGT WRLEG ATLY VTLE
PCPMC AG A V VLS R VEK V VFGAFDPKGGC S GTLM
NLLQEERFNHQ AE V VS G VLEEEC GGMLS AFFRELRK
KKKA ARKNLS E
Salmonella typhimurium (S. typhimurium)
TadA:
(SEQ ID NO: 32)
MPPAFITGVTSLSDVELDHEYWMRHALTLAKRAWDEREVPVGA
VLVHNHRVIGEGWNRPIGRHDPTAHAEIMALRQGGLVLQNYRL
LDTTLYVTLEPCVMCAGAMVHSRIGRVVFGARDAKTGAAGSLI
DVLHHPGMNHRVEIIEGVLRDECATLLSDFFRMRRQEIKALKK
ADRAEGAGPAV
Shewanella putrefaciens (S. putrefaciens)
TadA:
(SEQ ID NO: 33)
MDEYWMQVAMQMAEKAEAAGEVPVGAVLVKDGQQIATGYNLSI
SQHDPTAHAEILCLRSAGKKLENYRLLDATLYITLEPCAMCAG
AMVHSRIARVVYGARDEKTGAAGTVVNLLQHP AFNHQVEVTS
GVLAEACSAQLSRFFKRRRDEKKALKLAQRAQQGIE
Haemophilus influenzae F3031 (H. influenzae)
TadA:
(SEQ ID NO: 34)
MDAAKVRSEFDEKMMRYALELADKAEALGEIPVGAVLVDDARN
IIGEGWNLSIVQSDPTAHAEIIALRNGAKNIQNYRLLNSTLYV
TLEPCTMCAGAILHSRIKRLVFGASDYKTGAIGSRFHFFDDYK
MNHTLEITSGVLAEECSQKLSTFFQKRREEKKIEKALLKSLSD
K
Caulobacter crescentus (C. crescentus) TadA:
(SEQ ID NO: 35)
MRTDESEDQDHRMMRLALDAARAAAEAGETPVGAVILDPSTGE
VIATAGNGPIAAHDPTAHAEIAAMRAAAAKLGNYRLTDLTLVV
TLEPCAMCAGAISHARIGRVVFGADDPKGGAVVHGPKFFAQPT
CHWRPEVTGGVLADESADLLRGFFRARRKAKI
Geobacter sulfurreducens (G. sulfurreducens) TadA:
(SEQ ID NO: 36)
MSSLKKTPIRDDAYWMGKAIREAAKAAARDEVPIGAVIVRDGA
VIGRGHNLREGSNDPSAHAEMIAIRQAARRSANWRLTGATLYV
TLEPCLMCMGAIILARLERVVFGCYDPKGGAAGSLYDLSADPR
LNHQVRLSPGVCQEECGTMLSDFFRDLRRRKKAKATPALFIDE
RKVPPEP

[0246] In some embodiments, the adenosine deaminase comprises an amino acid sequence that is at least 60%, at least 65%, at least 70%, at least 75%, at least 80%, at least 85%, at least 90%, at least 95%, at least 96%, at least 97%, at least 98%, at least 99%, at least 99.5%, at least 99.7%, or at least 99.9% identical to any one of the amino acid sequences listed in Table 23. In some embodiments, the adenosine deaminase comprises any one of the amino acid sequences listed in Table 23. In some embodiments, the sequence of the adenosine deaminase is any one of the amino acid sequences listed in Table 23. In some embodiments, the adenosine deaminase comprises an amino acid sequence that is at least 60%, at least 65%, at least 70%, at least 75%, at least 80%, at least 85%, at least 90%, at least 95%, at least 96%, at least 97%, at least 98%, at least 99%, at least 99.5%, at least 99.7%, or at least 99.9% identical to any one of the amino acid sequences of SEQ ID NOs: SEQ ID NOs: 2137, 2149, 2154, 2158, 2188, 2140, 40, 2146, 2152, 2156, and 2160. In some embodiments, the adenosine deaminase comprises any one of the amino acid sequences of SEQ ID NOs: 2137, 2149, 2154, 2158, 2188, 2140, 40, 2146, 2152, 2156, and 2160. In some embodiments, the sequence of the adenosine deaminase is any one of the amino acid sequences of SEQ ID NOs: 2137, 2149, 2154, 2158, and 2188.

[0247] In some embodiments, the adenosine deaminase is encoded by the polynucleotide sequence that is at least 60%, at least 65%, at least 70%, at least 75%, at least 80%, at least 85%, at least 90%, at least 95%, at least 96%, at least 97%, at least 98%, at least 99%, at least 99.5%, at least 99.7%, or at least 99.9% identical to any one of the polynucleotide sequences listed in Table 23. In some embodiments, the adenosine deaminase is encoded by any one of the polynucleotide sequences listed in Table 23. In some embodiments, the adenosine deaminase is expressed by the polynucleotide sequence that is at least 60%, at least 65%, at least 70%, at least 75%, at least 80%, at least 85%, at least 90%, at least 95%, at least 96%, at least 97%, at least 98%, at least 99%, at least 99.5%, at least 99.7%, or at least 99.9% identical to any one of the polynucleotide sequences listed in Table 23. In some embodiments, the adenosine deaminase is expressed by any one of the polynucleotide sequences listed in Table 23. In some embodiments, the adenosine deaminase is encoded by the polynucleotide sequence that comprises at least 60%, at least 65%, at least 70%, at least 75%, at least 80%, at least 85%, at least 90%, at least 95%, at least 96%, at least 97%, at least 98%, at least 99%, at least 99.5%, at least 99.7%, or at least 99.9% identical to any one of the polynucleotide sequences of SEQ ID NOs: 2192, 2148, 2153, 2157, 2161, 2168, 2174, 2180, 2186, 2189, 2139, 2142, 2145, 2151, 2155, 2159, 2162, 2164, 2167, 2169, 2171, 2173, 2175, 2177, 2179, 2181, 2183, 2185, 2187, and 2190. In some embodiments, the adenosine deaminase is encoded by the polynucleotide sequence that comprises any one of the polynucleotide sequences of SEQ ID NOs: 2192, 2148, 2153, 2157, 2161, 2168, 2174, 2180, 2186, 2189, 2139, 2142, 2145, 2151, 2155, 2159, 2162, 2164, 2167, 2169, 2171, 2173, 2175, 2177, 2179, 2181, 2183, 2185, 2187, and 2190. In some embodiments, the adenosine deaminase is encoded by any one of the polynucleotide sequences of SEQ ID NOs: 2192, 2148, 2153, 2157, 2161, 2168, 2174, 2180, 2186, and 2189. In some embodiments, the adenosine deaminase is expressed by the polynucleotide sequence that comprises at least 60%, at least 65%, at least 70%, at least 75%, at least 80%, at least 85%, at least 90%, at least 95%, at least 96%, at least 97%, at least 98%, at least 99%, at least 99.5%, at least 99.7%, or at least 99.9% identical to any one of the polynucleotide sequences of SEQ ID NOs: 2192, 2148, 2153, 2157, 2161, 2168, 2174, 2180, 2186, 2189, 2139, 2142, 2145, 2151, 2155, 2159, 2162, 2164, 2167, 2169, 2171, 2173, 2175, 2177, 2179, 2181, 2183, 2185, 2187, 2190, 2138, 2147, 2158, or a combination thereof: In some embodiments, the adenosine deaminase is encoded by the polynucleotide sequence that comprises any one of the polynucleotide sequences of SEQ ID NOs: 2192, 2148, 2153, 2157, 2161, 2168, 2174, 2180, 2186, 2189, 2139, 2142, 2145, 2151, 2155, 2159, 2162, 2164, 2167, 2169, 2171, 2173, 2175, 2177, 2179, 2181, 2183, 2185, 2187, 2190, 2138, 2147, 2158, or a combination thereof. In some embodiments, the adenosine deaminase is expressed by any one of the polynucleotide sequences of SEQ ID NOs: 2192, 2148, 2153, 2157, 2161, 2168, 2174, 2180, 2186, and 2189. In some embodiments, the polynucleotide sequence further comprises at least 60%, at least 65%, at least 70%, at least 75%, at least 80%, at least 85%, at least 90%, at least 95%, at least 96%, at least 97%, at least 98%, at least 99%, at least 99.5%, at least 99.7%, or at least 99.9% identical to any one of the polynucleotide sequences of SEQ ID NOs: 2138, 2147, 2158, or a combination thereof. In some embodiments, the polynucleotide sequence further comprises any one of the polynucleotide sequences of SEQ ID NOs: 2138, 2147, 2158, or a combination thereof.

### Programmable DNA Binding Proteins

[0248] Provided herein are programmable DNA-binding proteins that can be programmed to target to bind DNA sequences in any desired nucleotide sequence within a genome. To program the DNA-binding protein to bind a desired nucleotide sequence, the DNA binding protein may be modified to change its binding specificity, e.g., zinc finger DNA-binding domain, zinc finger nuclease (ZFN), a CRISPR-Cas9 protein, or a transcription activator-like effector proteins (TALE). ZFNs are artificial restriction enzymes generated by fusing a zinc finger DNA-binding domain to a DNA-cleavage domain. Zinc finger domains can be engineered to target specific desired DNA sequences and this enables zinc-fingers to bind unique sequences within complex genomes. Transcription activator-like effector nucleases (TALEN) are engineered restriction enzymes that can be engineered to cut specific sequences of DNA. They are made by fusing a TAL effector DNA-binding domain to a nuclease domain (e.g. Fokl). Transcription activator-like effectors (TALEs) can be engineered to bind practically any desired DNA sequence. Methods for programming ZFNs and TALEs are familiar to one skilled in the art. For example, such methods are described in Maeder, et al, Mol. Cell 31 (2): 294-301, 2008; Carroll et al, Genetics Society of America, 188 (4): 773-782, 2011; Miller et al., Nature Biotechnology 25 (7): 778-785, 2007; Christian et al, Genetics 186 (2): 757-61, 2008; Li et al, Nucleic Acids Res. 39 (1): 359-372, 2010; and Moscou et al, Science 326 (5959): 1501, 2009, each of which are incorporated herein by reference.

[0249] A CRISPR/Cas system or a Cas protein in a base editor system provided herein may comprise Class 1 or Class 2 system components, including ribonucleic acid protein complexes. The Class 2 Cas nuclease families of proteins are enzymes with DNA endonuclease activity, and they can be directed to cleave a desired nucleic acid target by designing an appropriate guide RNA, as described further herein. A Class 2 CRISPR/Cas system component may be from a Type II, Type IIA, Type IIB, Type IIC, Type V, or Type VI system. Class 2 Cas nucleases include, for example, Cas9 (also known as Csn1 or Csx12), Csn2, Cas4, Cas12a (Cpf1), Cas12b (C2cl), Cas12c (C2c3), Cas13a (C2c2), Cas13b, Cas13c, and Cas13d proteins. In some embodiments, the Cas protein is from a Type II CRISPR/Cas system, i.e., a Cas9 protein from a CRISPR/Cas9 system, or a Type V CRISPR/Cas system, e.g., a Cas12a protein. In some embodiments, the Cas protein is from a Class 2 CRISPR/Cas system, i.e., a single-protein Cas nuclease such as a Cas9 protein or a Cas 12a protein.

[0250] Other non-limiting examples of Cas proteins can include Cas1, Cas1B, Cas2, Cas3, Cas4, Cas5, Cas6, Cas7, Cas8, Cas10, Csy1, Csy2, Csy3, Cse1, Cse2, Csc1, Csc2, Csa5, Csn2, Csm2, Csm3, Csm4, Csm5, Csm6, Cmr1, Cmr3, Cmr4, Cmr5, Cmr6, Csb1, Csb2, Csb3, Csx17, Csx14, Csx10, Csx16, CsaX, Csx3, Csx1, CsxIS, Csfl, Csf2, CsO, Csf4, Cpf1, Cas9HiFi, homologues thereof, or modified versions thereof.

[0251] In some embodiments, provided herein are guide nucleotide sequence-programmable DNA-binding protein or RNA guided programmable DNA binding proteins that are able to bind DNA, and the binding to its target DNA sequence is mediated by a guide nucleotide sequence. Thus, it is appreciated that the guide nucleotide sequence-programmable DNA-binding protein binds to a guide nucleotide sequence. The guide nucleotide may be an RNA or DNA molecule (e.g., a single-stranded DNA or ssDNA molecule) that is complementary to the target sequence and can guide the DNA binding protein to the target sequence. As such, a guide nucleotide sequence-programmable DNA-binding protein may be a RNA-programmable DNA-binding protein (e.g., a Cas9 protein), or an ssDNA-programmable DNA-binding protein (e.g., an Argonaute protein). “Programmable” means the DNA-binding protein may be programmed to bind any DNA sequence that the guide nucleotide targets. Exemplary guide nucleotide sequence-programmable DNA-binding proteins include, but are not limited to, Cas9 (e.g., dCas9 and nCas9), saCas9 (e.g., saCas9d, saCas9d, saKKH Cas9) CasX, CasY, Cpf1, C2c1, C2c2, C2c3, Argonaute, and any other suitable protein described herein, or variants thereof.

[0252] In some embodiments, the guide nucleotide sequence exists as a single nucleotide molecule and comprises two domains: (1) a domain that shares homology to a target nucleic acid (e.g., and directs binding of a guide nucleotide sequence-programmable DNA-binding protein to the target); and (2) a domain that binds a guide nucleotide sequence-programmable DNA-binding protein. In some embodiments, domain (1) comprises a spacer sequence. In some embodiments, domain (2) is referred to as a tracrRNA sequence. In some embodiments, domain (2) corresponds to a sequence known as a tracrRNA, and comprises a stem-loop structure. For example, in some embodiments, domain (2) is identical or homologous to a tracrRNA as provided in Jinek et al., Science 337:816-821 (2012), which is incorporated herein by reference. Other examples of gRNAs (e.g., those including domain 2) can be found in U.S. Patent Application Publication US20160208288 and U.S. Patent Application Publication US20160200779 each of which is herein incorporated by reference in their entirety.

[0253] Methods of using guide nucleotide sequence-programmable DNA-binding protein, such as Cas9, for site-specific cleavage (e.g., to modify a genome) are known in the art (see e.g., Cong, L. et al. Multiplex genome engineering using CRISPR/Cas systems. Science 339, 819-823 (2013); Mali, P. et al. RNA-guided human genome engineering via Cas9. Science 339, 823-826 (2013); Hwang, W. Y. et al. Efficient genome editing in zebrafish using a CRISPR-Cas system. Nature biotechnology 31, 227-229 (2013); Jinek, M. et al. RNA-programmed genome editing in human cells. eLife 2, e00471 (2013); Dicarlo, J. E. et al. Genome engineering in Saccharomyces cerevisiae using CRISPR-Cas systems. Nucleic acids research (2013); Jiang, W. et al. RNA-guided editing of bacterial genomes using CRISPR-Cas systems. Nature biotechnology 31, 233-239 (2013); each of which are incorporated herein by reference).

[0254] CRISPR is an adaptive immune system that provides protection against mobile genetic elements (viruses, transposable elements and conjugative plasmids). CRISPR clusters contain spacers, sequences complementary to antecedent mobile elements, and target invading nucleic acids. A CRISPR/Cas system comprises a non-coding RNA molecule (e.g., guide RNA) that binds to DNA (e.g., target DNA sequence) and Cas proteins (e.g., Cas9) with nuclease functionality (e.g., two nuclease domains). See, e.g., Sander, et al., Nature Biotechnology, 32:347-355 (2014); see also e.g., Hsu, et al., Cell 157 (6): 1262-1278 (2014). The general mechanism and recent advances of CRISPR system is discussed in Cong, et al., Science, 339 (6121): 819-823 (2013); Fu, et al., Nature Biotechnology, 31, 822-826 (2013); Chu, et al., Nature Biotechnology 33, 543-548 (2015); Shmakov, et al., Molecular Cell, 60, 1-13 (2015); Makarova, et al., Nature Reviews Microbiology, 13, 1-15 (2015). CRISPR/Cas systems can be used to introduce site-specific cleavage of a target DNA. The locations for site-specific cleavage are determined by both 1) base-pairing complementarity between the guide RNA (gRNA) and the target DNA (a protospacer) and 2) a short motif in the target DNA referred to as the protospacer adjacent motif (PAM). CRISPR/Cas systems (e.g., Type II CRISPR/Cas system) can be used to generate, e.g., an engineered cell in which a target gene is disrupted or mutated. A Cas enzyme (e.g., Cas9) can be used to catalyze DNA cleavage. A Cas9 protein (e.g., a Streptococcus pyogenes Cas9 or any closely related Cas9) can derive an enzymatic action to generate double stranded breaks at target site sequences which hybridize to about 20 nucleotides of a guide sequence (e.g., gRNA) and that have a protospacer-adjacent motif (PAM) following the target sequence.

[0255] CRISPR/Cas system comprises Class 1 or Class 2 system components, including ribonucleic acid protein complexes. The Class 2 Cas nuclease families of proteins are enzymes with DNA endonuclease activity, and they can be directed to cleave a desired nucleic acid target by designing an appropriate guide RNA, as described further herein. A Class 2 CRISPR/Cas system component may be from a Type II, Type IIA, Type IIB, Type IIC, Type V, or Type VI system. Class 2 Cas nucleases include, for example, Cas9 (also known as Csn1 or Csx12), Csn2, Cas4, Cas12a (Cpf1), Cas12b (C2cl), Cas12c (C2c3), Cas13a (C2c2), Cas13b, Cas13c, and Cas13d proteins. In some embodiments, the Cas protein is from a Type II CRISPR/Cas system, i.e., a Cas9 protein from a CRISPR/Cas9 system, or a Type V CRISPR/Cas system, e.g., a Cas12a protein. In some embodiments, the Cas protein is from a Class 2 CRISPR/Cas system, i.e., a single-protein Cas nuclease such as a Cas9 protein or a Cas12a protein.

[0256] Other non-limiting examples of Cas proteins can include Cas1, Cas1B, Cas2, Cas3, Cas4, Cas5, Cas6, Cas7, Cas8, Cas10, Csy1, Csy2, Csy3, Cse1, Cse2, Csc1, Csc2, Csa5, Csn2, Csm2, Csm3, Csm4, Csm5, Csm6, Cmr1, Cmr3, Cmr4, Cmr5, Cmr6, Csb1, Csb2, Csb3, Csx17, Csx14, Csx10, Csx16, CsaX, Csx3, Csx1, CsxIS, Csfl, Csf2, CsO, Csf4, Cpf1, Cas9HiFi, homologues thereof, or modified versions thereof.

[0257] A base editor system provided herein may comprise a Cas9 or a Cas9 nuclease. A Cas9 protein or a Cas9 nuclease refers to an RNA-guided nuclease comprising a Cas9 protein, a fragment, or a variant thereof. A Cas9 nuclease is also referred to sometimes as a casn1 nuclease or a CRISPR (clustered regularly interspaced short palindromic repeat)-associated nuclease. CRISPR is an adaptive immune system that provides protection against mobile genetic elements (viruses, transposable elements and conjugative plasmids). CRISPR clusters contain spacers, sequences complementary to antecedent mobile elements, and target invading nucleic acids. CRISPR clusters are transcribed and processed into CRISPR RNA (crRNA). In type II CRISPR systems correct processing of pre-crRNA requires a trans-encoded small RNA (tracrRNA), endogenous ribonuclease 3 (rnc) and a Cas9 protein. The tracrRNA serves as a guide for ribonuclease 3-aided processing of pre-crRNA. Subsequently, Cas9/crRNA/tracrRNA endonucleolytically cleaves linear or circular dsDNA target complementary to the spacer. The target strand not complementary to crRNA is first cut endonucleolytically, then trimmed 3 ′-5′ exonucleolytically. In nature, DNA-binding and cleavage typically requires protein and both RNAs. However, single guide RNAs (“sgRNA”, or simply “gRNA”) can be engineered so as to incorporate aspects of both the crRNA and tracrRNA into a single RNA species. See, e.g., Jinek et al., Science 337:816-821 (2012), which is incorporated herein by reference in its entirety.

[0258] The term “Cas9” refers to an RNA guided nuclease comprising a Cas9 protein, or a fragment thereof (e.g., a protein comprising an active, inactive, or partially active DNA cleavage domain of Cas9, and/or the gRNA binding domain of Cas9). A Cas9 nuclease is also referred to as a Casn1 nuclease or a CRISPR (clustered regularly interspaced short palindromic repeat) associated nuclease. Cas9 can refer to a polypeptide with at least or at least about 50%, 60%, 70%, 80%, 90%, 100% sequence identity and/or sequence similarity to a wild type exemplary Cas9 polypeptide (e.g., Cas9 from S. pyogenes). Cas9 can refer to a polypeptide with at most or at most about 50%, 60%, 70%, 80%, 90%, 100% sequence identity and/or sequence similarity to a wild type exemplary Cas9 polypeptide (e.g., from S. pyogenes). Cas9 can refer to the wild type or a modified form of the Cas9 protein that can comprise an amino acid change such as a deletion, insertion, substitution, variant, mutation, fusion, chimera, or any combination thereof.

[0259] Cas9 nuclease sequences and structures of variant Cas9 orthologs have been described in various species. Exemplary species that the Cas9 protein or other components can be from include, but are not limited to, Streptococcus pyogenes, Streptococcus thermophilus, Streptococcus sp., Staphylococcus aureus, Listeria innocua, Lactobacillus gasseri, Francisella novicida, Wolinella succinogenes, Sutterella wadsworthensis, Gamma proteobacterium, Neisseria meningitidis, Campylobacter jejuni, Pasteurella multocida, Fibrobacter succinogene, Rhodospirillum rubrum, Nocardiopsis dassonvillei, Streptomyces pristinaespiralis, Streptomyces viridochromogenes, Streptomyces viridochromogenes, Streptosporangium roseum, Alicyclobacillus acidocaldarius, Bacillus pseudomycoides, Bacillus selenitireducens, Exiguobacterium sibiricum, Lactobacillus delbrueckii, Lactobacillus salivarius, Lactobacillus buchneri, Treponema denticola, Microscilla marina, Burkholderiales bacterium, Polar omonas naphthalenivorans, Polar omonas sp., Crocosphaera watsonii, Cyanothece sp., Microcystis aeruginosa, Synechococcus sp., Acetohalobium arabaticum, Ammonifex degensii, Caldicelulosiruptor becscii, Candidatus Desulforudis, Clostridium botulinum, Clostridium difficile, Finegoldia magna, Natranaerobius thermophilus, Pelotomaculum thermopropionium, Acidithiobacillus caldus, Acidithiobacillus ferrooxidans, Allochromatium vinosum, Marinobacter sp., Nitrosococcus halophilus, Nitrosococcus watsoni, Pseudoalteromonas haloplanktis, Ktedonobacter racemifer, Methanohalobium evestigatum, Anabaena variabilis, Nodularia spumigena, Nostoc sp., Arthrospira maxima, Arthrospira platensis, Arthrospira sp., Lyngbya sp., Microcoleus chthonoplastes, Oscillator ia sp., Petrotoga mobilis, Thermosipho africanus, Streptococcus pasteurianus, Neisseria cinerea, Campylobacter lari, Parvibaculum lavamentivorans, Coryne bacterium diphtheria, or Acaryochloris marina. In some embodiments, the Cas9 protein is from Streptococcus pyogenes. In some embodiments, the Cas9 protein may be from Streptococcus thermophilus. In some embodiments, the Cas9 protein is from Staphylococcus aureus.

[0260] Additional suitable Cas9 nucleases and sequences will be apparent to those of skill in the art based on this disclosure, and such Cas9 nucleases and sequences include Cas9 sequences from the organisms and loci disclosed in Chylinski et al., (2013) RNA Biology 10:5, 726-737; which are incorporated herein by reference.

[0261] In some embodiments, wild-type Cas9 corresponds to Cas9 from Streptococcus pyogenes (NCBI Reference Sequence: NC_002737.2 (nucleotide sequence as follows); and Uniprot Reference Sequence: Q99ZW2 (amino acid sequence as follows)

(SEQ ID NO: 37)
ATGGATAAGAAATACTCAATAGGCTTAGATATCGGCACAAATAGCGTCG
GATGGGCGGTGATCACTGATGAATATAAGGTTCCGTCTAAAAAGTTCAA
GGTTCTGGGAAATACAGACCGCCACAGTATCAAAAAAAATCTTATAGGG
GCTCTTTTATTTGACAGTGGAGAGACAGCGGAAGCGACTCGTCTCAAAC
GGACAGCTCGTAGAAGGTATACACGTCGGAAGAATCGTATTTGTTATCT
ACAGGAGATTTTTTCAAATGAGATGGCGAAAGTAGATGATAGTTTCTTT
CATCGACTTGAAGAGTCTTTTTTGGTGGAAGAAGACAAGAAGCATGAAC
GTCATCCTATTTTTGGAAATATAGTAGATGAAGTTGCTTATCATGAGAA
ATATCCAACTATCTATCATCTGCGAAAAAAATTGGTAGATTCTACTGAT
AAAGCGGATTTGCGCTTAATCTATTTGGCCTTAGCGCATATGATTAAGT
TTCGTGGTCATTTTTTGATTGAGGGAGATTTAAATCCTGATAATAGTGA
TGTGGACAAACTATTTATCCAGTTGGTACAAACCTACAATCAATTATTT
GAAGAAAACCCTATTAACGCAAGTGGAGTAGATGCTAAAGCGATTCTTT
CTGCACGATTGAGTAAATCAAGACGATTAGAAAATCTCATTGCTCAGCT
CCCCGGTGAGAAGAAAAATGGCTTATTTGGGAATCTCATTGCTTTGTCA
TTGGGTTTGACCCCTAATTTTAAATCAAATTTTGATTTGGCAGAAGATG
CTAAATTACAGCTTTCAAAAGATACTTACGATGATGATTTAGATAATTT
ATTGGCGCAAATTGGAGATCAATATGCTGATTTGTTTTTGGCAGCTAAG
AATTTATCAGATGCTATTTTACTTTCAGATATCCTAAGAGTAAATACTG
AAATAACTAAGGCTCCCCTATCAGCTTCAATGATTAAACGCTACGATGA
ACATCATCAAGACTTGACTCTTTTAAAAGCTTTAGTTCGACAACAACTT
CCAGAAAAGTATAAAGAAATCTTTTTTGATCAATCAAAAAACGGATATG
CAGGTTATATTGATGGGGGAGCTAGCCAAGAAGAATTTTATAAATTTAT
CAAACCAATTTTAGAAAAAATGGATGGTACTGAGGAATTATTGGTGAAA
CTAAATCGTGAAGATTTGCTGCGCAAGCAACGGACCTTTGACAACGGCT
CTATTCCCCATCAAATTCACTTGGGTGAGCTGCATGCTATTTTGAGAAG
ACAAGAAGACTTTTATCCATTTTTAAAAGACAATCGTGAGAAGATTGAA
AAAATCTTGACTTTTCGAATTCCTTATTATGTTGGTCCATTGGCGCGTG
GCAATAGTCGTTTTGCATGGATGACTCGGAAGTCTGAAGAAACAATTAC
CCCATGGAATTTTGAAGAAGTTGTCGATAAAGGTGCTTCAGCTCAATCA
TTTATTGAACGCATGACAAACTTTGATAAAAATCTTCCAAATGAAAAAG
TACTACCAAAACATAGTTTGCTTTATGAGTATTTTACGGTTTATAACGA
ATTGACAAAGGTCAAATATGTTACTGAAGGAATGCGAAAACCAGCATTT
CTTTCAGGTGAACAGAAGAAAGCCATTGTTGATTTACTCTTCAAAACAA
ATCGAAAAGTAACCGTTAAGCAATTAAAAGAAGATTATTTCAAAAAAAT
AGAATGTTTTGATAGTGTTGAAATTTCAGGAGTTGAAGATAGATTTAAT
GCTTCATTAGGTACCTACCATGATTTGCTAAAAATTATTAAAGATAAAG
ATTTTTTGGATAATGAAGAAAATGAAGATATCTTAGAGGATATTGTTTT
AACATTGACCTTATTTGAAGATAGGGAGATGATTGAGGAAAGACTTAAA
ACATATGCTCACCTCTTTGATGATAAGGTGATGAAACAGCTTAAACGTC
GCCGTTATACTGGTTGGGGACGTTTGTCTCGAAAATTGATTAATGGTAT
TAGGGATAAGCAATCTGGCAAAACAATATTAGATTTTTTGAAATCAGAT
GGTTTTGCCAATCGCAATTTTATGCAGCTGATCCATGATGATAGTTTGA
CATTTAAAGAAGACATTCAAAAAGCACAAGTGTCTGGACAAGGCGATAG
TTTACATGAACATATTGCAAATTTAGCTGGTAGCCCTGCTATTAAAAAA
GGTATTTTACAGACTGTAAAAGTTGTTGATGAATTGGTCAAAGTAATGG
GGCGGCATAAGCCAGAAAATATCGTTATTGAAATGGCACGTGAAAATCA
GACAACTCAAAAGGGCCAGAAAAATTCGCGAGAGCGTATGAAACGAATC
GAAGAAGGTATCAAAGAATTAGGAAGTCAGATTCTTAAAGAGCATCCTG
TTGAAAATACTCAATTGCAAAATGAAAAGCTCTATCTCTATTATCTCCA
AAATGGAAGAGACATGTATGTGGACCAAGAATTAGATATTAATCGTTTA
AGTGATTATGATGTCGATCACATTGTTCCACAAAGTTTCCTTAAAGACG
ATTCAATAGACAATAAGGTCTTAACGCGTTCTGATAAAAATCGTGGTAA
ATCGGATAACGTTCCAAGTGAAGAAGTAGTCAAAAAGATGAAAAACTAT
TGGAGACAACTTCTAAACGCCAAGTTAATCACTCAACGTAAGTTTGATA
ATTTAACGAAAGCTGAACGTGGAGGTTTGAGTGAACTTGATAAAGCTGG
TTTTATCAAACGCCAATTGGTTGAAACTCGCCAAATCACTAAGCATGTG
GCACAAATTTTGGATAGTCGCATGAATACTAAATACGATGAAAATGATA
AACTTATTCGAGAGGTTAAAGTGATTACCTTAAAATCTAAATTAGTTTC
TGACTTCCGAAAAGATTTCCAATTCTATAAAGTACGTGAGATTAACAAT
TACCATCATGCCCATGATGCGTATCTAAATGCCGTCGTTGGAACTGCTT
TGATTAAGAAATATCCAAAACTTGAATCGGAGTTTGTCTATGGTGATTA
TAAAGTTTATGATGTTCGTAAAATGATTGCTAAGTCTGAGCAAGAAATA
GGCAAAGCAACCGCAAAATATTTCTTTTACTCTAATATCATGAACTTCT
TCAAAACAGAAATTACACTTGCAAATGGAGAGATTCGCAAACGCCCTCT
AATCGAAACTAATGGGGAAACTGGAGAAATTGTCTGGGATAAAGGGCGA
GATTTTGCCACAGTGCGCAAAGTATTGTCCATGCCCCAAGTCAATATTG
TCAAGAAAACAGAAGTACAGACAGGCGGATTCTCCAAGGAGTCAATTTT
ACCAAAAAGAAATTCGGACAAGCTTATTGCTCGTAAAAAAGACTGGGAT
CCAAAAAAATATGGTGGTTTTGATAGTCCAACGGTAGCTTATTCAGTCC
TAGTGGTTGCTAAGGTGGAAAAAGGGAAATCGAAGAAGTTAAAATCCGT
TAAAGAGTTACTAGGGATCACAATTATGGAAAGAAGTTCCTTTGAAAAA
AATCCGATTGACTTTTTAGAAGCTAAAGGATATAAGGAAGTTAAAAAAG
ACTTAATCATTAAACTACCTAAATATAGTCTTTTTGAGTTAGAAAACGG
TCGTAAACGGATGCTGGCTAGTGCCGGAGAATTACAAAAAGGAAATGAG
CTGGCTCTGCCAAGCAAATATGTGAATTTTTTATATTTAGCTAGTCATT
ATGAAAAGTTGAAGGGTAGTCCAGAAGATAACGAACAAAAACAATTGTT
TGTGGAGCAGCATAAGCATTATTTAGATGAGATTATTGAGCAAATCAGT
GAATTTTCTAAGCGTGTTATTTTAGCAGATGCCAATTTAGATAAAGTTC
TTAGTGCATATAACAAACATAGAGACAAACCAATACGTGAACAAGCAGA
AAATATTATTCATTTATTTACGTTGACGAATCTTGGAGCTCCCGCTGCT
TTTAAATATTTTGATACAACAATTGATCGTAAACGATATACGTCTACAA
AAGAAGTTTTAGATGCCACTCTTATCCATCAATCCATCACTGGTCTTTA
TGAAACACGCATTGATTTGAGTCAGCTAGGAGGTGACTGA
(SEQ ID NO: 38)
[sequence omitted]

[0262] In some embodiments, Cas9 is a Cas9 protein from species Corynebacterium ulcerans (NCBI Refs: NC_015683.1, NC_017317.1); Corynebacterium diphtheria (NCBI Refs. NC 016782.1, NC_016786.1); Spiroplasma syrphidicola (NCBI Ref: NC_021284.1); Prevotella intermedia (NCBI Ref: NC_017861.1); Spiroplasma taiwanense (NCBI Ref: NC_021846.1); Streptococcus iniae (NCBI Ref: NC_021314.1); Belliella baltica (NCBI Ref: NC_018010.1); Psychroflexus torquisl (NCBI Ref: NC_018721.1); Listeria innocua (NCBI Ref: NP_472073.1), Campylobacter jejuni (NCBI Ref: YP_002344900.1) or Neisseria, meningitidis (NCBI Ref: YP_002342100.1).

[0263] In some embodiments, a base editor provided herein comprises a programmable DNA binding protein, e.g. a Cas nuclease, with reduced or abolished nuclease activity. For example a Ca9 protein may be nuclease inactive or may be a Cas9 nickase. Methods for generating a Cas9 protein (or a fragment thereof) having an inactive DNA cleavage domain are known (See, e.g., Jinek et al., Science. 337:816-821 (2012); Qi et al, (2013) Cell. 28; 152 (5): 1173-83, each of which are incorporated herein by reference in its entirety. For example, the DNA cleavage domain of Cas9 is known to include two subdomains, the HNH nuclease subdomain and the RuvC1 subdomain. The HNH subdomain cleaves the strand complementary to the gRNA, whereas the RuvC1 subdomain cleaves the non-complementary strand. Mutations within these subdomains can silence the nuclease activity of Cas9. For example, the mutations D10A and H840A completely inactivate the nuclease activity of S. pyogenes Cas9 (Jinek et al., Science. 337:816-821 (2012); Qi et al, Cell. 28;152 (5): 1173-83 (2013)). The Cas9 nickase suitable for use in accordance with the present disclosure has an active HNH domain and an inactive RuvC domain and is able to cleave only the strand of the target DNA that is bound by the sgRNA (which is the opposite strand of the strand that is being edited via cytidine deamination). The Cas9 nickase of the present disclosure may comprise mutations that inactivate the RuvC domain, e.g., a D10A mutation. It is to be understood that any mutation that inactivates the RuvC domain may be included in a Cas9 nickase, e.g., insertion, deletion, or single or multiple amino acid substitution in the RuvC domain. In a Cas9 nickase described herein, while the RuvC domain is inactivated, the HNH domain remains activate. Thus, while the Cas9 nickase may comprise mutations other than those that inactivate the RuvC domain (e.g., D10A), those mutations do not affect the activity of the HNH domain. In a non-limiting Cas9 nickase example, the histidine at position 840 remains unchanged.

[0264] In some embodiments, a nuclease inactive Cas9 comprises the amino acid sequence of dCas9 (D10A and H840A) provided below:

(SEQ ID NO: 39)
MDKKYSIGLAIGTNSVGWAVITDEYKVPSKKFKVLGNTDRHSIKKNLIG
ALLFDSGETAEATRLKRTARRRYTRRKNRICYLQEIFSNEMAKVDDSFF
HRLEESFLVEEDKKHERHPIFGNIVDEVAYHEKYPTIYHLRKKLVDSTD
KADLRLIYLALAHMIKFRGHFLIEGDLNPDNSDVDKLFIQLVQTYNQLF
EENPINASGVDAKAILSARLSKSRRLENLIAQLPGEKKNGLFGNLIALS
LGLTPNFKSNFDLAEDAKLQLSKDTYDDDLDNLLAQIGDQYADLFLAAK
NLSDAILLSDILRVNTEITKAPLSASMIKRYDEHHQDLTLLKALVRQQL
PEKYKEIFFDQSKNGYAGYIDGGASQEEFYKFIKPILEKMDGTEELLVK
LNREDLLRKQRTFDNGSIPHQIHLGELHAILRRQEDFYPFLKDNREKIE
KILTFRIPYYVGPLARGNSRFAWMTRKSEETITPWNFEEVVDKGASAQS
FIERMTNFDKNLPNEKVLPKHSLLYEYFTVYNELTKVKYVTEGMRKPAF
LSGEQKKAIVDLLFKTNRKVTVKQLKEDYFKKIECFDSVEISGVEDRFN
ASLGTYHDLLKIIKDKDFLDNEENEDILEDIVLTLTLFEDREMIEERLK
TYAHLFDDKVMKQLKRRRYTGWGRLSRKLINGIRDKQSGKTILDFLKSD
GFANRNFMQLIHDDSLTFKEDIQKAQVSGQGDSLHEHIANLAGSPAIKK
GILQTVKVVDELVKVMGRHKPENIVIEMARENQTTQKGQKNSRERMKRI
EEGIKELGSQILKEHPVENTQLQNEKLYLYYLQNGRDMYVDQELDINRL
SDYDVDAIVPQSFLKDDSIDNKVLTRSDKNRGKSDNVPSEEVVKKMKNY
WRQLLNAKLITQRKFDNLTKAERGGLSELDKAGFIKRQLVETRQITKHV
AQILDSRMNTKYDENDKLIREVKVITLKSKLVSDFRKDFQFYKVREINN
YHHAHDAYLNAVVGTALIKKYPKLESEFVYGDYKVYDVRKMIAKSEQEI
GKATAKYFFYSNIMNFFKTEITLANGEIRKRPLIETNGETGEIVWDKGR
DFATVRKVLSMPQVNIVKKTEVQTGGFSKESILPKRNSDKLIARKKDWD
PKKYGGFDSPTVAYSVLVVAKVEKGKSKKLKSVKELLGITIMERSSFEK
NPIDFLEAKGYKEVKKDLIIKLPKYSLFELENGRKRMLASAGELQKGNE
LALPSKYVNFLYLASHYEKLKGSPEDNEQKQLFVEQHKHYLDEIIEQIS
EFSKRVILADANLDKVLSAYNKHRDKPIREQAENIIHLFTLTNLGAPAA
FKYFDTTIDRKRYTSTKEVLDATLIHQSITGLYETRIDLSQLGGD

[0265] In some embodiments, a Cas9 nickase comprises the amino acid sequence of an exemplary catalytically Cas9 nickase (nCas9) is as follows:

(SEQ ID NO: 40)
DKKYSIGLAIGTNSVGWAVITDEYKVPSKKFKVLGNTDRHSIKKNLIGA
LLFDSGETAEATRLKRTARRRYTRRKNRICYLQEIFSNEMAKVDDSFFH
RLEESFLVEEDKKHERHPIFGNIVDEVAYHEKYPTIYHLRKKLVDSTDK
ADLRLIYLALAHMIKFRGHFLIEGDLNPDNSDVDKLFIQLVQTYNQLFE
ENPINASGVDAKAILSARLSKSRRLENLIAQLPGEKKNGLFGNLIALSL
GLTPNFKSNFDLAEDAKLQLSKDTYDDDLDNLLAQIGDQYADLFLAAKN
LSDAILLSDILRVNTEITKAPLSASMIKRYDEHHQDLTLLKALVRQQLP
EKYKEIFFDQSKNGYAGYIDGGASQEEFYKFIKPILEKMDGTEELLVKL
NREDLLRKQRTFDNGSIPHQIHLGELHAILRRQEDFYPFLKDNREKIEK
ILTFRIPYYVGPLARGNSRFAWMTRKSEETITPWNFEEVVDKGASAQSF
IERMTNFDKNLPNEKVLPKHSLLYEYFTVYNELTKVKYVTEGMRKPAFL
SGEQKKAIVDLLFKTNRKVTVKQLKEDYFKKIECFDSVEISGVEDRFNA
SLGTYHDLLKIIKDKDFLDNEENEDILEDIVLTLTLFEDREMIEERLKT
YAHLFDDKVMKQLKRRRYTGWGRLSRKLINGIRDKQSGKTILDFLKSDG
FANRNFMQLIHDDSLTFKEDIQKAQVSGQGDSLHEHIANLAGSPAIKKG
ILQTVKVVDELVKVMGRHKPENIVIEMARENQTTQKGQKNSRERMKRIE
EGIKELGSQILKEHPVENTQLQNEKLYLYYLQNGRDMYVDQELDINRLS
DYDVDHIVPQSFLKDDSIDNKVLTRSDKNRGKSDNVPSEEVVKKMKNYW
RQLLNAKLITQRKFDNLTKAERGGLSELDKAGFIKRQLVETRQITKHVA
QILDSRMNTKYDENDKLIREVKVITLKSKLVSDFRKDFQFYKVREINNY
HHAHDAYLNAVVGTALIKKYPKLESEFVYGDYKVYDVRKMIAKSEQEIG
KATAKYFFYSNIMNFFKTEITLANGEIRKRPLIETNGETGEIVWDKGRD
FATVRKVLSMPQVNIVKKTEVQTGGFSKESILPKRNSDKLIARKKDWDP
KKYGGFDSPTVAYSVLVVAKVEKGKSKKLKSVKELLGITIMERSSFEKN
PIDFLEAKGYKEVKKDLIIKLPKYSLFELENGRKRMLASAGELQKGNEL
ALPSKYVNFLYLASHYEKLKGSPEDNEQKQLFVEQHKHYLDEIIEQISE
FSKRVILADANLDKVLSAYNKHRDKPIREQAENIIHLFTLTNLGAPAAF
KYFDTTIDRKRYTSTKEVLDATLIHQSITGLYETRIDLSQLGGD

[0266] Additional suitable mutations that inactivate Cas9 will be apparent to those of skill in the art based on this disclosure and knowledge in the field, and are within the scope of this disclosure. Such additional exemplary suitable nuclease-inactive Cas9 domains include, but are not limited to, D839A and/or N863A (See, e.g., Prashant et al, Nature Biotechnology. 2013; 31 (9): 833-838, which are incorporated herein by reference), or), or K603R {See, e.g., Chavez et al., Nature Methods 12, 326-328, 2015, which is incorporated herein by reference). Cas9, dCas9, or Cas9 variant also encompasses Cas9, dCas9, or Cas9 variants from any organism. Also appreciated is that dCas9, Cas9 nickase, or other appropriate Cas9 variants from any organisms may be used in accordance with the present disclosure.

[0267] In some embodiments, Cas9 refers to a Cas9 from archaea (e.g. nanoarchaea), which constitute a domain and kingdom of single-celled prokaryotic microbes.

[0268] In some embodiments, the programmable DNA binding protein comprises a CasX or CasY, or a variant thereof, which have been described in, for example, Burstein et al., “New CRISPR-Cas systems from uncultivated microbes.” Cell Res. 2017 Feb. 21. doi: 10.1038/cr.2017.21, the entire contents of which is hereby incorporated by reference. Using genome-resolved metagenomics, a number of CRISPR-Cas systems were identified, including the first reported Cas9 in the archaeal domain of life. This divergent Cas9 protein was found in little-studied nanoarchaea as part of an active CRISPR-Cas system. In bacteria, two previously unknown systems were discovered, CRISPR-CasX and CRISPR-CasY, which are among the most compact systems yet discovered.

[0269] Some aspects of the disclosure provide high fidelity Cas9 domains of the nucleobase editors provided herein. In some embodiments, high fidelity Cas9 domains are engineered Cas9 domains comprising one or more mutations that decrease electrostatic interactions between the Cas9 domain and the sugar-phosphate backbone of DNA, as compared to a corresponding wild-type Cas9 domain. Without wishing to be bound by any particular theory, high fidelity Cas9 domains that have decreased electrostatic interactions with the sugar-phosphate backbone of DNA may have less off-target effects. In some embodiments, the Cas9 domain comprises one or more mutations that decreases the association between the Cas9 domain and the sugar-phosphate backbone of DNA. In some embodiments, a Cas9 domain comprises one or more mutations that decreases the association between the Cas9 domain and the sugar-phosphate backbone of DNA by at least 1%, at least 2%, at least 3%, at least 4%, at least 5%, at least 10%, at least 15%, at least 20%, at least 25%, at least 30%, at least 35%, at least 40%, at least 45%, at least 50%, at least 55%, at least 60%, at least 65%, at least 70%, or more. In some embodiments, any of the Cas9 fusion proteins provided herein comprise one or more of N497X, R661X, Q695X, and/or Q926X mutation as numbered in the wild type Cas9 amino acid sequence or a corresponding amino acid in another Cas9, wherein X is any amino acid. In some embodiments, any of the Cas9 or Cas9 fusion proteins provided herein comprise one or more of N497A, R661A, Q695A, and/or Q926A mutation of the amino acid sequence provided in the wild type Cas9 sequence, or a corresponding mutation as numbered in the wild type Cas9 amino acid sequence or a corresponding amino acid in another Cas9. Cas9 domains with high fidelity have been described in Kleinstiver, B. P., et al. “High-fidelity CRISPR-Cas9 nucleases with no detectable genome-wide off-target effects.” Nature 529, 490-495 (2016); and Slaymaker, I. M., et al. “Rationally engineered Cas9 nucleases with improved specificity.” Science 351, 84-88 (2015); the entire contents of each are incorporated herein by reference.

[0270] It should be appreciated that any of the base editors provided herein, for example, any of the adenosine deaminase base editors provided herein, may be converted into high fidelity base editors by modifying the Cas9 domain as described herein to generate high fidelity base editors, for example, a high fidelity adenosine base editor. In some embodiments, the high fidelity Cas9 domain is a nuclease inactive Cas9 domain. In some embodiments, the high fidelity Cas9 domain is a Cas9 nickase domain.

[0271] In some embodiments, a Cas protein comprises a CasX or CasY, or a variant thereof, which have been described in, for example, Burstein et al., “New CRISPR-Cas systems from uncultivated microbes.” Cell Res. 2017 Feb. 21. doi: 10.1038/cr.2017.21, the entire contents of which is hereby incorporated by reference. Using genome-resolved metagenomics, a number of CRISPR-Cas systems were identified, including the first reported Cas9 in the archaeal domain of life. This divergent Cas9 protein was found in little-studied nanoarchaea as part of an active CRISPR-Cas system. In bacteria, two previously unknown systems were discovered, CRISPR-CasX and CRISPR-CasY, which are among the most compact systems yet discovered.

[0272] Alternatives to S. pyogenes Cas9 may include RNA-guided endonucleases from the Cpf1 family that exhibit cleavage activity in mammalian cells. Cpf1-mediated DNA cleavage is a double-strand break with a short 3′ overhang, which is different from Cas9-mediated DNA cleavage. The staggered cleavage pattern of Cpf1 may open up the possibility of directional gene transfer, analogous to traditional restriction enzyme cloning, which may increase the efficiency of gene editing. Like the Cas9 variants and orthologues described above, Cpf1 may also expand the number of sites that can be targeted by CRISPR to AT-rich regions or AT-rich genomes that lack the NGG PAM sites favored by SpCas9.

[0273] In some embodiments, the Cas9 protein comprises an amino acid sequence that is at least 60%, at least 65%, at least 70%, at least 75%, at least 80%, at least 85%, at least 90%, at least 95%, at least 96%, at least 97%, at least 98%, at least 99%, at least 99.5%, at least 99.7%, or at least 99.9% identical to any one of the amino acid sequences listed in Table 23. In some embodiments, the Cas9 protein comprises any one of the amino acid sequences listed in Table 23. In some embodiments, the sequence of the Cas9 protein is any one of the amino acid sequences listed in Table 23. In some embodiments, the Cas9 protein comprises an amino acid sequence that is at least 60%, at least 65%, at least 70%, at least 75%, at least 80%, at least 85%, at least 90%, at least 95%, at least 96%, at least 97%, at least 98%, at least 99%, at least 99.5%, at least 99.7%, or at least 99.9% identical to any one of the amino acid sequences of SEQ ID NOs: 2137, 2149, 2154, 2158, 2188, 2140, 40, 2146, 2152, 2156, and 2160. In some embodiments, the Cas9 protein comprises any one of the amino acid sequences of SEQ ID NOs: 2137, 2149, 2154, 2158, 2188, 2140, 40, 2146, 2152, 2156, and 2160. In some embodiments, the sequence of the Cas9 protein is any one of the amino acid sequences of SEQ ID NOs: 2137, 2149, 2154, 2158, and 2188.

[0274] In some embodiments, the Cas9 protein is encoded by the polynucleotide sequence that is at least 60%, at least 65%, at least 70%, at least 75%, at least 80%, at least 85%, at least 90%, at least 95%, at least 96%, at least 97%, at least 98%, at least 99%, at least 99.5%, at least 99.7%, or at least 99.9% identical to any one of the polynucleotide sequences listed in Table 23. In some embodiments, the Cas9 protein is encoded by any one of the polynucleotide sequences listed in Table 23. In some embodiments, the Cas9 protein is expressed by the polynucleotide sequence that is at least 60%, at least 65%, at least 70%, at least 75%, at least 80%, at least 85%, at least 90%, at least 95%, at least 96%, at least 97%, at least 98%, at least 99%, at least 99.5%, at least 99.7%, or at least 99.9% identical to any one of the polynucleotide sequences listed in Table 23. In some embodiments, the Cas9 protein is expressed by any one of the polynucleotide sequences listed in Table 23. In some embodiments, the Cas9 protein is encoded by the polynucleotide sequence that is at In some embodiments, the Cas9 protein is encoded by the polynucleotide sequence that comprises at least 60%, at least 65%, at least 70%, at least 75%, at least 80%, at least 85%, at least 90%, at least 95%, at least 96%, at least 97%, at least 98%, at least 99%, at least 99.5%, at least 99.7%, or at least 99.9% identical to any one of the polynucleotide sequences of SEQ ID NOs: 2192, 2148, 2153, 2157, 2161, 2168, 2174, 2180, 2186, 2189, 2139, 2142, 2145, 2151, 2155, 2159, 2162, 2164, 2167, 2169, 2171, 2173, 2175, 2177, 2179, 2181, 2183, 2185, 2187, and 2190. In some embodiments, the Cas9 protein is encoded by the polynucleotide sequence that comprises any one of the polynucleotide sequences of SEQ ID NOs: 2192, 2148, 2153, 2157, 2161, 2168, 2174, 2180, 2186, 2189, 2139, 2142, 2145, 2151, 2155, 2159, 2162, 2164, 2167, 2169, 2171, 2173, 2175, 2177, 2179, 2181, 2183, 2185, 2187, and 2190. In some embodiments, the Cas9 protein is encoded by any one of the polynucleotide sequences of SEQ ID NOs: 2192, 2148, 2153, 2157, 2161, 2168, 2174, 2180, 2186, and 2189. In some embodiments, the Cas9 protein is expressed by the polynucleotide sequence that comprises at least 60%, at least 65%, at least 70%, at least 75%, at least 80%, at least 85%, at least 90%, at least 95%, at least 96%, at least 97%, at least 98%, at least 99%, at least 99.5%, at least 99.7%, or at least 99.9% identical to any one of the polynucleotide sequences of SEQ ID NOs: 2192, 2148, 2153, 2157, 2161, 2168, 2174, 2180, 2186, 2189, 2139, 2142, 2145, 2151, 2155, 2159, 2162, 2164, 2167, 2169, 2171, 2173, 2175, 2177, 2179, 2181, 2183, 2185, 2187, 2190, 2138, 2147, 2158, or a combination thereof: In some embodiments, the Cas9 protein is encoded by the polynucleotide sequence that comprises any one of the polynucleotide sequences of SEQ ID NOs: 2192, 2148, 2153, 2157, 2161, 2168, 2174, 2180, 2186, 2189, 2139, 2142, 2145, 2151, 2155, 2159, 2162, 2164, 2167, 2169, 2171, 2173, 2175, 2177, 2179, 2181, 2183, 2185, 2187, 2190, 2138, 2147, 2158, or a combination thereof. In some embodiments, the Cas9 protein is expressed by any one of the polynucleotide sequences of SEQ ID NOs: 2192, 2148, 2153, 2157, 2161, 2168, 2174, 2180, 2186, and 2189. In some embodiments, the polynucleotide sequence further comprises at least 60%, at least 65%, at least 70%, at least 75%, at least 80%, at least 85%, at least 90%, at least 95%, at least 96%, at least 97%, at least 98%, at least 99%, at least 99.5%, at least 99.7%, or at least 99.9% identical to any one of the polynucleotide sequences of SEQ ID NOs: 2138, 2147, 2158, or a combination thereof. In some embodiments, the polynucleotide sequence further comprises any one of the polynucleotide sequences of SEQ ID NOs: 2138, 2147, 2158, or a combination thereof.

### Linkers

[0275] Base editors provided herein may comprises linkers that connect one or more components of the base editors. In certain embodiments, linkers may be used to link any of the protein or protein domains described herein. The linker may be as simple as a covalent bond, or it may be a polymeric linker many atoms in length. In certain embodiments, the linker is a polypeptide or based on amino acids. In other embodiments, the linker is not peptide-like. In some embodiments, the linker is carbon bond, disulfide bond, carbon-heteroatom bond, etc. In certain embodiments, the linker is a carbon-nitrogen bond of an amide linkage. In certain embodiments, the linker is a cyclic or acyclic, substituted or unsubstituted, branched or unbranched aliphatic or heteroaliphatic linker. In certain embodiments, the linker is polymeric (e.g., polyethylene, polyethylene glycol, polyamide, polyester, etc.). In certain embodiments, the linker comprises a monomer, dimer, or polymer of aminoalkanoic acid. In certain embodiments, the linker comprises an aminoalkanoic acid (e.g., glycine, ethanoic acid, alanine, beta-alanine, 3-aminopropanoic acid, 4-aminobutanoic acid, 5-pentanoic acid, etc.). In certain embodiments, the linker comprises a monomer, dimer, or polymer of aminohexanoic acid (Ahx). In certain embodiments, the linker is based on a carbocyclic moiety (e.g., cyclopentane, cyclohexane). In other embodiments, the linker comprises a polyethylene glycol moiety (PEG). In other embodiments, the linker comprises amino acids. In certain embodiments, the linker comprises a peptide. In certain embodiments, the linker comprises an aryl or heteroaryl moiety. In certain embodiments, the linker is based on a phenyl ring. The linker may include functionalized moieties to facilitate attachment of a nucleophile (e.g., thiol, amino) from the peptide to the linker. Any electrophile may be used as part of the linker. Exemplary electrophiles include, but are not limited to, activated esters, activated amides, alkyl halides, aryl halides, acyl halides, and isothiocyanates.

[0276] In some embodiments, the linker is an amino acid or a plurality of amino acids (e.g., a peptide or protein). In some embodiments, the linker is a bond (e.g., a covalent bond), an organic molecule, group, polymer, or chemical moiety. In some embodiments, the linker is 5-100 amino acids in length, for example, 5, 6, 7, 8, 9, 10, 11, 12, 13, 14, 15, 16, 17, 18, 19, 20, 21, 22, 23, 24, 25, 26, 27, 28, 29, 30, 30-35, 35-40, 40-45, 45-50, 50-60, 60-70, 70-80, 80-90, 90-100, 100-110, 110-120, 120-130, 130-140, 140-150, or 150-200 amino acids in length. Longer or shorter linkers are also contemplated. In some embodiments, a linker comprises the amino acid sequence SGSETPGTSESATPES (SEQ ID NO: 17), which may also be referred to as the XTEN linker. In some embodiments, a linker comprises the amino acid sequence SGGS (SEQ ID NO: 18). In some embodiments, a linker comprises (SGGS) n (SEQ ID NO: 41), (GGGS) n (SEQ ID NO: 42), (GGGGS) n (SEQ ID NO: 43), (G) n (SEQ ID NO: 44), (EAAAK) n (SEQ ID NO: 45), (GGS) n (SEQ ID NO: 46), SGSETPGTSESATPES (SEQ ID NO: 17), or (XP) n (SEQ ID NO: 47) motif, or a combination of any of these, wherein n is independently an integer between 1 and 30, and wherein X is any amino acid. In some embodiments, n is 1, 2, 3, 4, 5, 6, 7, 8, 9, 10, 11, 12, 13, 14, or 15. In some embodiments, a linker comprises SGSETPGTSESATPES (SEQ ID NO: 17), SGGSSGSETPGTSESATPESSGGS (SEQ ID NO: 19). In some embodiments, a linker comprises SGGSSGGSSGSETPGTSESATPESSGGSSGGS (SEQ ID NO: 20). In some embodiments, a linker comprises GGSGGSPGSPAGSPTSTEEGTSESATPESGPGTSTEPSEGSAPGSPAGSPTSTEEGTSTE PSEGSAPGTSTEPSEGSAPGTSESATPESGPGSEPATSGGSGGS (SEQ ID NO: 21). In some embodiments, the linker is 24 amino acids in length. In some embodiments, the linker comprises the amino acid sequence SGGSSGGSSGSETPGTSESATPES (SEQ ID NO: 23). In some embodiments, the linker is 40 amino acids in length. In some embodiments, the linker comprises the amino acid sequence SGGSSGGSSGSETPGTSESATPESSGGSSGGSSGGSSGGS (SEQ ID NO: 24). In some embodiments, the linker is 64 amino acids in length. In some embodiments, the linker comprises the amino acid sequence SGGSSGGSSGSETPGTSESATPESSGGSSGGSSGGSSGGSSGSETPGTSESATPESSGGS SGGS (SEQ ID NO: 25). In some embodiments, the linker is 92 amino acids in length. In some embodiments, the linker comprises the amino acid sequence PGSPAGSPTSTEEGTSESATPESGPGTSTEPSEGSAPGSPAGSPTSTEEGTSTEPSEGSAP GTSTEPSEGSAPGTSESATPESGPGSEPATS (SEQ ID NO: 26). It should be appreciated that any of the linkers provided herein may be used to link a first adenosine deaminase and a second adenosine deaminase; a deaminase (e.g., a first or a second adenosine deaminase) and a RNA guided programmable DNA binding protein; a RNA guided programmable DNA binding protein and an NLS; or a deaminase (e.g., a first or a second adenosine deaminase) and an NLS.

[0277] Various linker lengths and flexibilities between a deaminase (e.g., an engineered ecTadA) and a RNA guided programmable DNA binding protein (e.g., a Cas9 domain), and/or between a first adenosine deaminase and a second adenosine deaminase can be employed (e.g., ranging from very flexible linkers of the form (GGGGS) n (SEQ ID NO: 22), (GGGGS) n (SEQ ID NO: 22), and (G) n to more rigid linkers of the form (EAAAK) n (SEQ ID NO: 48), (SGGS) n (SEQ ID NO: 49), and (XP) n) in order to achieve the optimal length for deaminase activity for the specific application. In some embodiments, n is any integer between 3 and 30. In some embodiments, n is 1, 2, 3, 4, 5, 6, 7, 8, 9, 10, 11, 12, 13, 14, or 15. In some embodiments, the linker comprises a (GGS) n (SEQ ID NO: 51) motif, wherein n is 1, 3, or 7.

### Protospacer Adjacent Motifs

[0278] CRISPR clusters contain spacers, sequences complementary to antecedent mobile elements, and target invading nucleic acids. CRISPR clusters are transcribed and processed into CRISPR RNA (crRNA). For example, in type II CRISPR systems correct processing of pre-crRNA requires a trans-encoded small RNA (tracrRNA), endogenous ribonuclease 3 (rnc) and a Cas9 protein. The tracrRNA serves as a guide for ribonuclease 3-aided processing of pre-crRNA. Cas9 recognizes a short motif in the CRISPR repeat sequences (the PAM or protospacer adjacent motif) (see, e.g., “Complete genome sequence of an Ml strain of Streptococcus pyogenes.” Ferretti et ah, J. J., McShan W. M., Ajdic D. J., Savic D. J., Savic G., Lyon K., Primeaux C, Sezate S., Suvorov A. N., Kenton S., Lai H. S., Lin S. P., Qian Y., Jia H. G., Najar F. Z., Ren Q., Zhu H., Song L., Natl. Acad. Sci. U.S.A. 98:4658-4663 (2001); “CRISPR RNA maturation by trans-encoded small RNA and host factor RNase III.” Deltcheva E., Chylinski K., Sharma CM., Gonzales K., Chao Y., Pirzada Z. A., Eckert M. R., Vogel J., Charpentier E., Nature 471:602-607 (2011); and “A programmable dual-RNA-guided DNA endonuclease in adaptive bacterial immunity.” Jinek M., Chylinski K., Fonfara I., Hauer M., Doudna J.A., Charpentier E. Science 337:816-821 (2012), the entire contents of each of which are incorporated herein by reference). Cas9 orthologs have been described in various species, including, but not limited to, S. pyogenes and S. thermophilus.

[0279] Some aspects of the disclosure provide programmed DNA binding protein domains, e.g. Cas9 domains that have altered PAM specificities. In some embodiments, a Cas9 derived from S. pyogenes (spCas9) recognizes a canonical NGG PAM sequence where the “N” in “NGG” is adenine (A), thymine (T), guanine (G), or cytosine (C), and the G is guanine. In some embodiments, the base editing fusion proteins provided herein function by deaminating a target nucleobase within a 4 base region (e.g., a “deamination window”), which is approximately 15 bases upstream of the PAM. In some embodiments, the deamination window is 5, 6, 7, 8, 9, 10, 11, 12, 13, 14, 15, 16, 17, 18, 19, 20, 21, 22, 23, 24, or 25 bases upstream of the PAM. Accordingly, in some embodiments, any of the fusion proteins provided herein may contain a Cas9 domain that is capable of binding a nucleotide sequence that does not contain a canonical (e.g., NGG) PAM sequence. Cas9 domains that bind to non-canonical PAM sequences have been described in the art and would be apparent to the skilled artisan. For example, Cas9 domains that bind non-canonical PAM sequences have been described in Kleinstiver, B. P., et al., “Engineered CRISPR-Cas9 nucleases with altered PAM specificities” Nature 523, 481-485 (2015); and Kleinstiver, B. P., et ah, “Broadening the targeting range of Staphylococcus aureus CRISPR-Cas9 by modifying PAM recognition” Nature Biotechnology 33, 1293-1298 (2015); the entire contents of each are hereby incorporated by reference. In some embodiments, the Cas9 domain is a Cas9 domain from Staphylococcus aureus (SaCas9). In some embodiments, the SaCas9 domain is a nuclease active SaCas9, a nuclease inactive SaCas9 (SaCas9d), or a SaCas9 nickase (SaCas9n). A wild type SaCas9 amino acid sequence is provided below:

(SEQ ID NO: 52)
KRNYILGLDIGITSVGYGIIDYETRDVIDAGVRLFKEANVENNEGRRSK
RGARRLKRRRRHRIQRVKKLLFDYNLLTDHSELSGINPYEARVKGLSQK
LSEEEFSAALLHLAKRRGVHNVNEVEEDTGNELSTKEQISRNSKALEEK
YVAELQLERLKKDGEVRGSINRFKTSDYVKEAKQLLKVQKAYHQLDQSF
IDTYIDLLETRRTYYEGPGEGSPFGWKDIKEWYEMLMGHCTYFPEELRS
VKYAYNADLYNALNDLNNLVITRDENEKLEYYEKFQIIENVFKQKKKPT
LKQIAKEILVNEEDIKGYRVTSTGKPEFTNLKVYHDIKDITARKEIIEN
AELLDQIAKILTIYQSSEDIQEELTNLNSELTQEEIEQISNLKGYTGTH
NLSLKAINLILDELWHTNDNQIAIFNRLKLVPKKVDLSQQKEIPTTLVD
DFILSPVVKRSFIQSIKVINAIIKKYGLPNDIIIELAREKNSKDAQKMI
NEMQKRNRQTNERIEEIIRTTGKENAKYLIEKIKLHDMQEGKCLYSLEA
IPLEDLLNNPFNYEVDHIIPRSVSFDNSFNNKVLVKQEENSKKGNRTPF
QYLSSSDSKISYETFKKHILNLAKGKGRISKTKKEYLLEERDINRFSVQ
KDFINRNLVDTRYATRGLMNLLRSYFRVNNLDVKVKSINGGFTSFLRRK
WKFKKERNKGYKHHAEDALIIANADFIFKEWKKLDKAKKVMENQMFEEK
QAESMPEIETEQEYKEIFITPHQIKHIKDFKDYKYSHRVDKKPNRELIN
DTLYSTRKDDKGNTLIVNNLNGLYDKDNDKLKKLINKSPEKLLMYHHDP
QTYQKLKLIMEQYGDEKNPLYKYYEETGNYLTKYSKKDNGPVIKKIKYY
GNKLNAHLDITDDYPNSRNKVVKLSLKPYRFDVYLDNGVYKFVTVKNLD
VIKKENYYEVNSKCYEEAKKLKKISNQAEFIASFYNNDLIKINGELYRV
IGVNNDLLNRIEVNMIDITYREYLENMNDKRPPRIIKTIASKTQSIKKY
STDILGNLYEVKSKKHPQIIKKG

[0280] In some embodiments, the SaCas9 comprises a N579X mutation, or a corresponding mutation in any of the amino acid sequences as numbered in the wild type SaCas9 sequence, wherein X is any amino acid except for N. In some embodiments, the SaCas9 comprises a N579A mutation as numbered in the wild type SaCas9 sequence or a corresponding mutation in another SaCas9 protein.

[0281] In some embodiments, the SaCas9 domain, the nuclease inactive SaCas9 domain, or the SaCas9 nickase domain can bind to a nucleic acid sequence having a non-canonical PAM. In some embodiments, the SaCas9 domain, the SaCas9d domain, or the SaCas9n domain can bind to a nucleic acid sequence having a NNGRRT PAM sequence, where N=A, T, C, or G, and R=A or G. In some embodiments, the SaCas9 domain comprises one or more of E781X, N967X, and R1014X as numbered in the wild type SaCas9 sequence or a corresponding mutation in another SaCas9 protein wherein X is any amino acid. In some embodiments, the SaCas9 domain comprises one or more of a E781K, a N967K, and a R1014H mutation as numbered in the wild type SaCas9 sequence or a corresponding mutation in another SaCas9 protein. In some embodiments, the SaCas9 domain comprises a E781K, a N967K, or a R1014H mutation as numbered in the wild type SaCas9 sequence or a corresponding mutation in another SaCas9 protein.

[0282] In some embodiments, the Cas9 domain is a Cas9 domain from Streptococcus pyogenes (SpCas9). In some embodiments, the SpCas9 domain is a nuclease active SpCas9, a nuclease inactive SpCas9 (SpCas9d), or a SpCas9 nickase (SpCas9n). In some embodiments, the SpCas9 comprises a D10X mutation as numbered in the wild type SpCas9 amino acid sequence or a corresponding mutation in another SapCas9 protein, wherein X is any amino acid except for D. In some embodiments, the SpCas9 comprises a D10A mutation as numbered in the wild type SpCas9 amino acid sequence or a corresponding mutation in another SpCas9 protein. In some embodiments, the SpCas9 domain, the nuclease in active SpCas9 domain, or the SpCas9 nickase domain can bind to a nucleic acid sequence having a non-NGG PAM. In some embodiments, the SpCas9 domain, the SpCas9 domain, the nuclease in active SpCas9 domain, or the SpCas9 nickase domain can bind to a nucleic acid sequence having a NGG, a NGA, or a NGCG PAM sequence. In some embodiments, the SpCas9 domain comprises one or more of a D1135X, a R1335X, and a T1337X mutation as numbered in the wild type SpCas9 amino acid sequence or a corresponding mutation in another SpCas9 protein, wherein X is any amino acid. In some embodiments, the SpCas9 domain comprises one or more of a D1135E, R1335Q, and T1337R mutation as numbered in the wild type SpCas9 amino acid sequence or a corresponding mutation in another SpCas9 protein. In some embodiments, the SpCas9 domain comprises one or more of a DI 134V, a R1334Q, and a T1336R mutation as numbered in the wild type Cas9 amino acid sequence, or a corresponding mutation thereof. In some embodiments, the SpCas9 domain comprises a D1135V, a R1335Q, and a T1337R mutation as numbered in the wild type SpCas9 amino acid sequence or a corresponding mutation in another SpCas9 protein. In some embodiments, the SpCas9 domain comprises one or more of a D1135X, a G1218X, a R1335X, and a T1337X mutation as numbered in the wild type SpCas9 amino acid sequence or a corresponding mutation in another SpCas9 protein, wherein X is any amino acid. In some embodiments, the SpCas9 domain comprises one or more of a D1135V, a G1218R, a R1335Q, and a T1337R mutation as numbered in the wild type SpCas9 amino acid sequence or a corresponding mutation in another SpCas9 protein. In some embodiments, the SpCas9 domain comprises a D1135V, a G1218R, a R1335Q, and a T1337R mutation as numbered in the wild type SpCas9 amino acid sequence or a corresponding mutation in another SpCas9 protein.

[0283] In some embodiments, the Cas9 domain of any of the fusion proteins provided herein comprises an amino acid sequence that is at least 60%, at least 65%, at least 70%, at least 75%, at least 80%, at least 85%, at least 90%, at least 95%, at least 96%, at least 97%, at least 98%, at least 99%, or at least 99.5% identical to any one of the Cas9 sequences provided herein.

[0284] In some embodiments, a base editor provided herein comprises a RNA guide programmable DNA binding protein that may be used to target and modify a specific nucleic acid (e.g., DNA or RNA) sequence. Nucleic acid programmable DNA binding proteins include, without limitation, Cas9 (e.g., nuclease inactive Cas9 and Cas9 nickase), CasX, CasY, Cas12a (Cpf1), Cas12b, C2c1, C2c2, C2C3, and Argonaute. One example of an nucleic acid programmable DNA-binding protein that has different PAM specificity than Cas9 is Clustered Regularly Interspaced Short Palindromic Repeats from Prevotella and Francisella 1 (Cpf1). Similar to Cas9, Cpf1 is also a class 2 CRISPR effector. It has been shown that Cpf1 mediates robust DNA interference with features distinct from Cas9. Cpf1 is a single RNA-guided endonuclease lacking tracrRNA, and it utilizes a T-rich protospacer-adjacent motif (TTN, TTTN, or YTN). Cpf1 proteins described in Yamano et ah, “Crystal structure of Cpf1 in complex with guide RNA and target DNA.” Cell (165) 2016, p. 949-962; the entire contents of which is hereby incorporated by reference.

[0285] In some embodiments, a base editor provided herein comprises a nuclease inactive Cpf1 protein or a variant thereof. The Cpf1 protein has a RuvC-like endonuclease domain that is similar to the RuvC domain of Cas9 but does not have a HNH endonuclease domain, and the N-terminal of Cpf1 does not have the alfa-helical recognition lobe of Cas9. In some embodiments, the Cpf1 nickase comprises one or more mutations corresponding to D917A, E1006A, or D1255A as numbered in the Francisella novicida Cpf1 protein.

[0286] Wild type Francisella novicida Cpf1 amino acid sequence is provided below:

(SEQ ID NO: 53)
MSIYQEFVNKYSLSKTLRFELIPQGKTLENIKARGLILDDEKRAKDYKKA
KQIIDKYHQFFIEEILSSVCISEDLLQNYSDVYFKLKKSDDDNLQKDFKS
AKDTIKKQISEYIKDSEKFKNLFNQNLIDAKKGQESDLILWLKQSKDNGI
ELFKANSDITDIDEALEIIKSFKGWTTYFKGFHENRKNVYSSNDIPTSII
YRIVDDNLPKFLENKAKYESLKDKAPEAINYEQIKKDLAEELTFDIDYKT
SEVNQRVFSLDEVFEIANFNNYLNQSGITKFNTIIGGKFVNGENTKRKGI
NEYINLYSQQINDKTLKKYKMSVLFKQILSDTESKSFVIDKLEDDSDVVT
TMQSFYEQIAAFKTVEEKSIKETLSLLFDDLKAQKLDLSKIYFKNDKSLT
DLSQQVEDDYSVIGTAVLEYITQQIAPKNLDNPSKKEQELIAKKTEKAKY
LSLETIKLALEEFNKHRDIDKQCRFEEILANFAAIPMIFDEIAQNKDNLA
QISIKYQNQGKKDLLQASAEDDVKAIKDLLDQTNNLLHKLKIFHISQSED
KANILDKDEHFYLVFEECYFELANIVPLYNKIRNYITQKPYSDEKFKLNF
ENSTLANGWDKNKEPDNTAILFIKDDKYYLGVMNKKNNKIFDDKAIKENK
GEGYKKIVYKLLPGANKMLPKVFFSAKSIKFYNPSEDILRIRNHSTHTKN
GSPQKGYEKFEFNIEDCRKFIDFYKQSISKHPEWKDFGFRFSDTQRYNSI
DEFYREVENQGYKLTFENISESYIDSVVNQGKLYLFQIYNKDFSAYSKGR
PNLHTLYWKALFDERNLQDVVYKLNGEAELFYRKQSIPKKITHPAKEAIA
NKNKDNPKKESVFEYDLIKDKRFTEDKFFFHCPITINFKSSGANKFNDEI
NLLLKEKANDVHILSIDRGERHLAYYTLVDGKGNIIKQDTFNIIGNDRMK
TNYHDKLAAIEKDRDSARKDWKKINNIKEMKEGYLSQVVHEIAKLVIEYN
AIVVFEDLNFGFKRGRFKVEKQVYQKLEKMLIEKLNYLVFKDNEFDKTGG
VLRAYQLTAPFETFKKMGKQTGIIYYVPAGFTSKICPVTGFVNQLYPKYE
SVSKSQEFFSKFDKICYNLDKGYFEFSFDYKNFGDKAAKGKWTIASFGSR
LINFRNSDKNHNWDTREVYPTKELEKLLKDYSIEYGHGECIKAAICGESD
KKFFAKLTSVLNTILQMRNSKTGTELDYLISPVADVNGNFFDSRQAPKNM
PQDADANGAYHIGLKGLMLLGRIKNNQEGKKLNLVIKNEEYFEFVQNRNN

[0287] In some embodiments, the base editor comprises a Cpf1 protein. In some embodiments, the Cpf1 protein is a Cpf1 nickase. In some embodiments, the Cpf1 protein is a nuclease inactive Cpf1. In some embodiments, the Cpf1 protein comprises an amino acid sequence that is at least 85%, at least 90%, at least 91%, at least 92%, at least 93%, at least 94%, at least 95%, at least 96%, at least 97%, at least 98%, at least 99%, or at ease 99.5% identical to the FnCpf1 sequence provided herein. In some embodiments, the Cpf1 protein comprises mutations corresponding to D917A, E1006A, D1255A, D917A/E1006A, D917A/D1255A, E1006A/D1255A, or D917A/E1006A/D1255A as numbered in the wild type FnCpf1 sequence provided herein. It should be appreciated that Cpf1 from other bacterial species may also be used in accordance with the present disclosure.

[0288] In some embodiments, the nucleic acid programmable DNA binding protein comprises a Cas12b (C2c1), C2c2, or C2c3 protein or a variant thereof. Additional features of Cas proteins in Class 2 CRISPR-Cas systems described in Shmakov et al., “Discovery and Functional Characterization of Diverse Class 2 CRISPR Cas Systems”, Mol. Cell, 2015 Nov. 5; 60 (3): 385-397, the entire contents of which is hereby incorporated by reference. Effectors of two of the systems, C2cl and C2c3, contain RuvC-like endonuclease domains related to Cpf1. A third system, C2c2 contains an effector with two predicated HEPN RNase domains. Production of mature CRISPR RNA is tracrRNA-independent, unlike production of CRISPR RNA by C2cl. C2cl depends on both CRISPR RNA and tracrRNA for DNA cleavage. The crystal structure of Alicyclobaccillus acidoterrastris C2cl (AacC2c1) in complex with a chimeric single-molecule guide RNA (sgRNA) is described in Liu et al., “C2c1-sgRNA Complex Structure Reveals RNA-Guided DNA Cleavage Mechanism”, Mol. Cell, 2017 Jan. 19;65 (2): 310-322; Yang et al., “PAM-dependent Target DNA Recognition and Cleavage by C2C1 CRISPR-Cas, the entire contents of which are hereby incorporated by reference.

[0289] An exemplary Cas12b amino acid sequence (Bacillus hisashii Cas12b) is provided below:

BhCas12b (Bacillus hisashii) NCBI Reference
Sequence: WP_095142515
(SEQ ID NO: 54)
MAPKKKRKVGIHGVPAAATRSFILKIEPNEEVKKGLWKTHEVLNHGIAYY
MNILKLIRQEAIYEHHEQDPKNPKKVSKAEIQAELWDFVLKMQKCNSFTH
EVDKDEVFNILRELYEELVPSSVEKKGEANQLSNKFLYPLVDPNSQSGKG
TASSGRKPRWYNIKIAGDPSWEEEKKKWEEDKKKDPLAKILGKLAEYGLI
PLFIPYTDSNEPIVKEIKWMEKSRNQSVRRLDKDMFIQALERFLSWESWN
LKVKEEYEKVEKEYKTLEERIKEDIQALKALEQYEKERQEQLLRDTLNTN
EYRLSKRGLRGWREIIQKWLKMDENEPSEKYLEVFKDYQRKHPREAGDYS
VYEFLSKKENHFIWRNHPEYPYLYATFCEIDKKKKDAKQQATFTLADPIN
HPLWVRFEERSGSNLNKYRILTEQLHTEKLKKKLTVQLDRLIYPTESGGW
EEKGKVDIVLLPSRQFYNQIFLDIEEKGKHAFTYKDESIKFPLKGTLGGA
RVQFDRDHLRRYPHKVESGNVGRIYFNMTVNIEPTESPVSKSLKIHRDDF
PKVVNFKPKELTEWIKDSKGKKLKSGIESLEIGLRVMSIDLGQRQAAAAS
IFEVVDQKPDIEGKLFFPIKGTELYAVHRASFNIKLPGETLVKSREVLRK
AREDNLKLMNQKLNFLRNVLHFQQFEDITEREKRVTKWISRQENSDVPLV
YQDELIQIRELMYKPYKDWVAFLKQLHKRLEVEIGKEVKHWRKSLSDGRK
GLYGISLKNIDEIDRTRKFLLRWSLRPTEPGEVRRLEPGQRFAIDQLNHL
NALKEDRLKKMANTIIMHALGYCYDVRKKKWQAKNPACQIILFEDLSNYN
PYEERSRFENSKLMKWSRREIPRQVALQGEIYGLQVGEVGAQFSSRFHAK
TGSPGIRCSVVTKEKLQDNRFFKNLQREGRLTLDKIAVLKEGDLYPDKGG
EKFISLSKDRKCVTTHADINAAQNLQKRFWTRTHGFYKVYCKAYQVDGQT
VYIPESKDQKQKIIEEFGEGYFILKDGVYEWVNAGKLKIKKGSSKQSSSE
LVDSDILKDSFDLASELKGEKLMLYRDPSGNVFPSDKWMAAGVFFGKLER
ILISKLINQYSISTIEDDSSKQSMKRPAATKKAGQAKKKK

[0290] In some embodiments, the programmable DNA binding protein comprises an argonaute protein. One example of such a nucleic acid programmable DNA binding protein is an Argonaute protein from Natronobacterium gregoryi (NgAgo). NgAgo is a ssDNA-guided endonuclease. NgAgo binds 5′ phosphorylated ssDNA of −24 nucleotides (gDNA) to guide it to its target site and will make DNA double-strand breaks at the gDNA site. In contrast to Cas9, the NgAgo-gDNA system does not require a protospacer-adjacent motif (PAM). Using a nuclease inactive NgAgo (dNgAgo) can greatly expand the bases that may be targeted. The characterization and use of NgAgo have been described in Gao et al., Nat Biotechnol., 2016 July; 34 (7): 768-73. PubMed PMID: 27136078; Swarts et al., Nature. 507 (7491) (2014): 258-61; and Swarts et al., Nucleic Acids Res. 43 (10) (2015): 5120-9, each of which is incorporated herein by reference.

[0291] In some embodiments, the protospacer sequence comprises a nucleotide sequence that is at least 60%, at least 65%, at least 70%, at least 75%, at least 80%, at least 85%, at least 90%, at least 95%, at least 96%, at least 97%, at least 98%, at least 99%, at least 99.5%, at least 99.7%, or at least 99.9% identical to any one of the protospacer sequences listed in Table 1 or Table 24. In some embodiments, the protospacer sequence comprises any one of the protospacer sequences listed in Table 1 or Table 24. In some embodiments, the protospacer sequence is any one of the protospacer sequences listed in Table 1 or Table 24. In some embodiments, the protospacer sequence comprises a nucleotide sequence that is at least 60%, at least 65%, at least 70%, at least 75%, at least 80%, at least 85%, at least 90%, at least 95%, at least 96%, at least 97%, at least 98%, at least 99%, at least 99.5%, at least 99.7%, or at least 99.9% identical to any one of the sequences of SEQ ID NOs: 13-15, 50, 66-69, 81-252, and 1594-1617. In some embodiments, the protospacer sequence comprises any one of the sequences of SEQ ID NOs: 13-15, 50, 66-69, 81-252, and 1594-1617. In some embodiments, the protospacer sequence is any one of the sequences of SEQ ID NOs: 13-15, 50, 66-69, 81-252, and 1594-1617.

### Guide Polynucleotides

[0292] Some aspects of this disclosure provide complexes comprising any of the fusion proteins provided herein, and a guide polynucleotide bound to a programmable DNA binding protein, e.g. a Cas9 domain of the base editor or fusion protein.

[0293] In some embodiments, a guide polynucleotide is a guide polynucleotide, a guide RNA (gRNA), or a nucleic acid encoding the same.

[0294] In some embodiments, the guide polynucleotide comprises a single nucleic acid sequence. In some embodiments, the guide polynucleotide comprises two nucleic acid sequences. In some embodiments, the guide nucleic acid (e.g., guide RNA) is from 15-100 nucleotides long and comprises a sequence of at least 10 contiguous nucleotides that is complementary to a target sequence. In some embodiments, the guide RNA is 15, 16, 17, 18, 19, 20, 21, 22, 23, 24, 25, 26, 27, 28, 29, 30, 31, 32, 33, 34, 35, 36, 37, 38, 39, 40, 41, 42, 43, 44, 45, 46, 47, 48, 49, or 50 nucleotides long. In some embodiments, the guide RNA comprises a sequence of 15, 16, 17, 18, 19, 20, 21, 22, 23, 24, 25, 26, 27, 28, 29, 30, 31, 32, 33, 34, 35, 36, 37, 38, 39, or 40 contiguous nucleotides that is complementary to a target sequence. In some embodiments, the target sequence is a DNA sequence. In some embodiments, the target sequence is a sequence in the genome of a mammal. In some embodiments, the target sequence is a sequence in the genome of a human. In some embodiments, the 3′ end of the target sequence is immediately adjacent to a canonical PAM sequence (NGG). In some embodiments, the guide nucleic acid (e.g., guide RNA) is complementary to a sequence associated with a disease or disorder. In some embodiments, the guide nucleic acid (e.g., guide RNA) is complementary to a sequence associated with a disease or disorder having a mutation in a PCSK9 gene, a ANGPTL3 gene, or a APOC3 gene.

[0295] Some aspects of this disclosure provide methods of using the fusion proteins, or complexes comprising a guide nucleic acid (e.g., gRNA) and a nucleobase editor provided herein. For example, some aspects of this disclosure provide methods comprising contacting a DNA, or RNA molecule with any of the fusion proteins provided herein, and with at least one guide nucleic acid (e.g., guide RNA), wherein the guide nucleic acid, (e.g., guide RNA) is about 15-100 nucleotides long and comprises a sequence of at least 10 contiguous nucleotides that is complementary to a target sequence. In some embodiments, the 3′ end of the target sequence is immediately adjacent to a canonical PAM sequence (NGG). In some embodiments, the 3′ end of the target sequence is not immediately adjacent to a canonical PAM sequence (NGG). In some embodiments, the 3′ end of the target sequence is immediately adjacent to an AGC, GAG, TTT, GTG, or CAA sequence.

[0296] In some embodiments, a guide polynucleotide is a DNA. In some embodiments, a guide polynucleotide is an RNA. In some embodiments, a guide polynucleotide is a modified, artificial polynucleotides. In some embodiments, a guide polynucleotide is a single or single molecule polynucleotide. In some embodiments, a guide polynucleotide comprises dual polynucleotides. In some embodiments, a guide polynucleotide is a dual polynucleotides connected by a linker. In some embodiments, a guide polynucleotide is a dual polynucleotides connected by a non-nucleic acid linker. In some embodiments, a guide polynucleotide is a dual polynucleotides connected by a peptide linker or a chemical linker. In some embodiments, the guide polynucleotide is a single guide RNA. The guide RNA (gRNA) may guide the programmable DNA binding protein, e.g., a Class 2 Cas nuclease, e.g. a Cas9 to a target sequence on a target nucleic acid molecule, where the gRNA hybridizes with and the programmable DNA binding protein and modifies the target sequence. In some embodiments, the gRNA and the base editor fusion protein may form a ribonucleoprotein (RNP), e.g., a CRISPR/Cas complex. In some embodiments, the CRISPR complex may be a Type II CRISPR/Cas9 complex. In some embodiments, the CRISPR/Cas complex may be a Type V CRISPR/Cas complex, such as a Cpf1/guide RNA complex.

[0297] A gRNA can comprise at least three regions: a first region at the 5′ end that can bind to the complementary strand of a target site in a chromosomal sequence (spacer region), a second internal region that can form a stem loop structure, and a third 3′ region that can be single-stranded. A first region of each guide RNA can also be different such that each gRNA guides a protein, e.g., Cas9, to a specific target site. Further, second and third regions of each gRNA can be identical in all gRNAs. A second region of a gRNA may form a secondary structure. In some embodiments, a secondary structure formed by a gRNA can comprise a stem (or hairpin) and a loop. A length of a loop and a stem can vary. In some embodiments, a loop can range from about 3 to about 10 nucleotides in length. In some embodiments, a stem can range from about 6 to about 20 nucleotides in length. A stem can comprise one or more bulges of 1 to 10 nucleotides or about 10 nucleotides. In some embodiments, the overall length of a second region can range from about 16 to 60 nucleotides in length. In some embodiments, a loop can be about 4 nucleotides in length. In some embodiments, a stem can be about 12 in length. A third region of gRNA at the 3′ end can be essentially single-stranded. In some embodiments, a third region is sometimes not complementary to any chromosomal sequence in a cell of interest and is sometimes not complementary to the rest of a gRNA. In addition, the length of a third region can vary. In some embodiments, a third region can be more than 3 or more than 4 nucleotides in length. For example, the length of a third region can range from about 5 to 60 nucleotides in length.

[0298] A gRNA for a base editor system can comprise a CRISPR RNA (crRNA) and a trans-activating crRNA (tracrRNA). In some embodiments, the crRNA may comprise a targeting sequence (or spacer sequence) that hybridizes with the complementary strand of the target sequence on the target nucleic acid molecule. The crRNA may also comprise a flagpole that is complementary to and hybridizes with a portion of the tracrRNA. In some embodiments, the crRNA may parallel the structure of a naturally occurring crRNA transcribed from a CRISPR locus of a bacteria, where the targeting sequence acts as the protospacer of the Cas9 in the base editor system. The gRNA may target any sequence of interest via the targeting sequence of the crRNA. In some embodiments, the degree of complementarity between the targeting sequence of the gRNA and the target sequence on the target nucleic acid molecule is at least about 60%, 65%, 70%, 75%, 80%, 85%, 90%, 95%, 97%, 98%, 99%, or 100%. In some embodiments, the targeting sequence of the gRNA and the target sequence on the target nucleic acid molecule may be 100% complementary. In other embodiments, the targeting sequence of the gRNA and the target sequence on the target nucleic acid molecule may contain at least one mismatch. For example, the targeting sequence of the gRNA and the target sequence on the target nucleic acid molecule may contain 1, 2, 3, 4, 5, 6, 7, 8, 9, or 10 mismatches.

[0299] In some embodiments, the length of the targeting sequence depends on the CRISPR/Cas component of the base editor system and components used. For example, different Cas proteins from different bacterial species have varying optimal targeting sequence lengths. Accordingly, the targeting sequence may comprise 5, 6, 7, 8, 9, 10, 11, 12, 13, 14, 15, 16, 17, 18, 19, 20, 21, 22, 23, 24, 25, 26, 27, 28, 29, 30, 31, 32, 33, 34, 35, 36, 37, 38, 39, 40, 41, 42, 43, 44, 45, 46, 47, 48, 49, 50, or more than 50 nucleotides in length. In some embodiments, the targeting sequence comprised 18-24 nucleotides in length. In some embodiments, the targeting sequence comprises 19-21 nucleotides in length. In some embodiments, the targeting sequence comprises 20 nucleotides in length.

[0300] In some embodiments, the guide RNA is a “dual guide RNA” or “dgRNA”. In some embodiments, the dgRNA comprises a first RNA molecule comprising a crRNA, and a second RNA molecule comprising a tracrRNA. The first and second RNA molecules may form a RNA duplex via the base pairing between the crRNA and the tracrRNA (e.g. the repeat and anti repeat). In some embodiments, the guide RNA is a “single guide RNA” or “sgRNA.” In some embodiments, the sgRNA may comprise a crRNA covalently linked to a tracrRNA. In some embodiments, the crRNA and the tracrRNA may be covalently linked via a linker. In some embodiments, the single-molecule guide RNA may comprise a stem-loop structure via the base pairing between the crRNA and the tracrRNA. In some embodiments, the sgRNA is a “Cas9 sgRNA” capable of directing a Cas9 protein. In certain embodiments, the guide RNA comprises a crRNA and tracrRNA sufficient for forming an active complex with a Cas9 protein and mediating RNA-guided DNA modification. The term “gRNA” and “sgRNA” are used interchangeably throughout this application. In some embodiments, more than one guide RNAs can be used; each guide RNA contains a different targeting sequence, such that the base editor system modifies more than one target sequence. In some embodiments, one or more guide RNAs may have the same or differing properties such as activity or stability within a base editor complex. Where more than one guide RNA is used, each guide RNA can be encoded on the same or on different expression cassettes. The promoters used to drive expression of the more than one guide RNA may be the same or different.

[0301] In some embodiments, the gRNA or mRNA encoding Cas protein is modified. The modifications can comprise chemical alterations, synthetic modifications, nucleotide additions, and/or nucleotide subtractions and modified nucleosides or nucleotides can be present in a gRNA. A gRNA or Cas protein-encoding mRNA comprising one or more modified nucleosides or nucleotides is called a “modified” RNA to describe the presence of one or more non-naturally and/or naturally occurring components or configurations that are used instead of or in addition to the canonical A, G, C, and U residues. In some embodiments, a modified RNA is synthesized with a non-canonical nucleoside or nucleotide. Modified nucleosides and nucleotides can include one or more of: (i) alteration, e.g., replacement, of one or both of the non-linking phosphate oxygens and/or of one or more of the linking phosphate oxygens in the phosphodiester backbone linkage (an exemplary backbone modification); (ii) alteration, e.g., replacement, of a constituent of the ribose sugar, e.g., of the 2′ hydroxyl on the ribose sugar (an exemplary sugar modification); (iii) wholesale replacement of the phosphate moiety with “dephospho” linkers (an exemplary backbone modification); (iv) modification or replacement of a naturally occurring nucleobase, including with a non-canonical nucleobase (an exemplary base modification); (v) replacement or modification of the ribose-phosphate backbone (an exemplary backbone modification); (vi) modification of the 3′ end or 5′ end of the oligonucleotide, e.g., removal, addition, modification, or replacement of a terminal phosphate group or conjugation of a moiety, cap, or linker (such 3′ or 5′ cap modifications may comprise a sugar and/or backbone modification); and (vii) modification or replacement of the sugar (an exemplary sugar modification). The modifications can enhance genome editing by CRISPR/Cas. A modification can alter chirality of a gRNA. In some cases, chirality may be uniform or stereopure after a modification. A guide RNA can also be truncated. Truncation can be used to reduce undesired off-target mutagenesis. The truncation can comprise any number of nucleotide deletions. For example, the truncation can comprise 1, 2, 3, 4, 5, 10, 15, 20, 25, 30, 40, 50 or more nucleotides. In some embodiments, the term “cap,” as used herein, may be used to refer to one or more specially altered or modified nucleotides, e.g., specially altered or modified nucleotides on the 5′ end of mRNA. In some embodiments, the cap comprises to a modified guanine (G) nucleotide. In some embodiments, the cap refers to the 5′ end modification of mRNAs by addition of 7-Methylguanosine (N7-methyl guanosine or m7G). In some embodiments, “capping” of the mRNA structure plays a crucial role in a variety of cellular processes which include translation initiation, splicing, intracellular transport, and turnover. In some embodiment, the 5′ cap enhances mRNA stability as well as translation efficiency. Exemplary cap analogs include, but are not limited to, standard cap analog m7G (5′) ppp (5′) G, anti-reverse cap analog (ARCA) m7,3′-OGpppG (or 3′-O-Me-m7G (5′) ppp (5′) G), unmethylated cap analog G (5′) ppp (5′) G, methylated cap analog for A+1 sites m7G (5′) ppp (5′) A, and unmethylated cap analog for A+1 sites G (5′) ppp (5′) A. Additional methods of obtaining mRNA cap analogs are described in Kowalska et al., RNA 2008 14 (6): 1119-1131, which is incorporated herein in its entirety.

[0302] In some embodiments, the guide RNA sequence comprises a nucleotide sequence that is at least 60%, at least 65%, at least 70%, at least 75%, at least 80%, at least 85%, at least 90%, at least 95%, at least 96%, at least 97%, at least 98%, at least 99%, at least 99.5%, at least 99.7%, or at least 99.9% identical to any one of the guide sequences listed in Table 1 or Table 24. In some embodiments, the guide RNA sequence comprises any one of the guide RNA sequences listed in Table 1 or Table 24. In some embodiments, the guide RNA sequence is any one of the guide RNA sequences listed in Table 1 or Table 24. In some embodiments, the guide RNA sequence comprises a nucleotide sequence that is at least 60%, at least 65%, at least 70%, at least 75%, at least 80%, at least 85%, at least 90%, at least 95%, at least 96%, at least 97%, at least 98%, at least 99%, at least 99.5%, at least 99.7%, or at least 99.9% identical to any one of the sequences of SEQ ID NOs: 9-11, 55, 59, 253-452, 1618-1635, 1637-1800, 1802-2135, and 2191. In some embodiments, the guide RNA sequence comprises any one of the sequences of SEQ ID NOs: 9-11, 55, 59, 253-452, 1618-1635, 1637-1800, 1802-2135, and 2191. In some embodiments, the guide RNA sequence is any one of the sequences of SEQ ID NOs: 9-11, 55, 59, 253-452, 1618-1635, 1637-1800, 1802-2135, and 2191.

### Off-Target Effects

[0303] With standard CRISPR-Cas9 genome editing, off-target mutagenesis—i.e., edits at genomic sites other than the intended target site—can occur at sites that share a high degree of sequence similarity with the protospacer sequence encoded in the gRNA.

[0304] As used herein, off-target effect may be used refer to modifications, including indels, at genomic sites other than intended target site, for example, a protospacer sequence recognized by the guide RNA sequence. In the context of base editing, off-target editing may occur at genomic sites remote from an intended target site, or in close proximity to the intended target site. For example, one or more bases besides the target nucleobase in the base editing window may be edited (“bystander editing”). In certain embodiments, off-target base editing, e.g. bystander editing does not impact expression or function of the target gene.

[0305] Potential off-target sequence candidates in the genome may be predicted by bioinformatic analyses of the human genome using, e.g., the MIT Specificity Score (calculated by http://crispor.tefor.net/; minimum score of 50) or by in vitro biochemical assays, e.g., ONE-seq.

[0306] Off-target editing may be determined by sequencing analysis. In some embodiments, off-target editing is calculated using net nucleobase editing at potential off-target sites in the genome. For example, net nucleobase editing efficiency may be determined using no-base editor or no-guide RNA as a control, where net nucleobase editing efficiency is obtained by editing rate observed in cells contacted with a LNP enclosing a base editor mRNA and a guide RNA subjected by editing rate observed in control cells at predicted off-target sites. Additional methods for estimating and reducing off-target editing are described in Rees et al., Nat. Rev. Genet. 2018 19 (12): 770-788, which is incorporated herein by reference in its entirety.

[0307] Methods for selecting, designing, and validating gRNAs and targeting sequences (or spacer sequences) are described herein and known to those skilled in the art. Software tools can be used to optimize the gRNAs corresponding to a target nucleic acid sequence, e.g., to minimize total off-target activity across the genome. For example, for each possible targeting domain choice using S. pyogenes Cas9, all off-target sequences (preceding selected PAMs, e.g., NAG or NGG) may be identified across the genome that contain up to certain number (e.g., 1, 2, 3, 4, 5, 6, 7, 8, 9, or 10) of mismatched base-pairs. First regions of gRNAs complementary to a target site can be identified, and all first regions (e.g., crRNAs) can be ranked according to its total predicted off-target score; the top-ranked targeting domains represent those that are likely to have the greatest on-target and the least off-target activity. In some embodiments, a DNA sequence searching algorithm can be used to identify a target sequence in crRNAs of a gRNA for use with Cas9. A custom gRNA design software based on the public tool cas-offinder, which scores guides after calculating their genome-wide off-target propensity, can be also used to design a gRNA (Bae, et al., Cas-OFFinder: A fast and versatile algorithm that searches for potential off-target sites of Cas9 RNA-guided endonucleases. Bioinformatics 30, 1473-1475 (2014)). In some embodiments, RepeatMasker program can be used to screen repeat elements and regions of low complexity in the input DNA sequences. In addition, the number of residues that could unintentionally be targeted (e.g., off-target residues that could potentially reside on ssDNA within the target nucleic acid locus) may be minimized to reduce the impact of potential substrate promiscuity of a deaminase domain in the nucleobase editor system. Candidate gRNAs can be functionally evaluated by using methods known in the art and/or as set forth herein.

[0308] In some embodiments, target sequences for a Cas9 protein in a base editor system can be selected based on the presence of target sequences of a gene of interest in one or more species. For example, a sequence may be selected as a target sequence if the sequence match target sequences in both human and cynomolgus monkey orthologs of a gene of interest. In some embodiments, target sequences for a Cas9 nuclease can be selected based on predicted off-target profiles, as judged by the MIT Specificity Score (calculated by http://crispor.tefor.net/). For example, a sequence may be selected as a target sequence if the sequence has a favorable predicted off-target profiles (e.g., minimum score of 50 when judged by the MIT Specificity Score). In some embodiments, target sequences for an adenine base editor (ABE) can be selected based on the ability of editing an adenine base within a splice donor site or a splice acceptor site in a target gene. In some embodiments, target sequences for an ABE can be selected based on the position of an adenine, e.g., if the adenine lies within the editing window of the ABE.

[0309] The gRNAs described herein can be synthesized chemically, enzymatically, or a combination thereof. For example, the gRNA can be synthesized using standard phosphoramidite-based solid-phase synthesis methods. Alternatively, the gRNA can be synthesized in vitro by operably linking DNA encoding the gRNA to a promoter control sequence that is recognized by a phage RNA polymerase. Examples of suitable phage promoter sequences include, but are not limited to, T7, T3, SP6 promoter sequences, or variations thereof. In some embodiments, gRNA comprises two separate molecules (e.g., crRNA and tracrRNA) and one molecule (e.g., crRNA) can be chemically synthesized and the other molecule (e.g., tracrRNA) can be enzymatically synthesized.

[0310] In some aspects, provided herein, is a composition for gene modification comprising a single guide RNA (sgRNA) described herein and the base editor fusion protein or a nucleic acid sequence encoding the base editor fusion protein. In some embodiments, the composition further comprises a vector that comprises the nucleic acid sequence encoding the base editor fusion protein. In some embodiments, base editor fusion protein comprises a Cas9 protein. In some embodiments, the Cas9 protein is a the Cas9 protein is a Streptococcus pyogenes Cas9. In some embodiments, the composition further comprises a pharmaceutically acceptable carrier. Non-limiting examples of pharmaceutically acceptable carriers are listed in “Pharmaceutical composition and methods of treatment” section of this application. In some embodiments, the composition described herein can be provided in a lipid nanoparticle.

Chemically Modified Guide RNAs (gRNAs)

[0311] The present disclosure, provided herein, relates to a chemically modified CRISPR guide RNA (gRNA) that may be used in association with any general CRISPR/Cas system, for example, a base editor system as described herein. gRNAs (e.g., sgRNAs, short-sgRNAs, crRNAs, tracrRNAs, or dgRNAs) may comprise modifications at various nucleotide positions. In some aspects, provided herein, is a guide RNA (gRNA) or a single guide RNA (sgRNA) that comprises (i) a chemical modification at a nucleotide and (ii) an unmodified nucleotide. In some embodiments, the gRNA or the sgRNA may comprise a modification at a specific nucleotide position. In some embodiments, the gRNA or the sgRNA may comprise one or more modifications at one or more specific positions.

[0312] In an aspect, chemically modified CRISPR guide RNAs provided herein comprise modifications based on crystal structures. Not intended to be bound by a particular theory, X-ray crystal structure based guide design may be used to optimize gRNA modification in complex with the Cas protein, e.g. Cas9. In some embodiments, a nucleotide where a 2′-OH is in close proximity with a Cas9 protein in the Cas9-gRNA complex is unmodified. In some embodiments, a nucleotide where a 2′-OH is in contact with a Cas9 protein in the Cas9-gRNA complex is unmodified. In some embodiments, a nucleotide where a 2′-OH is in contact with a Cas9 protein with a hydrogen bond in the Cas9-gRNA complex is unmodified. In some embodiments, the Cas9-gRNA complex is a pre-catalytic ternary complex. In some embodiments, a nucleotide where a 2′-OH is in close proximity with another part of the gRNA in the Cas9-gRNA complex is unmodified. In some embodiments, a nucleotide where a 2′-OH is in contact with another part of the gRNA in the Cas9-gRNA complex is unmodified. In some embodiments, a nucleotide where a 2′-OH is in contact with another part of the gRNA with a hydrogen bond in the Cas9-gRNA complex is unmodified. In some embodiments, the Cas9-gRNA complex is a pre-catalytic ternary complex. As a person of skill in the art would understand, the term “clash” as used herein refers to physically-unlikely overlapping atomic volumes in a structure. Incorporation of a 2′0-Me modification in these situations would potentially result in structural rearrangement(s) that could be detrimental to RNP function. As a person of skill in the art would understand, the term “contact” as used herein means a stable, non-covalent interaction between two functional groups, e.g. a hydrogen bond. In some embodiments, a nucleotide where a clash with another part of the gRNA is predicted if a 2′-OH is replaced with a 2′-OMe in the Cas9-gRNA complex is unmodified. In some embodiments, a nucleotide where a clash with another 2′-OH in the gRNA is predicted if a 2′-OH is replaced with a 2′-OMe in the Cas9-gRNA complex is unmodified. In some embodiments, the Cas9-gRNA complex is a pre-catalytic ternary complex. In some embodiments, a nucleotide that is solvent-exposed or otherwise distant from Cas protein residues in the Cas9-gRNA complex comprises a chemical modification. In some embodiments, a nucleotide that is solvent-exposed or otherwise distant from another nucleotide in the gRNA in the Cas9-gRNA complex comprises a chemical modification. In some embodiments, the chemical modification is a 2′-OMe modification. Additional description of Cas9-gRNA crystal structure is included in Jiang F, Taylor D W, Chen J S, Kornfeld J E, Zhou K, Thompson AJ, Nogales E, Doudna JA. Structures of a CRISPR-Cas9 R-loop complex primed for DNA cleavage. Science. 2016 Feb. 19;351 (6275): 867-71, incorporated herein by reference in its entirety.

[0313] Modifications to guide RNA nucleotides can include, but are not limited to, 2′-O-methyl modifications, 2′-O-(2-methoxyethyl) modifications, 2′-fluoro modifications, phosphorothioate modifications, inverted abasic modifications, deoxyribonucleotides, bicylic ribose analog (e.g., locked nucleic acid (LNA), C-ethylene-bridged nucleic acid (ENA), bridged nucleic acid (BNA), unlocked nucleic acid (UNA)), base or nucleobase modifications, internucleoside linkage modifications, ribonebularine, 2′-O-methylnebularine, or 2′-deoxynebularine. Other examples of modifications include, but are not limited to, 5′adenylate, 5′ guanosine-triphosphate cap, 5′N7-Methylguanosine-triphosphate cap, 5′triphosphate cap, 3′phosphate, 3′thiophosphate, 5′phosphate, 5′thiophosphate, Cis-Syn thymidine dimer, trimers, C12 spacer, C3 spacer, C6 spacer, dSpacer, PC spacer, rSpacer, Spacer 18, Spacer 9,3′-3′ modifications, 5′-5′ modifications, abasic, acridine, azobenzene, biotin, biotin BB, biotin TEG, cholesteryl TEG, desthiobiotin TEG, DNP TEG, DNP-X, DOTA, dT-Biotin, dual biotin, PC biotin, psoralen C2, psoralen C6, TINA, 3′DABCYL, black hole quencher 1, black hole quencer 2, DABCYL SE, dT-DABCYL, IRDye QC-1, QSY-21, QSY-35, QSY-7, QSY-9, carboxyl linker, thiol linkers, 2′deoxyribonucleoside analog purine, 2′deoxyribonucleoside analog pyrimidine, ribonucleoside analog, 2′-O-methyl ribonucleoside analog, sugar modified analogs, wobble/universal bases, fluorescent dye label, 2′fluoro RNA, 2′O-methyl RNA, methylphosphonate, phosphodiester DNA, phosphodiester RNA, phosphothioate DNA, phosphorothioate RNA, UNA, pseudouridine-5′-triphosphate, 5-methylcytidine-5′-triphosphate, 2-O-methyl 3phosphorothioate or any combinations thereof.

[0314] In some embodiments, the ribose group (or sugar) may be modified. In some embodiments, modified ribose group may control oligonucleotide binding affinity for complementary strands, duplex formation, or interaction with nucleases. Examples of chemical modifications to the ribose group include, but are not limited to, 2′-O-methyl (2′-OMe), 2′-fluoro (2′-F), 2′-deoxy, 2′-O-(2-methoxyethyl) (2′-MOE), 2′—NH2, 2′—O-Allyl, 2′-O-Ethylamine, 2′-O-Cyanoethyl, 2′-O-Acetalester, or a bicyclic nucleotide such as locked nucleic acid (LNA), 2′-(5-constrained ethyl (S-cEt)), constrained MOE, or 2′-0,4′-C-aminomethylene bridged nucleic acid (2′,4′-BNANC). In some embodiments, 2′-O-methyl modification can increase binding affinity of oligonucleotides. In some embodiments, 2′-O-methyl modification can enhance nuclease stability of oligonucleotides. In some embodiments, 2′-fluoro modification can increase oligonucleotide binding affinity and nuclease stability. In this application, a ribonucleotide in lowercase in gRNA sequence depicts 2′-OMe modification (e.g., Table 1 or Table 24) (lowercase letter s indicates a phosphorothioate linkage).

[0315] In some embodiments, the phosphate group may be chemically modified. Examples of chemical modifications to the phosphate group includes, but are not limited to, a phosphorothioate (PS), phosphonoacetate (PACE), thiophosphonoacetate (thioPACE), amide, triazole, phosphonate, or phosphotriester modification. In some embodiments, PS linkage can refer to a bond where a sulfur is substituted for one nonbridging phosphate oxygen in a phosphodiester linkage, e.g., between nucleotides. An “s” may be used to depict a PS modification in gRNA sequences in this application (e.g., Table 1 or Table 24). In some embodiments, a gRNA or an sgRNA may comprise a phosphorothioate (PS) linkage at a 5′ end or at a 3′ end. In some embodiments, a gRNA or an sgRNA may comprise a phosphorothioate (PS) linkage at a 5′ end. In some embodiments, a gRNA or an sgRNA may comprise a phosphorothioate (PS) linkage at a 3′ end. In some embodiments, a gRNA or an sgRNA may comprise a phosphorothioate (PS) linkage at a 5′ end and at a 3′ end. In some embodiments, a gRNA or an sgRNA may comprise one, two, or three, or more than three phosphorothioate linkages at the 5′ end or at the 3′ end. In some embodiments, a gRNA or an sgRNA may comprise three phosphorothioate (PS) linkages at the 5′ end or at the 3′ end. In some embodiments, a gRNA or an sgRNA may comprise three phosphorothioate linkages at the 3′ end. In some embodiments, a gRNA or an sgRNA may comprise two and no more than two (i.e., only two) contiguous phosphorothioate (PS) linkages at the 5′ end or at the 3′ end. In some embodiments, a gRNA or an sgRNA may comprise three contiguous phosphorothioate (PS) linkages at the 5′ end or at the 3′ end. In some embodiments, a gRNA or an sgRNA may comprise the sequence 5′-UsUsU-3′ at the 3′end or at the 5′ end, wherein U indicates a uridine and wherein s indicates a phosphorothioate (PS) linkage. In some embodiments, a gRNA or an sgRNA may comprise the sequence 5′-ususu-3′ at the 3′end or at the 5′ end, wherein u indicates a 2′-O-methyluridine and wherein s indicates a phosphorothioate (PS) linkage. In some embodiments, a gRNA or an sgRNA may comprise the sequence 5′-ususuUUU-3′ at the 3′end or at the 5′ end, wherein U and u indicate uridine and 2′-O-methyluridine respectively, and wherein s indicates a phosphorothioate (PS) linkage. In some embodiments, a gRNA or an sgRNA may comprise the sequence 5′-ususuUuU-3′ at the 3′end or at the 5′ end, wherein U and u indicate uridine and 2′-O-methyluridine respectively, and wherein s indicates a phosphorothioate (PS) linkage. In some embodiments, a gRNA or an sgRNA may comprise the sequence 5′-usususuUuU-3′ at the 3′end, wherein U and u indicate uridine and 2′-O-methyluridine respectively, and wherein s indicates a phosphorothioate (PS) linkage. In some embodiments, a gRNA or an sgRNA may comprise the sequence 5′-ususuuuu-3′ at the 3′end, wherein u indicates 2′-O-methyluridine, and wherein s indicates a phosphorothioate (PS) linkage.

[0316] In some embodiments, the nucleobase may be chemically modified. Examples of chemical modifications to the nucleobase include, but are not limited to, 2-thiouridine, 4-thiouridine, N6-methyladenosine, pseudouridine, 2,6-diaminopurine, inosine, thymidine, 5-methylcytosine, 5-substituted pyrimidine, isoguanine, isocytosine, or halogenated aromatic groups.

[0317] In some embodiments the chemically modified gRNAs comprise nebularine. Nebularine is a purine ribonucleoside that is derived from a beta-D-ribose and is 9H-purine attached to a beta-D-ribofuranosyl residue at position 9 via a glycosidic (N-glycosyl) linkage. Nebularine is a purine ribonucleoside with no exocyclic functional moiety or substitution. In some embodiments, it is a purine ribonucleoside. In some embodiments, it is a purine D-ribonucleoside. In some embodiments, nebularine is further modified chemically. In this application, “X,” “x,” and “dX” may be used to depict a ribonebularine modification, a 2′-O-methylnebularine modification, and a 2′-deoxynebularine modification, respectively, in gRNA sequences (e.g., Table 1 or Table 24). In some embodiments, substitution of a nucleotide (e.g., A) of a gRNA sequence (e.g., spacer region or tracr region) with nebularine may reduce off-target effects without affecting the gRNA activity. In some embodiments, the nebularine, the deoxynebularine, or 2′-O-methylnebularine replaces an adenine in an unmodified gRNA or sgRNA. In some embodiments, the nebularine, the deoxynebularine, or 2′-O-methylnebularine is in the spacer sequence. In some embodiments, the nebularine, the deoxynebularine, or 2′-O-methylnebularine is in the tracrRNA sequence. In some embodiments, the nebularine, the deoxynebularine, or 2′-O-methylnebularine is in a tracrRNA sequence in the tracrRNA sequence. In some embodiments, the nebularine, the deoxynebularine, or 2′-O-methylnebularine is in a crRNA sequence in the tracrRNA sequence. In some embodiments, the nebularine, the deoxynebularine, or 2′-O-methylnebularine is in a stem loop structure in the tracrRNA sequence.

[0318] In some embodiments, the chemically modified gRNAs may comprise a total of 50-150 base pairs in length. In some embodiments, the chemically modified gRNAs may comprise a total of 50, 51, 52, 53, 54, 55, 56, 57, 58, 59, 60, 61, 62, 63, 64, 65, 66, 67, 68, 69, 70, 71, 72, 73, 74, 75, 76, 77, 78, 79, 80, 81, 82, 83, 84, 85, 86, 87, 88, 89, 90, 91, 92, 93, 94, 95, 96, 97, 98, 99, 100, 101, 102, 103, 104, 105, 106, 107, 108, 109, 110, 111, 112, 113, 114, 115, 116, 117, 118, 119, 120, 121, 122, 123, 124, 125, 126, 127, 128, 129, 130, 131, 132, 133, 134, 135, 136, 137, 138, 139, 140, 141, 142, 143, 144, 145, 146, 147, 148, 149, or 150 base pairs in length. In some embodiments, the chemically modified gRNAs may comprise a total of about 50 to about 140 base pairs in length. In some embodiments, the chemically modified gRNAs may comprise a total of about 50 to about 60, about 50 to about 70, about 50 to about 80, about 50 to about 90, about 50 to about 100, about 50 to about 110, about 50 to about 120, about 50 to about 130, about 50 to about 140, about 60 to about 70, about 60 to about 80, about 60 to about 90, about 60 to about 100, about 60 to about 110, about 60 to about 120, about 60 to about 130, about 60 to about 140, about 70 to about 80, about 70 to about 90, about 70 to about 100, about 70 to about 110, about 70 to about 120, about 70 to about 130, about 70 to about 140, about 80 to about 90, about 80 to about 100, about 80 to about 110, about 80 to about 120, about 80 to about 130, about 80 to about 140, about 90 to about 100, about 90 to about 110, about 90 to about 120, about 90 to about 130, about 90 to about 140, about 100 to about 110, about 100 to about 120, about 100 to about 130, about 100 to about 140, about 110 to about 120, about 110 to about 130, about 110 to about 140, about 120 to about 130, about 120 to about 140, or about 130 to about 140 base pairs in length. In some embodiments, the chemically modified gRNAs may comprise a total of about 50, about 60, about 70, about 80, about 90, about 100, about 110, about 120, about 130, or about 140 base pairs in length. In some embodiments, the chemically modified gRNAs may comprise a total of at least about 50, about 60, about 70, about 80, about 90, about 100, about 110, about 120, or about 130 base pairs in length. In some embodiments, the chemically modified gRNAs may comprise a total of at most about 60, about 70, about 80, about 90, about 100, about 110, about 120, about 130, or about 140 base pairs in length. In one embodiment, the chemically modified gRNAs may comprise a total of 100 base pairs in length. In another embodiment, the chemically modified gRNAs may comprise a total of 103 base pairs in length.

[0319] In some embodiments, the chemically modified gRNAs may comprise from 1 to 150 chemically modified nucleotides. In some embodiments, the chemically modified gRNAs may comprise a total of 1, 2, 3, 4, 5, 6, 7, 8, 9, 10, 11, 12, 13, 14, 15, 16, 17, 18, 19, 20, 21, 22, 23, 24, 25, 26, 27, 28, 29, 30, 31, 32, 33, 34, 35, 36, 37, 38, 39, 40, 41, 42, 43, 44, 45, 46, 47, 48, 49, 50, 51, 52, 53, 54, 55, 56, 57, 58, 59, 60, 61, 62, 63, 64, 65, 66, 67, 68, 69, 70, 71, 72, 73, 74, 75, 76, 77, 78, 79, 80, 81, 82, 83, 84, 85, 86, 87, 88, 89, 90, 91, 92, 93, 94, 95, 96, 97, 98, 99, 100, 101, 102, 103, 104, 105, 106, 107, 108, 109, 110, 111, 112, 113, 114, 115, 116, 117, 118, 119, 120, 121, 122, 123, 124, 125, 126, 127, 128, 129, 130, 131, 132, 133, 134, 135, 136, 137, 138, 139, 140, 141, 142, 143, 144, 145, 146, 147, 148, 149, or 150 chemically modified nucleotides. In some embodiments, the chemically modified gRNAs may comprise a total of about 1 to about 45 chemically modified nucleotides. In some embodiments, the chemically modified gRNAs may comprise a total of about 1 to about 3, about 1 to about 5, about 1 to about 10, about 1 to about 15, about 1 to about 20, about 1 to about 25, about 1 to about 30, about 1 to about 35, about 1 to about 40, about 1 to about 45, about 3 to about 5, about 3 to about 10, about 3 to about 15, about 3 to about 20, about 3 to about 25, about 3 to about 30, about 3 to about 35, about 3 to about 40, about 3 to about 45, about 5 to about 10, about 5 to about 15, about 5 to about 20, about 5 to about 25, about 5 to about 30, about 5 to about 35, about 5 to about 40, about 5 to about 45, about 10 to about 15, about 10 to about 20, about 10 to about 25, about 10 to about 30, about 10 to about 35, about 10 to about 40, about 10 to about 45, about 15 to about 20, about 15 to about 25, about 15 to about 30, about 15 to about 35, about 15 to about 40, about 15 to about 45, about 20 to about 25, about 20 to about 30, about 20 to about 35, about 20 to about 40, about 20 to about 45, about 25 to about 30, about 25 to about 35, about 25 to about 40, about 25 to about 45, about 30 to about 35, about 30 to about 40, about 30 to about 45, about 35 to about 40, about 35 to about 45, about 40 to about 45, or about 45 to about 50 chemically modified nucleotides. In some embodiments, the chemically modified gRNAs may comprise a total of about 1, about 3, about 5, about 10, about 15, about 20, about 25, about 30, about 35, about 40, about 45, or about 50 chemically modified nucleotides. In some embodiments, the chemically modified gRNAs may comprise a total of at least about 1, about 3, about 5, about 10, about 15, about 20, about 25, about 30, about 35, about 40, about 45, or about 50 chemically modified nucleotides. In some embodiments, the chemically modified gRNAs may comprise a total of at most about 3, about 5, about 10, about 15, about 20, about 25, about 30, about 35, about 40, about 45, or about 50 chemically modified nucleotides. In some embodiments, the chemically modified gRNAs may comprise a total of about 50 to about 140 chemically modified nucleotides. In some embodiments, the chemically modified gRNAs may comprise a total of about 50 to about 60, about 50 to about 70, about 50 to about 80, about 50 to about 90, about 50 to about 100, about 50 to about 110, about 50 to about 120, about 50 to about 130, about 50 to about 140, about 60 to about 70, about 60 to about 80, about 60 to about 90, about 60 to about 100, about 60 to about 110, about 60 to about 120, about 60 to about 130, about 60 to about 140, about 70 to about 80, about 70 to about 90, about 70 to about 100, about 70 to about 110, about 70 to about 120, about 70 to about 130, about 70 to about 140, about 80 to about 90, about 80 to about 100, about 80 to about 110, about 80 to about 120, about 80 to about 130, about 80 to about 140, about 90 to about 100, about 90 to about 110, about 90 to about 120, about 90 to about 130, about 90 to about 140, about 100 to about 110, about 100 to about 120, about 100 to about 130, about 100 to about 140, about 110 to about 120, about 110 to about 130, about 110 to about 140, about 120 to about 130, about 120 to about 140, or about 130 to about 140 chemically modified nucleotides. In some embodiments, the chemically modified gRNAs may comprise a total of about 50, about 60, about 70, about 80, about 90, about 100, about 110, about 120, about 130, or about 140 chemically modified nucleotides. In some embodiments, the chemically modified gRNAs may comprise a total of at least about 50, about 60, about 70, about 80, about 90, about 100, about 110, about 120, or about 130 chemically modified nucleotides. In some embodiments, the chemically modified gRNAs may comprise a total of at most about 60, about 70, about 80, about 90, about 100, about 110, about 120, about 130, or about 140 chemically modified nucleotides. In one embodiment, the chemically modified gRNAs may comprise a total of 54 chemically modified nucleotides. In another embodiment, the chemically modified gRNAs may comprise a total of 62 chemically modified nucleotides.

[0320] In some embodiments, the chemically modified gRNAs may comprise about 1% to about 100% chemically modified nucleotides. In some embodiments, the chemically modified gRNAs may comprise about 1% to about 10%, about 1% to about 20%, about 1% to about 30%, about 1% to about 40%, about 1% to about 50%, about 1% to about 60%, about 1% to about 70%, about 1% to about 80%, about 1% to about 90%, about 1% to about 95%, about 1% to about 100%, about 10% to about 20%, about 10% to about 30%, about 10% to about 40%, about 10% to about 50%, about 10% to about 60%, about 10% to about 70%, about 10% to about 80%, about 10% to about 90%, about 10% to about 95%, about 10% to about 100%, about 20% to about 30%, about 20% to about 40%, about 20% to about 50%, about 20% to about 60%, about 20% to about 70%, about 20% to about 80%, about 20% to about 90%, about 20% to about 95%, about 20% to about 100%, about 30% to about 40%, about 30% to about 50%, about 30% to about 60%, about 30% to about 70%, about 30% to about 80%, about 30% to about 90%, about 30% to about 95%, about 30% to about 100%, about 40% to about 50%, about 40% to about 60%, about 40% to about 70%, about 40% to about 80%, about 40% to about 90%, about 40% to about 95%, about 40% to about 100%, about 50% to about 60%, about 50% to about 70%, about 50% to about 80%, about 50% to about 90%, about 50% to about 95%, about 50% to about 100%, about 60% to about 70%, about 60% to about 80%, about 60% to about 90%, about 60% to about 95%, about 60% to about 100%, about 70% to about 80%, about 70% to about 90%, about 70% to about 95%, about 70% to about 100%, about 80% to about 90%, about 80% to about 95%, about 80% to about 100%, about 90% to about 95%, about 90% to about 100%, or about 95% to about 100% chemically modified nucleotides. In some embodiments, the chemically modified gRNAs may comprise about 1%, about 10%, about 20%, about 30%, about 40%, about 50%, about 60%, about 70%, about 80%, about 90%, about 95%, or about 100% chemically modified nucleotides. In some embodiments, the chemically modified gRNAs may comprise at least about 1%, about 10%, about 20%, about 30%, about 40%, about 50%, about 60%, about 70%, about 80%, about 90%, or about 95% chemically modified nucleotides. In some embodiments, the chemically modified gRNAs may comprise at most about 10%, about 20%, about 30%, about 40%, about 50%, about 60%, about 70%, about 80%, about 90%, about 95%, or about 100% chemically modified nucleotides.

[0321] In some embodiments, the chemically modified gRNAs may have chemically modified nucleotide on one or more of the positions 1, 2, 3, 4, 5, 6, 7, 8, 9, 10, 11, 12, 13, 14, 15, 16, 17, 18, 19, 20, 21, 22, 23, 24, 25, 26, 27, 28, 29, 30, 31, 32, 33, 34, 35, 36, 37, 38, 39, 40, 41, 42, 43, 44, 45, 46, 47, 48, 49, 50, 51, 52, 53, 54, 55, 56, 57, 58, 59, 60, 61, 62, 63, 64, 65, 66, 67, 68, 69, 70, 71, 72, 73, 74, 75, 76, 77, 78, 79, 80, 81, 82, 83, 84, 85, 86, 87, 88, 89, 90, 91, 92, 93, 94, 95, 96, 97, 98, 99, 100, 101, 102, 103, 104, 105, 106, 107, 108, 109, 110, 111, 112, 113, 114, 115, 116, 117, 118, 119, 120, 121, 122, 123, 124, 125, 126, 127, 128, 129, 130, 131, 132, 133, 134, 135, 136, 137, 138, 139, 140, 141, 142, 143, 144, 145, 146, 147, 148, 149, or 150 in the 5′-3′ direction in the gRNA sequence.

[0322] In some embodiments, the chemically modified gRNAs may have chemically modified nucleotide on one or more of the positions which are 1, 2, 3, 4, 5, 6, 7, 8, 9, 10, 11, 12, 13, 14, 15, 16, 17, 18, 19, 20, 21, 22, 23, 24, 25, 26, 27, 28, 29, 30, 31, 32, 33, 34, 35, 36, 37, 38, 39, 40, 41, 42, 43, 44, 45, 46, 47, 48, 49, 50, 51, 52, 53, 54, 55, 56, 57, 58, 59, 60, 61, 62, 63, 64, 65, 66, 67, 68, 69, 70, 71, 72, 73, 74, 75, 76, 77, 78, 79, 80, 81, 82, 83, 84, 85, 86, 87, 88, 89, 90, 91, 92, 93, 94, 95, 96, 97, 98, 99, 100, 101, 102, 103, 104, 105, 106, 107, 108, 109, 110, 111, 112, 113, 114, 115, 116, 117, 118, 119, 120, 121, 122, 123, 124, 125, 126, 127, 128, 129, 130, 131, 132, 133, 134, 135, 136, 137, 138, 139, 140, 141, 142, 143, 144, 145, 146, 147, 148, or 149 base pairs from the 5′ end of the gRNA sequence.

[0323] In some embodiments, the chemically modified gRNAs may have chemically modified nucleotide on one or more the positions where are 1, 2, 3, 4, 5, 6, 7, 8, 9, 10, 11, 12, 13, 14, 15, 16, 17, 18, 19, 20, 21, 22, 23, 24, 25, 26, 27, 28, 29, 30, 31, 32, 33, 34, 35, 36, 37, 38, 39, 40, 41, 42, 43, 44, 45, 46, 47, 48, 49, 50, 51, 52, 53, 54, 55, 56, 57, 58, 59, 60, 61, 62, 63, 64, 65, 66, 67, 68, 69, 70, 71, 72, 73, 74, 75, 76, 77, 78, 79, 80, 81, 82, 83, 84, 85, 86, 87, 88, 89, 90, 91, 92, 93, 94, 95, 96, 97, 98, 99, 100, 101, 102, 103, 104, 105, 106, 107, 108, 109, 110, 111, 112, 113, 114, 115, 116, 117, 118, 119, 120, 121, 122, 123, 124, 125, 126, 127, 128, 129, 130, 131, 132, 133, 134, 135, 136, 137, 138, 139, 140, 141, 142, 143, 144, 145, 146, 147, 148, or 149 base pairs from the 3′ end of the gRNA sequence.

[0324] In some embodiments, the chemically modified gRNA may be a sgRNA. The term “gRNA” and “sgRNA” are used interchangeably in this application. In some embodiments, the sgRNA may comprise one or more chemically modified nucleotides. In some embodiments, the chemically modified sgRNA may comprise a total of 50-150 base pairs in length. In some embodiments, the chemically modified sgRNA may comprise a total of 50, 51, 52, 53, 54, 55, 56, 57, 58, 59, 60, 61, 62, 63, 64, 65, 66, 67, 68, 69, 70, 71, 72, 73, 74, 75, 76, 77, 78, 79, 80, 81, 82, 83, 84, 85, 86, 87, 88, 89, 90, 91, 92, 93, 94, 95, 96, 97, 98, 99, 100, 101, 102, 103, 104, 105, 106, 107, 108, 109, 110, 111, 112, 113, 114, 115, 116, 117, 118, 119, 120, 121, 122, 123, 124, 125, 126, 127, 128, 129, 130, 131, 132, 133, 134, 135, 136, 137, 138, 139, 140, 141, 142, 143, 144, 145, 146, 147, 148, 149, or 150 base pairs in length. In some embodiments, the chemically modified sgRNA may comprise a total of about 50 to about 140 base pairs in length. In some embodiments, the chemically modified sgRNA may comprise a total of about 50 to about 60, about 50 to about 70, about 50 to about 80, about 50 to about 90, about 50 to about 100, about 50 to about 110, about 50 to about 120, about 50 to about 130, about 50 to about 140, about 60 to about 70, about 60 to about 80, about 60 to about 90, about 60 to about 100, about 60 to about 110, about 60 to about 120, about 60 to about 130, about 60 to about 140, about 70 to about 80, about 70 to about 90, about 70 to about 100, about 70 to about 110, about 70 to about 120, about 70 to about 130, about 70 to about 140, about 80 to about 90, about 80 to about 100, about 80 to about 110, about 80 to about 120, about 80 to about 130, about 80 to about 140, about 90 to about 100, about 90 to about 110, about 90 to about 120, about 90 to about 130, about 90 to about 140, about 100 to about 110, about 100 to about 120, about 100 to about 130, about 100 to about 140, about 110 to about 120, about 110 to about 130, about 110 to about 140, about 120 to about 130, about 120 to about 140, or about 130 to about 140 base pairs in length. In some embodiments, the chemically modified sgRNAs may comprise a total of about 50, about 60, about 70, about 80, about 90, about 100, about 110, about 120, about 130, or about 140 base pairs in length. In some embodiments, the chemically modified sgRNAs may comprise a total of at least about 50, about 60, about 70, about 80, about 90, about 100, about 110, about 120, or about 130 base pairs in length. In some embodiments, the chemically modified sgRNA may comprise a total of at most about 60, about 70, about 80, about 90, about 100, about 110, about 120, about 130, or about 140 base pairs in length. In one embodiment, the chemically modified sgRNA may comprise a total of 100 base pairs in length. In another embodiment, the chemically modified sgRNA may comprise a total of 103 base pairs in length.

[0325] In some embodiments, the chemically modified sgRNAs may comprise a total of from 1 to 150 chemically modified nucleotides. In some embodiments, the chemically modified sgRNAs may comprise a total of 1, 2, 3, 4, 5, 6, 7, 8, 9, 10, 11, 12, 13, 14, 15, 16, 17, 18, 19, 20, 21, 22, 23, 24, 25, 26, 27, 28, 29, 30, 31, 32, 33, 34, 35, 36, 37, 38, 39, 40, 41, 42, 43, 44, 45, 46, 47, 48, 49, 50, 51, 52, 53, 54, 55, 56, 57, 58, 59, 60, 61, 62, 63, 64, 65, 66, 67, 68, 69, 70, 71, 72, 73, 74, 75, 76, 77, 78, 79, 80, 81, 82, 83, 84, 85, 86, 87, 88, 89, 90, 91, 92, 93, 94, 95, 96, 97, 98, 99, 100, 101, 102, 103, 104, 105, 106, 107, 108, 109, 110, 111, 112, 113, 114, 115, 116, 117, 118, 119, 120, 121, 122, 123, 124, 125, 126, 127, 128, 129, 130, 131, 132, 133, 134, 135, 136, 137, 138, 139, 140, 141, 142, 143, 144, 145, 146, 147, 148, 149, or 150 chemically modified nucleotides. In some embodiments, the chemically modified sgRNAs may comprise a total of about 1 to about 45 chemically modified nucleotides. In some embodiments, the chemically modified sgRNAs may comprise a total of about 1 to about 3, about 1 to about 5, about 1 to about 10, about 1 to about 15, about 1 to about 20, about 1 to about 25, about 1 to about 30, about 1 to about 35, about 1 to about 40, about 1 to about 45, about 3 to about 5, about 3 to about 10, about 3 to about 15, about 3 to about 20, about 3 to about 25, about 3 to about 30, about 3 to about 35, about 3 to about 40, about 3 to about 45, about 5 to about 10, about 5 to about 15, about 5 to about 20, about 5 to about 25, about 5 to about 30, about 5 to about 35, about 5 to about 40, about 5 to about 45, about 10 to about 15, about 10 to about 20, about 10 to about 25, about 10 to about 30, about 10 to about 35, about 10 to about 40, about 10 to about 45, about 15 to about 20, about 15 to about 25, about 15 to about 30, about 15 to about 35, about 15 to about 40, about 15 to about 45, about 20 to about 25, about 20 to about 30, about 20 to about 35, about 20 to about 40, about 20 to about 45, about 25 to about 30, about 25 to about 35, about 25 to about 40, about 25 to about 45, about 30 to about 35, about 30 to about 40, about 30 to about 45, about 35 to about 40, about 35 to about 45, about 40 to about 45, or about 45 to about 50 chemically modified nucleotides. In some embodiments, the chemically modified sgRNAs may comprise a total of about 1, about 3, about 5, about 10, about 15, about 20, about 25, about 30, about 35, about 40, about 45, or about 50 chemically modified nucleotides. In some embodiments, the chemically modified sgRNAs may comprise a total of at least about 1, about 3, about 5, about 10, about 15, about 20, about 25, about 30, about 35, about 40, about 45, or about 50 chemically modified nucleotides. In some embodiments, the chemically modified sgRNAs may comprise a total of at most about 3, about 5, about 10, about 15, about 20, about 25, about 30, about 35, about 40, about 45, or about 50 chemically modified nucleotides. In some embodiments, the chemically modified sgRNAs may comprise a total of about 50 to about 140 chemically modified nucleotides. In some embodiments, the chemically modified sgRNAs may comprise a total of about 50 to about 60, about 50 to about 70, about 50 to about 80, about 50 to about 90, about 50 to about 100, about 50 to about 110, about 50 to about 120, about 50 to about 130, about 50 to about 140, about 60 to about 70, about 60 to about 80, about 60 to about 90, about 60 to about 100, about 60 to about 110, about 60 to about 120, about 60 to about 130, about 60 to about 140, about 70 to about 80, about 70 to about 90, about 70 to about 100, about 70 to about 110, about 70 to about 120, about 70 to about 130, about 70 to about 140, about 80 to about 90, about 80 to about 100, about 80 to about 110, about 80 to about 120, about 80 to about 130, about 80 to about 140, about 90 to about 100, about 90 to about 110, about 90 to about 120, about 90 to about 130, about 90 to about 140, about 100 to about 110, about 100 to about 120, about 100 to about 130, about 100 to about 140, about 110 to about 120, about 110 to about 130, about 110 to about 140, about 120 to about 130, about 120 to about 140, or about 130 to about 140 chemically modified nucleotides. In some embodiments, the chemically modified sgRNAs may comprise a total of about 50, about 60, about 70, about 80, about 90, about 100, about 110, about 120, about 130, or about 140 chemically modified nucleotides. In some embodiments, the chemically modified sgRNAs may comprise a total of at least about 50, about 60, about 70, about 80, about 90, about 100, about 110, about 120, or about 130 chemically modified nucleotides. In some embodiments, the chemically modified sgRNAs may comprise a total of at most about 60, about 70, about 80, about 90, about 100, about 110, about 120, about 130, or about 140 chemically modified nucleotides. In one embodiment, the chemically modified sgRNAs may comprise a total of 54 chemically modified nucleotides. In another embodiment, the chemically modified sgRNAs may comprise a total of 62 chemically modified nucleotides.

[0326] In some embodiments, the chemically modified sgRNAs may comprise about 1% to about 100% chemically modified nucleotides. In some embodiments, the chemically modified sgRNAs may comprise about 1% to about 10%, about 1% to about 20%, about 1% to about 30%, about 1% to about 40%, about 1% to about 50%, about 1% to about 60%, about 1% to about 70%, about 1% to about 80%, about 1% to about 90%, about 1% to about 95%, about 1% to about 100%, about 10% to about 20%, about 10% to about 30%, about 10% to about 40%, about 10% to about 50%, about 10% to about 60%, about 10% to about 70%, about 10% to about 80%, about 10% to about 90%, about 10% to about 95%, about 10% to about 100%, about 20% to about 30%, about 20% to about 40%, about 20% to about 50%, about 20% to about 60%, about 20% to about 70%, about 20% to about 80%, about 20% to about 90%, about 20% to about 95%, about 20% to about 100%, about 30% to about 40%, about 30% to about 50%, about 30% to about 60%, about 30% to about 70%, about 30% to about 80%, about 30% to about 90%, about 30% to about 95%, about 30% to about 100%, about 40% to about 50%, about 40% to about 60%, about 40% to about 70%, about 40% to about 80%, about 40% to about 90%, about 40% to about 95%, about 40% to about 100%, about 50% to about 60%, about 50% to about 70%, about 50% to about 80%, about 50% to about 90%, about 50% to about 95%, about 50% to about 100%, about 60% to about 70%, about 60% to about 80%, about 60% to about 90%, about 60% to about 95%, about 60% to about 100%, about 70% to about 80%, about 70% to about 90%, about 70% to about 95%, about 70% to about 100%, about 80% to about 90%, about 80% to about 95%, about 80% to about 100%, about 90% to about 95%, about 90% to about 100%, or about 95% to about 100% chemically modified nucleotides. In some embodiments, the chemically modified sgRNAs may comprise about 1%, about 10%, about 20%, about 30%, about 40%, about 50%, about 60%, about 70%, about 80%, about 90%, about 95%, or about 100% chemically modified nucleotides. In some embodiments, the chemically modified sgRNAs may comprise at least about 1%, about 10%, about 20%, about 30%, about 40%, about 50%, about 60%, about 70%, about 80%, about 90%, or about 95% chemically modified nucleotides. In some embodiments, the chemically modified sgRNAs may comprise at most about 10%, about 20%, about 30%, about 40%, about 50%, about 60%, about 70%, about 80%, about 90%, about 95%, or about 100% chemically modified nucleotides.

[0327] In some embodiments, the chemically modified sgRNAs may have chemically modified nucleotide on one or more of the positions 1, 2, 3, 4, 5, 6, 7, 8, 9, 10, 11, 12, 13, 14, 15, 16, 17, 18, 19, 20, 21, 22, 23, 24, 25, 26, 27, 28, 29, 30, 31, 32, 33, 34, 35, 36, 37, 38, 39, 40, 41, 42, 43, 44, 45, 46, 47, 48, 49, 50, 51, 52, 53, 54, 55, 56, 57, 58, 59, 60, 61, 62, 63, 64, 65, 66, 67, 68, 69, 70, 71, 72, 73, 74, 75, 76, 77, 78, 79, 80, 81, 82, 83, 84, 85, 86, 87, 88, 89, 90, 91, 92, 93, 94, 95, 96, 97, 98, 99, 100, 101, 102, 103, 104, 105, 106, 107, 108, 109, 110, 111, 112, 113, 114, 115, 116, 117, 118, 119, 120, 121, 122, 123, 124, 125, 126, 127, 128, 129, 130, 131, 132, 133, 134, 135, 136, 137, 138, 139, 140, 141, 142, 143, 144, 145, 146, 147, 148, 149, or 150 in the 5′-3′ direction in the sgRNA sequence.

[0328] In some embodiments, the chemically modified sgRNAs may have chemically modified nucleotide on one or more of the positions 1, 2, 3, 4, 5, 6, 7, 8, 9, 10, 11, 12, 13, 14, 15, 16, 17, 18, 19, 20, 21, 22, 23, 24, 25, 26, 27, 28, 29, 30, 31, 32, 33, 34, 35, 36, 37, 38, 39, 40, 41, 42, 43, 44, 45, 46, 47, 48, 49, 50, 51, 52, 53, 54, 55, 56, 57, 58, 59, 60, 61, 62, 63, 64, 65, 66, 67, 68, 69, 70, 71, 72, 73, 74, 75, 76, 77, 78, 79, 80, 81, 82, 83, 84, 85, 86, 87, 88, 89, 90, 91, 92, 93, 94, 95, 96, 97, 98, 99, 100, 101, 102, 103, 104, 105, 106, 107, 108, 109, 110, 111, 112, 113, 114, 115, 116, 117, 118, 119, 120, 121, 122, 123, 124, 125, 126, 127, 128, 129, 130, 131, 132, 133, 134, 135, 136, 137, 138, 139, 140, 141, 142, 143, 144, 145, 146, 147, 148, or 149 base pairs from the 5′ end of the sgRNA sequence.

[0329] In some embodiments, the chemically modified sgRNAs may have chemically modified nucleotide on one or more of the positions 1, 2, 3, 4, 5, 6, 7, 8, 9, 10, 11, 12, 13, 14, 15, 16, 17, 18, 19, 20, 21, 22, 23, 24, 25, 26, 27, 28, 29, 30, 31, 32, 33, 34, 35, 36, 37, 38, 39, 40, 41, 42, 43, 44, 45, 46, 47, 48, 49, 50, 51, 52, 53, 54, 55, 56, 57, 58, 59, 60, 61, 62, 63, 64, 65, 66, 67, 68, 69, 70, 71, 72, 73, 74, 75, 76, 77, 78, 79, 80, 81, 82, 83, 84, 85, 86, 87, 88, 89, 90, 91, 92, 93, 94, 95, 96, 97, 98, 99, 100, 101, 102, 103, 104, 105, 106, 107, 108, 109, 110, 111, 112, 113, 114, 115, 116, 117, 118, 119, 120, 121, 122, 123, 124, 125, 126, 127, 128, 129, 130, 131, 132, 133, 134, 135, 136, 137, 138, 139, 140, 141, 142, 143, 144, 145, 146, 147, 148, or 149 base pairs from the 3′ end of the sgRNA sequence.

[0330] In some embodiments, the chemically modified gRNAs or sgRNAs may have one or more chemical modifications in the spacer or protospacer region, i.e., the target sequence. In some embodiments, the chemically modified gRNAs or sgRNAs may comprise a spacer sequence of from 10 to 30 base pairs in length. In some embodiments, the chemically modified gRNAs or sgRNAs may comprise a spacer sequence of 10, 11, 12, 13, 14, 15, 16, 17, 18, 19, 20, 21, 22, 23, 24, 25, 26, 27, 28, 29, or 30 base pairs in length. In some embodiments, the chemically modified gRNAs or sgRNAs may comprise a spacer sequence of about 10 to about 30 base pairs in length. In some embodiments, the chemically modified gRNAs or sgRNAs may comprise a spacer sequence of about 10 to about 15, about 10 to about 20, about 10 to about 25, about 10 to about 30, about 15 to about 20, about 15 to about 25, about 15 to about 30, about 20 to about 25, about 20 to about 30, or about 25 to about 30 base pairs in length. In some embodiments, the chemically modified gRNAs or sgRNAs may comprise a spacer sequence of about 10, about 15, about 20, about 25, or about 30 base pairs in length. In some embodiments, the chemically modified gRNAs or sgRNAs may comprise a spacer sequence of at least about 10, about 15, about 20, or about 25 base pairs in length. In some embodiments, the chemically modified gRNAs or sgRNAs may comprise a spacer sequence of at most about 15, about 20, about 25, or about 30 base pairs in length. In one embodiment, the chemically modified gRNAs or sgRNAs may comprise a spacer sequence of 18 base pairs in length. In another embodiment, the chemically modified gRNAs or sgRNAs may comprise a spacer sequence of 22 base pairs in length. In a preferred embodiment, the chemically modified gRNAs or sgRNAs may comprise a spacer sequence of 20 base pairs in length.

[0331] In some embodiments, the spacer sequence may comprise a total of from 1 to 30 chemically modified nucleotides. In some embodiments, the spacer region may comprise a total of 1, 2, 3, 4, 5, 6, 7, 8, 9, 10, 11, 12, 13, 14, 15, 16, 17, 18, 19, 20, 21, 22, 23, 24, 25, 26, 27, 28, 29, or 30 chemically modified nucleotides. In some embodiments, the spacer sequence may comprise a total of about 1 to about 10 chemically modified nucleotides. In some embodiments, the spacer sequence may comprise a total of about 1 to about 2, about 1 to about 3, about 1 to about 4, about 1 to about 5, about 1 to about 6, about 1 to about 7, about 1 to about 8, about 1 to about 9, about 1 to about 10, about 2 to about 3, about 2 to about 4, about 2 to about 5, about 2 to about 6, about 2 to about 7, about 2 to about 8, about 2 to about 9, about 2 to about 10, about 3 to about 4, about 3 to about 5, about 3 to about 6, about 3 to about 7, about 3 to about 8, about 3 to about 9, about 3 to about 10, about 4 to about 5, about 4 to about 6, about 4 to about 7, about 4 to about 8, about 4 to about 9, about 4 to about 10, about 5 to about 6, about 5 to about 7, about 5 to about 8, about 5 to about 9, about 5 to about 10, about 6 to about 7, about 6 to about 8, about 6 to about 9, about 6 to about 10, about 7 to about 8, about 7 to about 9, about 7 to about 10, about 8 to about 9, about 8 to about 10, or about 9 to about 10 chemically modified nucleotides. In some embodiments, the spacer sequence may comprise a total of about 1, about 2, about 3, about 4, about 5, about 6, about 7, about 8, about 9, or about 10 chemically modified nucleotides. In some embodiments, the spacer sequence may comprise a total of at least about 1, about 2, about 3, about 4, about 5, about 6, about 7, about 8, or about 9 chemically modified nucleotides. In some embodiments, the spacer sequence may comprise a total of at most about 2, about 3, about 4, about 5, about 6, about 7, about 8, about 9, or about 10 chemically modified nucleotides. In some embodiments, the spacer sequence may comprise a total of about 10 to about 30 chemically modified nucleotides. In some embodiments, the spacer sequence may comprise a total of about 10 to about 15, about 10 to about 20, about 10 to about 25, about 10 to about 30, about 15 to about 20, about 15 to about 25, about 15 to about 30, about 20 to about 25, about 20 to about 30, or about 25 to about 30 chemically modified nucleotides. In some embodiments, the spacer sequence may comprise a total of about 10, about 15, about 20, about 25, or about 30 chemically modified nucleotides. In some embodiments, the spacer sequence may comprise a total of at least about 10, about 15, about 20, or about 25 chemically modified nucleotides. In some embodiments, the spacer sequence may comprise a total of at most about 15, about 20, about 25, or about 30 chemically modified nucleotides. In one embodiment, the spacer sequence may comprise a total of 3 chemically modified nucleotides. In another embodiment, the spacer sequence may comprise a total of 5 chemically modified nucleotides.

[0332] In some embodiments, the spacer sequence may comprise from 1% to 100% chemically modified nucleotides. In some embodiments, the spacer sequence may comprise about 1% to about 100% chemically modified nucleotides. In some embodiments, the spacer sequence may comprise about 1% to about 10%, about 1% to about 20%, about 1% to about 30%, about 1% to about 40%, about 1% to about 50%, about 1% to about 60%, about 1% to about 70%, about 1% to about 80%, about 1% to about 90%, about 1% to about 95%, about 1% to about 100%, about 10% to about 20%, about 10% to about 30%, about 10% to about 40%, about 10% to about 50%, about 10% to about 60%, about 10% to about 70%, about 10% to about 80%, about 10% to about 90%, about 10% to about 95%, about 10% to about 100%, about 20% to about 30%, about 20% to about 40%, about 20% to about 50%, about 20% to about 60%, about 20% to about 70%, about 20% to about 80%, about 20% to about 90%, about 20% to about 95%, about 20% to about 100%, about 30% to about 40%, about 30% to about 50%, about 30% to about 60%, about 30% to about 70%, about 30% to about 80%, about 30% to about 90%, about 30% to about 95%, about 30% to about 100%, about 40% to about 50%, about 40% to about 60%, about 40% to about 70%, about 40% to about 80%, about 40% to about 90%, about 40% to about 95%, about 40% to about 100%, about 50% to about 60%, about 50% to about 70%, about 50% to about 80%, about 50% to about 90%, about 50% to about 95%, about 50% to about 100%, about 60% to about 70%, about 60% to about 80%, about 60% to about 90%, about 60% to about 95%, about 60% to about 100%, about 70% to about 80%, about 70% to about 90%, about 70% to about 95%, about 70% to about 100%, about 80% to about 90%, about 80% to about 95%, about 80% to about 100%, about 90% to about 95%, about 90% to about 100%, or about 95% to about 100% chemically modified nucleotides. In some embodiments, the spacer sequence may comprise about 1%, about 10%, about 20%, about 30%, about 40%, about 50%, about 60%, about 70%, about 80%, about 90%, about 95%, or about 100% chemically modified nucleotides. In some embodiments, the spacer sequence may comprise at least about 1%, about 10%, about 20%, about 30%, about 40%, about 50%, about 60%, about 70%, about 80%, about 90%, or about 95% chemically modified nucleotides. In some embodiments, the spacer sequence may comprise at most about 10%, about 20%, about 30%, about 40%, about 50%, about 60%, about 70%, about 80%, about 90%, about 95%, or about 100% chemically modified nucleotides.

[0333] In some embodiments, the chemically modified spacer sequence may have chemically modified nucleotide on one or more of the positions 1, 2, 3, 4, 5, 6, 7, 8, 9, 10, 11, 12, 13, 14, 15, 16, 17, 18, 19, 20, 21, 22, 23, 24, 25, 26, 27, 28, 29, or 30 in the 5′-3′ direction in the spacer sequence.

[0334] In some embodiments, the chemically modified spacer region may have chemically modified nucleotide on one or more of the positions which are 1, 2, 3, 4, 5, 6, 7, 8, 9, 10, 11, 12, 13, 14, 15, 16, 17, 18, 19, 20, 21, 22, 23, 24, 25, 26, 27, 28, or 29 base pairs from the 5′ end of the spacer sequence.

[0335] In some embodiments, the chemically modified spacer region may have chemically modified nucleotide on one or more the positions which are 1, 2, 3, 4, 5, 6, 7, 8, 9, 10, 11, 12, 13, 14, 15, 16, 17, 18, 19, 20, 21, 22, 23, 24, 25, 26, 27, 28, or 29 base pairs from the 3′ end of the spacer sequence.

[0336] In some embodiments, the chemically modified gRNAs or sgRNAs may have one or more chemical modifications in the tracrRNA sequence. In some embodiments, the chemically modified gRNAs or sgRNAs may comprise a tracrRNA sequence of from 30 to 100 base pairs in length. In some embodiments, the chemically modified gRNAs or sgRNAs may comprise a tracrRNA sequence of 30, 31, 32, 33, 34, 35, 36, 37, 38, 39, 40, 41, 42, 43, 44, 45, 46, 47, 48, 49, 50, 51, 52, 53, 54, 55, 56, 57, 58, 59, 60, 61, 62, 63, 64, 65, 66, 67, 68, 69, 70, 71, 72, 73, 74, 75, 76, 77, 78, 79, 80, 81, 82, 83, 84, 85, 86, 87, 88, 89, 90, 91, 92, 93, 94, 95, 96, 97, 98, 99, 100, 101, 102, 103, 104, 105, 106, 107, 108, 109, 110, 111, 112, 113, 114, 115, 116, 117, 118, 119, 120, 121, 122, 123, 124, 125, 126, 127, 128, 129, or 130 base pairs in length. In some embodiments, the chemically modified gRNAs or sgRNAs may comprise a tracrRNA sequence of from about 30 to about 130 base pairs in length. In some embodiments, the chemically modified gRNAs or sgRNAs may comprise a tracrRNA sequence of from about 30 to about 40, about 30 to about 50, about 30 to about 60, about 30 to about 70, about 30 to about 75, about 30 to about 80, about 30 to about 90, about 30 to about 100, about 30 to about 110, about 30 to about 120, about 30 to about 130, about 40 to about 50, about 40 to about 60, about 40 to about 70, about 40 to about 75, about 40 to about 80, about 40 to about 90, about 40 to about 100, about 40 to about 110, about 40 to about 120, about 40 to about 130, about 50 to about 60, about 50 to about 70, about 50 to about 75, about 50 to about 80, about 50 to about 90, about 50 to about 100, about 50 to about 110, about 50 to about 120, about 50 to about 130, about 60 to about 70, about 60 to about 75, about 60 to about 80, about 60 to about 90, about 60 to about 100, about 60 to about 110, about 60 to about 120, about 60 to about 130, about 70 to about 75, about 70 to about 80, about 70 to about 90, about 70 to about 100, about 70 to about 110, about 70 to about 120, about 70 to about 130, about 75 to about 80, about 75 to about 90, about 75 to about 100, about 75 to about 110, about 75 to about 120, about 75 to about 130, about 80 to about 90, about 80 to about 100, about 80 to about 110, about 80 to about 120, about 80 to about 130, about 90 to about 100, about 90 to about 110, about 90 to about 120, about 90 to about 130, about 100 to about 110, about 100 to about 120, about 100 to about 130, about 110 to about 120, about 110 to about 130, or about 120 to about 130 base pairs in length. In some embodiments, the chemically modified gRNAs or sgRNAs may comprise a tracrRNA sequence of from about 30, about 40, about 50, about 60, about 70, about 75, about 80, about 90, about 100, about 110, about 120, or about 130 base pairs in length. In some embodiments, the chemically modified gRNAs or sgRNAs may comprise a tracrRNA sequence of from at least about 30, about 40, about 50, about 60, about 70, about 75, about 80, about 90, about 100, about 110, or about 120 base pairs in length. In some embodiments, the chemically modified gRNAs or sgRNAs may comprise a tracrRNA sequence of from at most about 40, about 50, about 60, about 70, about 75, about 80, about 90, about 100, about 110, about 120, or about 130 base pairs in length. In some embodiments, the chemically modified gRNAs or sgRNAs may comprise a tracrRNA sequence of 70 base pairs in length. In some embodiments, the chemically modified gRNAs or sgRNAs may comprise a tracrRNA sequence of 73 base pairs in length. In some embodiments, the chemically modified gRNAs or sgRNAs may comprise a tracrRNA sequence of 68 base pairs in length. In some embodiments, the chemically modified gRNAs or sgRNAs may comprise a tracrRNA sequence of 71 base pairs in length.

[0337] In some embodiments, the tracrRNA sequence may comprise a total of from 1 to 130 chemically modified nucleotides. In some embodiments, the chemically modified gRNAs or sgRNAs may comprise a tracrRNA sequence of from 1, 2, 3, 4, 5, 6, 7, 8, 9, 10, 11, 12, 13, 14, 15, 16, 17, 18, 19, 20, 21, 22, 23, 24, 25, 26, 27, 28, 29, 30, 31, 32, 33, 34, 35, 36, 37, 38, 39, 40, 41, 42, 43, 44, 45, 46, 47, 48, 49, 50, 51, 52, 53, 54, 55, 56, 57, 58, 59, 60, 61, 62, 63, 64, 65, 66, 67, 68, 69, 70, 71, 72, 73, 74, 75, 76, 77, 78, 79, 80, 81, 82, 83, 84, 85, 86, 87, 88, 89, 90, 91, 92, 93, 94, 95, 96, 97, 98, 99, 100, 101, 102, 103, 104, 105, 106, 107, 108, 109, 110, 111, 112, 113, 114, 115, 116, 117, 118, 119, 120, 121, 122, 123, 124, 125, 126, 127, 128, 129, or 130 chemically modified nucleotides. In some embodiments, the tracrRNA sequence may comprise a total of from about 1 to about 10 chemically modified nucleotides. In some embodiments, the tracrRNA sequence may comprise a total of from about 1 to about 2, about 1 to about 3, about 1 to about 4, about 1 to about 5, about 1 to about 6, about 1 to about 7, about 1 to about 8, about 1 to about 9, about 1 to about 10, about 2 to about 3, about 2 to about 4, about 2 to about 5, about 2 to about 6, about 2 to about 7, about 2 to about 8, about 2 to about 9, about 2 to about 10, about 3 to about 4, about 3 to about 5, about 3 to about 6, about 3 to about 7, about 3 to about 8, about 3 to about 9, about 3 to about 10, about 4 to about 5, about 4 to about 6, about 4 to about 7, about 4 to about 8, about 4 to about 9, about 4 to about 10, about 5 to about 6, about 5 to about 7, about 5 to about 8, about 5 to about 9, about 5 to about 10, about 6 to about 7, about 6 to about 8, about 6 to about 9, about 6 to about 10, about 7 to about 8, about 7 to about 9, about 7 to about 10, about 8 to about 9, about 8 to about 10, or about 9 to about 10 chemically modified nucleotides. In some embodiments, the tracrRNA sequence may comprise a total of from about 1, about 2, about 3, about 4, about 5, about 6, about 7, about 8, about 9, or about 10 chemically modified nucleotides. In some embodiments, the tracrRNA sequence may comprise a total of from at least about 1, about 2, about 3, about 4, about 5, about 6, about 7, about 8, or about 9 chemically modified nucleotides. In some embodiments, the tracrRNA sequence may comprise a total of from at most about 2, about 3, about 4, about 5, about 6, about 7, about 8, about 9, or about 10 chemically modified nucleotides. In some embodiments, the tracrRNA sequence may comprise a total of from about 10 to about 30 chemically modified nucleotides. In some embodiments, the tracrRNA sequence may comprise a total of from about 10 to about 15, about 10 to about 20, about 10 to about 25, about 10 to about 30, about 15 to about 20, about 15 to about 25, about 15 to about 30, about 20 to about 25, about 20 to about 30, or about 25 to about 30 chemically modified nucleotides. In some embodiments, the tracrRNA sequence may comprise a total of from about 10, about 15, about 20, about 25, or about 30 chemically modified nucleotides. In some embodiments, the tracrRNA sequence may comprise a total of from at least about 10, about 15, about 20, or about 25 chemically modified nucleotides. In some embodiments, the spacer region may comprise a total of at most about 15, about 20, about 25, or about 30 chemically modified nucleotides. In some embodiments, the tracrRNA sequence may comprise a total of from about 30 to about 130 chemically modified nucleotides. In some embodiments, the tracrRNA sequence may comprise a total of from about 30 to about 40, about 30 to about 50, about 30 to about 60, about 30 to about 70, about 30 to about 75, about 30 to about 80, about 30 to about 90, about 30 to about 100, about 30 to about 110, about 30 to about 120, about 30 to about 130, about 40 to about 50, about 40 to about 60, about 40 to about 70, about 40 to about 75, about 40 to about 80, about 40 to about 90, about 40 to about 100, about 40 to about 110, about 40 to about 120, about 40 to about 130, about 50 to about 60, about 50 to about 70, about 50 to about 75, about 50 to about 80, about 50 to about 90, about 50 to about 100, about 50 to about 110, about 50 to about 120, about 50 to about 130, about 60 to about 70, about 60 to about 75, about 60 to about 80, about 60 to about 90, about 60 to about 100, about 60 to about 110, about 60 to about 120, about 60 to about 130, about 70 to about 75, about 70 to about 80, about 70 to about 90, about 70 to about 100, about 70 to about 110, about 70 to about 120, about 70 to about 130, about 75 to about 80, about 75 to about 90, about 75 to about 100, about 75 to about 110, about 75 to about 120, about 75 to about 130, about 80 to about 90, about 80 to about 100, about 80 to about 110, about 80 to about 120, about 80 to about 130, about 90 to about 100, about 90 to about 110, about 90 to about 120, about 90 to about 130, about 100 to about 110, about 100 to about 120, about 100 to about 130, about 110 to about 120, about 110 to about 130, or about 120 to about 130 chemically modified nucleotides. In some embodiments, the tracrRNA sequence may comprise a total of from about 30, about 40, about 50, about 60, about 70, about 75, about 80, about 90, about 100, about 110, about 120, or about 130 chemically modified nucleotides. In some embodiments, the tracrRNA sequence may comprise a total of from at least about 30, about 40, about 50, about 60, about 70, about 75, about 80, about 90, about 100, about 110, or about 120 chemically modified nucleotides. In some embodiments, the tracrRNA sequence may comprise a total of from at most about 40, about 50, about 60, about 70, about 75, about 80, about 90, about 100, about 110, about 120, or about 130 chemically modified nucleotides. In one embodiment, the tracrRNA sequence may comprise a total of 51 chemically modified nucleotides. In another embodiment, the tracrRNA sequence may comprise a total of 59 chemically modified nucleotides.

[0338] In some embodiments, the tracrRNA sequence may comprise from 1% to 100% chemically modified nucleotides. In some embodiments, the tracrRNA sequence may comprise about 1% to about 100% chemically modified nucleotides. In some embodiments, the tracrRNA sequence may comprise about 1% to about 10%, about 1% to about 20%, about 1% to about 30%, about 1% to about 40%, about 1% to about 50%, about 1% to about 60%, about 1% to about 70%, about 1% to about 80%, about 1% to about 90%, about 1% to about 95%, about 1% to about 100%, about 10% to about 20%, about 10% to about 30%, about 10% to about 40%, about 10% to about 50%, about 10% to about 60%, about 10% to about 70%, about 10% to about 80%, about 10% to about 90%, about 10% to about 95%, about 10% to about 100%, about 20% to about 30%, about 20% to about 40%, about 20% to about 50%, about 20% to about 60%, about 20% to about 70%, about 20% to about 80%, about 20% to about 90%, about 20% to about 95%, about 20% to about 100%, about 30% to about 40%, about 30% to about 50%, about 30% to about 60%, about 30% to about 70%, about 30% to about 80%, about 30% to about 90%, about 30% to about 95%, about 30% to about 100%, about 40% to about 50%, about 40% to about 60%, about 40% to about 70%, about 40% to about 80%, about 40% to about 90%, about 40% to about 95%, about 40% to about 100%, about 50% to about 60%, about 50% to about 70%, about 50% to about 80%, about 50% to about 90%, about 50% to about 95%, about 50% to about 100%, about 60% to about 70%, about 60% to about 80%, about 60% to about 90%, about 60% to about 95%, about 60% to about 100%, about 70% to about 80%, about 70% to about 90%, about 70% to about 95%, about 70% to about 100%, about 80% to about 90%, about 80% to about 95%, about 80% to about 100%, about 90% to about 95%, about 90% to about 100%, or about 95% to about 100% chemically modified nucleotides. In some embodiments, the tracrRNA sequence may comprise about 1%, about 10%, about 20%, about 30%, about 40%, about 50%, about 60%, about 70%, about 80%, about 90%, about 95%, or about 100% chemically modified nucleotides. In some embodiments, the tracrRNA sequence may comprise at least about 1%, about 10%, about 20%, about 30%, about 40%, about 50%, about 60%, about 70%, about 80%, about 90%, or about 95% chemically modified nucleotides. In some embodiments, the tracrRNA sequence may comprise at most about 10%, about 20%, about 30%, about 40%, about 50%, about 60%, about 70%, about 80%, about 90%, about 95%, or about 100% chemically modified nucleotides.

[0339] In some embodiments, the chemically modified tracrRNA sequence may have chemically modified nucleotide on one or more of the positions 1, 2, 3, 4, 5, 6, 7, 8, 9, 10, 11, 12, 13, 14, 15, 16, 17, 18, 19, 20, 21, 22, 23, 24, 25, 26, 27, 28, 29, 30, 31, 32, 33, 34, 35, 36, 37, 38, 39, 40, 41, 42, 43, 44, 45, 46, 47, 48, 49, 50, 51, 52, 53, 54, 55, 56, 57, 58, 59, 60, 61, 62, 63, 64, 65, 66, 67, 68, 69, 70, 71, 72, 73, 74, 75, 76, 77, 78, 79, 80, 81, 82, 83, 84, 85, 86, 87, 88, 89, 90, 91, 92, 93, 94, 95, 96, 97, 98, 99, 100, 101, 102, 103, 104, 105, 106, 107, 108, 109, 110, 111, 112, 113, 114, 115, 116, 117, 118, 119, 120, 121, 122, 123, 124, 125, 126, 127, 128, 129, or 130 in the 5′-3′ direction in the tracrRNA sequence.

[0340] In some embodiments, the chemically modified tracr region may have chemically modified nucleotide on one or more of the positions which are 1, 2, 3, 4, 5, 6, 7, 8, 9, 10, 11, 12, 13, 14, 15, 16, 17, 18, 19, 20, 21, 22, 23, 24, 25, 26, 27, 28, 29, 30, 31, 32, 33, 34, 35, 36, 37, 38, 39, 40, 41, 42, 43, 44, 45, 46, 47, 48, 49, 50, 51, 52, 53, 54, 55, 56, 57, 58, 59, 60, 61, 62, 63, 64, 65, 66, 67, 68, 69, 70, 71, 72, 73, 74, 75, 76, 77, 78, 79, 80, 81, 82, 83, 84, 85, 86, 87, 88, 89, 90, 91, 92, 93, 94, 95, 96, 97, 98, 99, 100, 101, 102, 103, 104, 105, 106, 107, 108, 109, 110, 111, 112, 113, 114, 115, 116, 117, 118, 119, 120, 121, 122, 123, 124, 125, 126, 127, 128, or 129 base pairs from the 5′ end of the tracrRNA sequence.

[0341] In some embodiments, the chemically modified tracr region may have chemically modified nucleotide on one or more the positions which are 1, 2, 3, 4, 5, 6, 7, 8, 9, 10, 11, 12, 13, 14, 15, 16, 17, 18, 19, 20, 21, 22, 23, 24, 25, 26, 27, 28, 29, 30, 31, 32, 33, 34, 35, 36, 37, 38, 39, 40, 41, 42, 43, 44, 45, 46, 47, 48, 49, 50, 51, 52, 53, 54, 55, 56, 57, 58, 59, 60, 61, 62, 63, 64, 65, 66, 67, 68, 69, 70, 71, 72, 73, 74, 75, 76, 77, 78, 79, 80, 81, 82, 83, 84, 85, 86, 87, 88, 89, 90, 91, 92, 93, 94, 95, 96, 97, 98, 99, 100, 101, 102, 103, 104, 105, 106, 107, 108, 109, 110, 111, 112, 113, 114, 115, 116, 117, 118, 119, 120, 121, 122, 123, 124, 125, 126, 127, 128, or 129 base pairs from the 3′ end of the tracrRNA sequence.

[0342] In some embodiments, the chemically modified gRNAs may have one or more chemical modifications in the 5′ end of the gRNA sequence. In some embodiments, the chemically modified gRNAs may comprise one or more chemically modified nucleotides in the 5′ end of the gRNA sequence. In some embodiments, the chemically modified gRNAs may have one or more chemical modifications in the 3′ end of the gRNA sequence. In some embodiments, the chemically modified gRNAs may comprise one or more chemically modified nucleotides in the 3′ end of the gRNA sequence.

[0343] In some embodiments, the chemically modified gRNAs may comprise a crRNA. In some embodiments, the crRNA may comprise one or more chemically modified nucleotides. In some embodiments, the chemically modified crRNA may be of from 30 to 50 base pairs in length. In some embodiments, the chemically modified crRNA may be of 30, 31, 32, 33, 34, 35, 36, 37, 38, 39, 40, 41, 42, 43, 44, 45, 46, 47, 48, 49, or 50 base pairs in length. In some embodiments, the chemically modified crRNA may be of from about 30 to about 50 base pairs in length. In some embodiments, the chemically modified crRNA may be of from about 30 to about 32, about 30 to about 34, about 30 to about 36, about 30 to about 38, about 30 to about 40, about 30 to about 42, about 30 to about 44, about 30 to about 46, about 30 to about 48, about 30 to about 50, about 32 to about 34, about 32 to about 36, about 32 to about 38, about 32 to about 40, about 32 to about 42, about 32 to about 44, about 32 to about 46, about 32 to about 48, about 32 to about 50, about 34 to about 36, about 34 to about 38, about 34 to about 40, about 34 to about 42, about 34 to about 44, about 34 to about 46, about 34 to about 48, about 34 to about 50, about 36 to about 38, about 36 to about 40, about 36 to about 42, about 36 to about 44, about 36 to about 46, about 36 to about 48, about 36 to about 50, about 38 to about 40, about 38 to about 42, about 38 to about 44, about 38 to about 46, about 38 to about 48, about 38 to about 50, about 40 to about 42, about 40 to about 44, about 40 to about 46, about 40 to about 48, about 40 to about 50, about 42 to about 44, about 42 to about 46, about 42 to about 48, about 42 to about 50, about 44 to about 46, about 44 to about 48, about 44 to about 50, about 46 to about 48, about 46 to about 50, or about 48 to about 50 base pairs in length. In some embodiments, the chemically modified crRNA may be of from about 30, about 32, about 34, about 36, about 38, about 40, about 42, about 44, about 46, about 48, or about 50 base pairs in length. In some embodiments, the chemically modified crRNA may be of from at least about 30, about 32, about 34, about 36, about 38, about 40, about 42, about 44, about 46, or about 48 base pairs in length. In some embodiments, the chemically modified crRNA may be of from at most about 32, about 34, about 36, about 38, about 40, about 42, about 44, about 46, about 48, or about 50 base pairs in length.

[0344] In some embodiments, the crRNA may comprise a total of from 1 to 50 chemically modified nucleotides. In some embodiments, the chemically modified crRNA may comprise a total of 1, 2, 3, 4, 5, 6, 7, 8, 9, 10, 11, 12, 13, 14, 15, 16, 17, 18, 19, 20, 21, 22, 23, 24, 25, 26, 27, 28, 29, 30, 31, 32, 33, 34, 35, 36, 37, 38, 39, 40, 41, 42, 43, 44, 45, 46, 47, 48, 49, or 50 chemically modified nucleotides. In some embodiments, the chemically modified crRNA may comprise a total of about 1 to about 10 chemically modified nucleotides. In some embodiments, the chemically modified crRNA may comprise a total of about 1 to about 2, about 1 to about 3, about 1 to about 4, about 1 to about 5, about 1 to about 6, about 1 to about 7, about 1 to about 8, about 1 to about 9, about 1 to about 10, about 2 to about 3, about 2 to about 4, about 2 to about 5, about 2 to about 6, about 2 to about 7, about 2 to about 8, about 2 to about 9, about 2 to about 10, about 3 to about 4, about 3 to about 5, about 3 to about 6, about 3 to about 7, about 3 to about 8, about 3 to about 9, about 3 to about 10, about 4 to about 5, about 4 to about 6, about 4 to about 7, about 4 to about 8, about 4 to about 9, about 4 to about 10, about 5 to about 6, about 5 to about 7, about 5 to about 8, about 5 to about 9, about 5 to about 10, about 6 to about 7, about 6 to about 8, about 6 to about 9, about 6 to about 10, about 7 to about 8, about 7 to about 9, about 7 to about 10, about 8 to about 9, about 8 to about 10, or about 9 to about 10 chemically modified nucleotides. In some embodiments, the chemically modified crRNA may comprise a total of about 1, about 2, about 3, about 4, about 5, about 6, about 7, about 8, about 9, or about 10 chemically modified nucleotides. In some embodiments, the chemically modified crRNA may comprise a total of at least about 1, about 2, about 3, about 4, about 5, about 6, about 7, about 8, or about 9 chemically modified nucleotides. In some embodiments, the chemically modified crRNA may comprise a total of at most about 2, about 3, about 4, about 5, about 6, about 7, about 8, about 9, or about 10 chemically modified nucleotides. In some embodiments, the chemically modified crRNA may comprise a total of about 10 to about 30 chemically modified nucleotides. In some embodiments, the chemically modified crRNA may comprise a total of about 10 to about 15, about 10 to about 20, about 10 to about 25, about 10 to about 30, about 15 to about 20, about 15 to about 25, about 15 to about 30, about 20 to about 25, about 20 to about 30, or about 25 to about 30 chemically modified nucleotides. In some embodiments, the chemically modified crRNA may comprise a total of about 10, about 15, about 20, about 25, or about 30 chemically modified nucleotides. In some embodiments, the chemically modified crRNA may comprise a total of at least about 10, about 15, about 20, or about 25 chemically modified nucleotides. In some embodiments, the chemically modified crRNA may comprise a total of at most about 15, about 20, about 25, or about 30 chemically modified nucleotides. In some embodiments, the chemically modified crRNA may comprise a total of from about 30 to about 50 chemically modified nucleotides. In some embodiments, the chemically modified crRNA may comprise a total of from about 30 to about 32, about 30 to about 34, about 30 to about 36, about 30 to about 38, about 30 to about 40, about 30 to about 42, about 30 to about 44, about 30 to about 46, about 30 to about 48, about 30 to about 50, about 32 to about 34, about 32 to about 36, about 32 to about 38, about 32 to about 40, about 32 to about 42, about 32 to about 44, about 32 to about 46, about 32 to about 48, about 32 to about 50, about 34 to about 36, about 34 to about 38, about 34 to about 40, about 34 to about 42, about 34 to about 44, about 34 to about 46, about 34 to about 48, about 34 to about 50, about 36 to about 38, about 36 to about 40, about 36 to about 42, about 36 to about 44, about 36 to about 46, about 36 to about 48, about 36 to about 50, about 38 to about 40, about 38 to about 42, about 38 to about 44, about 38 to about 46, about 38 to about 48, about 38 to about 50, about 40 to about 42, about 40 to about 44, about 40 to about 46, about 40 to about 48, about 40 to about 50, about 42 to about 44, about 42 to about 46, about 42 to about 48, about 42 to about 50, about 44 to about 46, about 44 to about 48, about 44 to about 50, about 46 to about 48, about 46 to about 50, or about 48 to about 50 chemically modified nucleotides. In some embodiments, the chemically modified crRNA may comprise a total of from about 30, about 32, about 34, about 36, about 38, about 40, about 42, about 44, about 46, about 48, or about 50 chemically modified nucleotides. In some embodiments, the chemically modified crRNA may comprise a total of from at least about 30, about 32, about 34, about 36, about 38, about 40, about 42, about 44, about 46, or about 48 chemically modified nucleotides. In some embodiments, the chemically modified crRNA may comprise a total of from at most about 32, about 34, about 36, about 38, about 40, about 42, about 44, about 46, about 48, or about 50 chemically modified nucleotides.

[0345] In some embodiments, the crRNA may comprise from 1% to 100% chemically modified nucleotides. In some embodiments, the crRNA may comprise about 1% to about 100% chemically modified nucleotides. In some embodiments, the crRNA may comprise about 1% to about 10%, about 1% to about 20%, about 1% to about 30%, about 1% to about 40%, about 1% to about 50%, about 1% to about 60%, about 1% to about 70%, about 1% to about 80%, about 1% to about 90%, about 1% to about 95%, about 1% to about 100%, about 10% to about 20%, about 10% to about 30%, about 10% to about 40%, about 10% to about 50%, about 10% to about 60%, about 10% to about 70%, about 10% to about 80%, about 10% to about 90%, about 10% to about 95%, about 10% to about 100%, about 20% to about 30%, about 20% to about 40%, about 20% to about 50%, about 20% to about 60%, about 20% to about 70%, about 20% to about 80%, about 20% to about 90%, about 20% to about 95%, about 20% to about 100%, about 30% to about 40%, about 30% to about 50%, about 30% to about 60%, about 30% to about 70%, about 30% to about 80%, about 30% to about 90%, about 30% to about 95%, about 30% to about 100%, about 40% to about 50%, about 40% to about 60%, about 40% to about 70%, about 40% to about 80%, about 40% to about 90%, about 40% to about 95%, about 40% to about 100%, about 50% to about 60%, about 50% to about 70%, about 50% to about 80%, about 50% to about 90%, about 50% to about 95%, about 50% to about 100%, about 60% to about 70%, about 60% to about 80%, about 60% to about 90%, about 60% to about 95%, about 60% to about 100%, about 70% to about 80%, about 70% to about 90%, about 70% to about 95%, about 70% to about 100%, about 80% to about 90%, about 80% to about 95%, about 80% to about 100%, about 90% to about 95%, about 90% to about 100%, or about 95% to about 100% chemically modified nucleotides. In some embodiments, the crRNA may comprise about 1%, about 10%, about 20%, about 30%, about 40%, about 50%, about 60%, about 70%, about 80%, about 90%, about 95%, or about 100% chemically modified nucleotides. In some embodiments, the crRNA may comprise at least about 1%, about 10%, about 20%, about 30%, about 40%, about 50%, about 60%, about 70%, about 80%, about 90%, or about 95% chemically modified nucleotides. In some embodiments, the crRNA may comprise at most about 10%, about 20% about 30%, about 40%, about 50%, about 60%, about 70%, about 80%, about 90%, about 95%, or about 100% chemically modified nucleotides.

[0346] In some embodiments, the chemically modified crRNA may have chemically modified nucleotide on one or more of the positions 1, 2, 3, 4, 5, 6, 7, 8, 9, 10, 11, 12, 13, 14, 15, 16, 17, 18, 19, 20, 21, 22, 23, 24, 25, 26, 27, 28, 29, 30, 31, 32, 33, 34, 35, 36, 37, 38, 39, 40, 41, 42, 43, 44, 45, 46, 47, 48, 49, or 50 in the 5′-3′ direction in the crRNA sequence.

[0347] In some embodiments, the chemically modified crRNA may have chemically modified nucleotide on one or more of the positions which are 1, 2, 3, 4, 5, 6, 7, 8, 9, 10, 11, 12, 13, 14, 15, 16, 17, 18, 19, 20, 21, 22, 23, 24, 25, 26, 27, 28, 29, 30, 31, 32, 33, 34, 35, 36, 37, 38, 39, 40, 41, 42, 43, 44, 45, 46, 47, 48, or 49 base pairs from the 5′ end of the crRNA sequence.

[0348] In some embodiments, the chemically modified crRNA may have chemically modified nucleotide on one or more of the positions which are 1, 2, 3, 4, 5, 6, 7, 8, 9, 10, 11, 12, 13, 14, 15, 16, 17, 18, 19, 20, 21, 22, 23, 24, 25, 26, 27, 28, 29, 30, 31, 32, 33, 34, 35, 36, 37, 38, 39, 40, 41, 42, 43, 44, 45, 46, 47, 48, or 49 base pairs from the 3′ end of the crRNA sequence.

[0349] In some embodiments, the chemically modified gRNAs may comprise a tracrRNA. In some embodiments, the tracrRNA may comprise one or more chemically modified nucleotides. In some embodiments, the chemically modified tracrRNA may comprise a total of from 50 to 130 base pairs in length. In some embodiments, the chemically modified tracrRNA may comprise a total of 30, 31, 32, 33, 34, 35, 36, 37, 38, 39, 40, 41, 42, 43, 44, 45, 46, 47, 48, 49, 50, 51, 52, 53, 54, 55, 56, 57, 58, 59, 60, 61, 62, 63, 64, 65, 66, 67, 68, 69, 70, 71, 72, 73, 74, 75, 76, 77, 78, 79, 80, 81, 82, 83, 84, 85, 86, 87, 88, 89, 90, 91, 92, 93, 94, 95, 96, 97, 98, 99, 100, 101, 102, 103, 104, 105, 106, 107, 108, 109, 110, 111, 112, 113, 114, 115, 116, 117, 118, 119, 120, 121, 122, 123, 124, 125, 126, 127, 128, 129, or 130 base pairs in length. In some embodiments, the chemically modified tracrRNA may comprise a total of about 30 to about 130 base pairs in length. In some embodiments, the chemically modified tracrRNA may comprise a total of about 30 to about 40, about 30 to about 50, about 30 to about 60, about 30 to about 70, about 30 to about 75, about 30 to about 80, about 30 to about 90, about 30 to about 100, about 30 to about 110, about 30 to about 120, about 30 to about 130, about 40 to about 50, about 40 to about 60, about 40 to about 70, about 40 to about 75, about 40 to about 80, about 40 to about 90, about 40 to about 100, about 40 to about 110, about 40 to about 120, about 40 to about 130, about 50 to about 60, about 50 to about 70, about 50 to about 75, about 50 to about 80, about 50 to about 90, about 50 to about 100, about 50 to about 110, about 50 to about 120, about 50 to about 130, about 60 to about 70, about 60 to about 75, about 60 to about 80, about 60 to about 90, about 60 to about 100, about 60 to about 110, about 60 to about 120, about 60 to about 130, about 70 to about 75, about 70 to about 80, about 70 to about 90, about 70 to about 100, about 70 to about 110, about 70 to about 120, about 70 to about 130, about 75 to about 80, about 75 to about 90, about 75 to about 100, about 75 to about 110, about 75 to about 120, about 75 to about 130, about 80 to about 90, about 80 to about 100, about 80 to about 110, about 80 to about 120, about 80 to about 130, about 90 to about 100, about 90 to about 110, about 90 to about 120, about 90 to about 130, about 100 to about 110, about 100 to about 120, about 100 to about 130, about 110 to about 120, about 110 to about 130, or about 120 to about 130 base pairs in length. In some embodiments, the chemically modified tracrRNA may comprise a total of about 30, about 40, about 50, about 60, about 70, about 75, about 80, about 90, about 100, about 110, about 120, or about 130 base pairs in length. In some embodiments, the chemically modified tracrRNA may comprise a total of at least about 30, about 40, about 50, about 60, about 70, about 75, about 80, about 90, about 100, about 110, or about 120 base pairs in length. In some embodiments, the chemically modified tracrRNA may comprise a total of at most about 40, about 50, about 60, about 70, about 75, about 80, about 90, about 100, about 110, about 120, or about 130 base pairs in length.

[0350] In some embodiments, the chemically modified tracrRNA may comprise a total of from 1 to 130 chemically modified nucleotides. In some embodiments, the chemically modified tracrRNA may comprise a total of 1, 2, 3, 4, 5, 6, 7, 8, 9, 10, 11, 12, 13, 14, 15, 16, 17, 18, 19, 20, 21, 22, 23, 24, 25, 26, 27, 28, 29, 30, 31, 32, 33, 34, 35, 36, 37, 38, 39, 40, 41, 42, 43, 44, 45, 46, 47, 48, 49, 50, 51, 52, 53, 54, 55, 56, 57, 58, 59, 60, 61, 62, 63, 64, 65, 66, 67, 68, 69, 70, 71, 72, 73, 74, 75, 76, 77, 78, 79, 80, 81, 82, 83, 84, 85, 86, 87, 88, 89, 90, 91, 92, 93, 94, 95, 96, 97, 98, 99, 100, 101, 102, 103, 104, 105, 106, 107, 108, 109, 110, 111, 112, 113, 114, 115, 116, 117, 118, 119, 120, 121, 122, 123, 124, 125, 126, 127, 128, 129, or 130 chemically modified nucleotides. In some embodiments, the chemically modified tracrRNA may comprise a total of about 1 to about 10 chemically modified nucleotides. In some embodiments, the chemically modified tracrRNA may comprise a total of about 1 to about 2, about 1 to about 3, about 1 to about 4, about 1 to about 5, about 1 to about 6, about 1 to about 7, about 1 to about 8, about 1 to about 9, about 1 to about 10, about 2 to about 3, about 2 to about 4, about 2 to about 5, about 2 to about 6, about 2 to about 7, about 2 to about 8, about 2 to about 9, about 2 to about 10, about 3 to about 4, about 3 to about 5, about 3 to about 6, about 3 to about 7, about 3 to about 8, about 3 to about 9, about 3 to about 10, about 4 to about 5, about 4 to about 6, about 4 to about 7, about 4 to about 8, about 4 to about 9, about 4 to about 10, about 5 to about 6, about 5 to about 7, about 5 to about 8, about 5 to about 9, about 5 to about 10, about 6 to about 7, about 6 to about 8, about 6 to about 9, about 6 to about 10, about 7 to about 8, about 7 to about 9, about 7 to about 10, about 8 to about 9, about 8 to about 10, or about 9 to about 10 chemically modified nucleotides. In some embodiments, the chemically modified tracrRNA may comprise a total of about 1, about 2, about 3, about 4, about 5, about 6, about 7, about 8, about 9, or about 10 chemically modified nucleotides. In some embodiments, the chemically modified tracrRNA may comprise a total of at least about 1, about 2, about 3, about 4, about 5, about 6, about 7, about 8, or about 9 chemically modified nucleotides. In some embodiments, the chemically modified tracrRNA may comprise a total of at most about 2, about 3, about 4, about 5, about 6, about 7, about 8, about 9, or about 10 chemically modified nucleotides. In some embodiments, the chemically modified tracrRNA may comprise a total of about 10 to about 30 chemically modified nucleotides. In some embodiments, the chemically modified tracrRNA may comprise a total of about 10 to about 15, about 10 to about 20, about 10 to about 25, about 10 to about 30, about 15 to about 20, about 15 to about 25, about 15 to about 30, about 20 to about 25, about 20 to about 30, or about 25 to about 30 chemically modified nucleotides. In some embodiments, the chemically modified tracrRNA may comprise a total of about 10, about 15, about 20, about 25, or about 30 chemically modified nucleotides. In some embodiments, the chemically modified tracrRNA may comprise a total of at least about 10, about 15, about 20, or about 25 chemically modified nucleotides. In some embodiments, the spacer region may comprise a total of at most about 15, about 20, about 25, or about 30 chemically modified nucleotides. In some embodiments, the chemically modified tracrRNA may comprise a total of about 30 to about 130 chemically modified nucleotides. In some embodiments, the chemically modified tracrRNA may comprise a total of about 30 to about 40, about 30 to about 50, about 30 to about 60, about 30 to about 70, about 30 to about 75, about 30 to about 80, about 30 to about 90, about 30 to about 100, about 30 to about 110, about 30 to about 120, about 30 to about 130, about 40 to about 50, about 40 to about 60, about 40 to about 70, about 40 to about 75, about 40 to about 80, about 40 to about 90, about 40 to about 100, about 40 to about 110, about 40 to about 120, about 40 to about 130, about 50 to about 60, about 50 to about 70, about 50 to about 75, about 50 to about 80, about 50 to about 90, about 50 to about 100, about 50 to about 110, about 50 to about 120, about 50 to about 130, about 60 to about 70, about 60 to about 75, about 60 to about 80, about 60 to about 90, about 60 to about 100, about 60 to about 110, about 60 to about 120, about 60 to about 130, about 70 to about 75, about 70 to about 80, about 70 to about 90, about 70 to about 100, about 70 to about 110, about 70 to about 120, about 70 to about 130, about 75 to about 80, about 75 to about 90, about 75 to about 100, about 75 to about 110, about 75 to about 120, about 75 to about 130, about 80 to about 90, about 80 to about 100, about 80 to about 110, about 80 to about 120, about 80 to about 130, about 90 to about 100, about 90 to about 110, about 90 to about 120, about 90 to about 130, about 100 to about 110, about 100 to about 120, about 100 to about 130, about 110 to about 120, about 110 to about 130, or about 120 to about 130 chemically modified nucleotides. In some embodiments, the chemically modified tracrRNA may comprise a total of about 30, about 40, about 50, about 60, about 70, about 75, about 80, about 90, about 100, about 110, about 120, or about 130 chemically modified nucleotides. In some embodiments, the chemically modified tracrRNA may comprise a total of at least about 30, about 40, about 50, about 60, about 70, about 75, about 80, about 90, about 100, about 110, or about 120 chemically modified nucleotides. In some embodiments, the chemically modified tracrRNA may comprise a total of at most about 40, about 50, about 60, about 70, about 75, about 80, about 90, about 100, about 110, about 120, or about 130 chemically modified nucleotides.

[0351] In some embodiments, the chemically modified tracrRNA may comprise about 1% to about 100% chemically modified nucleotides. In some embodiments, the chemically modified tracrRNA may comprise about 1% to about 10%, about 1% to about 20%, about 1% to about 30%, about 1% to about 40%, about 1% to about 50%, about 1% to about 60%, about 1% to about 70%, about 1% to about 80%, about 1% to about 90%, about 1% to about 95%, about 1% to about 100%, about 10% to about 20%, about 10% to about 30%, about 10% to about 40%, about 10% to about 50%, about 10% to about 60%, about 10% to about 70%, about 10% to about 80%, about 10% to about 90%, about 10% to about 95%, about 10% to about 100%, about 20% to about 30%, about 20% to about 40%, about 20% to about 50%, about 20% to about 60%, about 20% to about 70%, about 20% to about 80%, about 20% to about 90%, about 20% to about 95%, about 20% to about 100%, about 30% to about 40%, about 30% to about 50%, about 30% to about 60%, about 30% to about 70%, about 30% to about 80%, about 30% to about 90%, about 30% to about 95%, about 30% to about 100%, about 40% to about 50%, about 40% to about 60%, about 40% to about 70%, about 40% to about 80%, about 40% to about 90%, about 40% to about 95%, about 40% to about 100%, about 50% to about 60%, about 50% to about 70%, about 50% to about 80%, about 50% to about 90%, about 50% to about 95%, about 50% to about 100%, about 60% to about 70%, about 60% to about 80%, about 60% to about 90%, about 60% to about 95%, about 60% to about 100%, about 70% to about 80%, about 70% to about 90%, about 70% to about 95%, about 70% to about 100%, about 80% to about 90%, about 80% to about 95%, about 80% to about 100%, about 90% to about 95%, about 90% to about 100%, or about 95% to about 100% chemically modified nucleotides. In some embodiments, the chemically modified tracrRNA may comprise about 1%, about 10%, about 20%, about 30%, about 40%, about 50%, about 60%, about 70%, about 80%, about 90%, about 95%, or about 100% chemically modified nucleotides. In some embodiments, the chemically modified tracrRNA may comprise at least about 1%, about 10%, about 20%, about 30%, about 40%, about 50%, about 60%, about 70%, about 80%, about 90%, or about 95% chemically modified nucleotides. In some embodiments, the chemically modified tracrRNA may comprise at most about 10%, about 20%, about 30%, about 40%, about 50%, about 60%, about 70%, about 80%, about 90%, about 95%, or about 100% chemically modified nucleotides.

[0352] In some embodiments, the chemically modified tracrRNA may have chemically modified nucleotide on one or more of the positions 1, 2, 3, 4, 5, 6, 7, 8, 9, 10, 11, 12, 13, 14, 15, 16, 17, 18, 19, 20, 21, 22, 23, 24, 25, 26, 27, 28, 29, 30, 31, 32, 33, 34, 35, 36, 37, 38, 39, 40, 41, 42, 43, 44, 45, 46, 47, 48, 49, 50, 51, 52, 53, 54, 55, 56, 57, 58, 59, 60, 61, 62, 63, 64, 65, 66, 67, 68, 69, 70, 71, 72, 73, 74, 75, 76, 77, 78, 79, 80, 81, 82, 83, 84, 85, 86, 87, 88, 89, 90, 91, 92, 93, 94, 95, 96, 97, 98, 99, 100, 101, 102, 103, 104, 105, 106, 107, 108, 109, 110, 111, 112, 113, 114, 115, 116, 117, 118, 119, 120, 121, 122, 123, 124, 125, 126, 127, 128, 129, or 130 in the 5′-3′ direction in the tracrRNA sequence.

[0353] In some embodiments, the chemically modified tracrRNA may have chemically modified nucleotide on one or more of the positions 1, 2, 3, 4, 5, 6, 7, 8, 9, 10, 11, 12, 13, 14, 15, 16, 17, 18, 19, 20, 21, 22, 23, 24, 25, 26, 27, 28, 29, 30, 31, 32, 33, 34, 35, 36, 37, 38, 39, 40, 41, 42, 43, 44, 45, 46, 47, 48, 49, 50, 51, 52, 53, 54, 55, 56, 57, 58, 59, 60, 61, 62, 63, 64, 65, 66, 67, 68, 69, 70, 71, 72, 73, 74, 75, 76, 77, 78, 79, 80, 81, 82, 83, 84, 85, 86, 87, 88, 89, 90, 91, 92, 93, 94, 95, 96, 97, 98, 99, 100, 101, 102, 103, 104, 105, 106, 107, 108, 109, 110, 111, 112, 113, 114, 115, 116, 117, 118, 119, 120, 121, 122, 123, 124, 125, 126, 127, 128, or 129 base pairs from the 5′ end of the tracrRNA sequence.

[0354] In some embodiments, the chemically modified tracrRNA may have chemically modified nucleotide on one or more of the positions 1, 2, 3, 4, 5, 6, 7, 8, 9, 10, 11, 12, 13, 14, 15, 16, 17, 18, 19, 20, 21, 22, 23, 24, 25, 26, 27, 28, 29, 30, 31, 32, 33, 34, 35, 36, 37, 38, 39, 40, 41, 42, 43, 44, 45, 46, 47, 48, 49, 50, 51, 52, 53, 54, 55, 56, 57, 58, 59, 60, 61, 62, 63, 64, 65, 66, 67, 68, 69, 70, 71, 72, 73, 74, 75, 76, 77, 78, 79, 80, 81, 82, 83, 84, 85, 86, 87, 88, 89, 90, 91, 92, 93, 94, 95, 96, 97, 98, 99, 100, 101, 102, 103, 104, 105, 106, 107, 108, 109, 110, 111, 112, 113, 114, 115, 116, 117, 118, 119, 120, 121, 122, 123, 124, 125, 126, 127, 128, or 129 base pairs from the 3′ end of the tracrRNA sequence.

[0355] In some embodiments, the chemically modified gRNA or sgRNA comprises phosphorothioate (PS) linkages at the 5′ or 3′ end of the gRNA sequence. In some embodiments, the chemically modified gRNA or sgRNA comprises 0, 1, 2, 3, 4, or 5 PS linkages at the 5′ end of the gRNA or sgRNA sequence. In some embodiments, the chemically modified gRNA or sgRNA comprises 0, 1, 2, 3, 4, or 5 PS linkages at the 3′ end of the gRNA or sgRNA sequence. In some embodiments, the chemically modified gRNA or sgRNA comprises 0, 1, 2, 3, 4, or 5 PS linkages, or any combinations thereof at each of 5′ and 3′ end of the gRNA or sgRNA sequence. In some embodiments, the chemically modified gRNA or sgRNA comprises 0, 1, 2 or 3 PS linkages, or any combinations thereof at each of 5′ and 3′ end of the gRNA or sgRNA sequence. In some embodiments, the chemically modified gRNA or sgRNA comprises 1 PS linkage at each of 5′ and 3′ end of the gRNA or sgRNA sequence. In some embodiments, the chemically modified gRNA or sgRNA comprises 2 PS linkages at each of 5′ and 3′ end of the gRNA or sgRNA sequence. In some embodiments, the chemically modified gRNA or sgRNA comprises 3 PS linkages at each of 5′ and 3′ end of the gRNA or sgRNA sequence. In some embodiments, the chemically modified gRNA or sgRNA comprises 4 PS linkages at each of 5′ and 3′ end of the gRNA or sgRNA sequence. In some embodiments, the chemically modified gRNA or sgRNA comprises 5 PS linkages at each of 5′ and 3′ end of the gRNA or sgRNA sequence. In some embodiments, the chemically modified gRNA or sgRNA comprises 3 PS linkages at the 5′ end and 0 PS linkage (i.e., no modification) at the 3′ end of the gRNA or sgRNA sequence. In some embodiments, the chemically modified gRNA or sgRNA comprises 3 PS linkages at the 5′ end and 1 PS linkage at the 3′ end of the gRNA or sgRNA sequence. In some embodiments, the chemically modified gRNA or sgRNA comprises 3 PS linkages at the 5′ end and 2 PS linkages at the 3′ end of the gRNA or sgRNA sequence. In some embodiments, the chemically modified gRNA or sgRNA comprises 3 PS linkages at the 5′ end and 4 PS linkages at the 3′ end of the gRNA or sgRNA sequence. In some embodiments, the chemically modified gRNA or sgRNA comprises 3 PS linkages at the 5′ end and 5 PS linkages at the 3′ end of the gRNA or sgRNA sequence. In some embodiments, the chemically modified gRNA or sgRNA comprises 2 PS linkages at the 5′ end and 0 PS linkage (i.e., no modification) at the 3′ end of the gRNA or sgRNA sequence. In some embodiments, the chemically modified gRNA or sgRNA comprises 2 PS linkages at the 5′ end and 1 PS linkage at the 3′ end of the gRNA or sgRNA sequence. In some embodiments, the chemically modified gRNA or sgRNA comprises 2 PS linkages at the 5′ end and 3 PS linkages at the 3′ end of the gRNA or sgRNA sequence. In some embodiments, the chemically modified gRNA or sgRNA comprises 2 PS linkages at the 5′ end and 4 PS linkages at the 3′ end of the gRNA or sgRNA sequence. In some embodiments, the chemically modified gRNA or sgRNA comprises 2 PS linkages at the 5′ end and 5 PS linkages at the 3′ end of the gRNA or sgRNA sequence.

[0356] In some embodiments, the chemically modified gRNA or sgRNA comprises 2 and no more than 2 contiguous phosphorothioate (PS) linkages at the 5′ end. In some embodiments, the chemically modified gRNA or sgRNA comprises 2 and no more than 2 contiguous phosphorothioate (PS) linkages at the 3′ end. In some embodiments, the chemically modified gRNA or sgRNA comprises 3 contiguous phosphorothioate (PS) linkages at the 5′ end. In some embodiments, the chemically modified gRNA or sgRNA comprises 3 contiguous phosphorothioate (PS) linkages at the 3′ end. In some embodiments, the chemically modified gRNA or sgRNA comprises the sequence 5′-UsUsU-3′ at the 3′end or at the 5′ end, wherein U indicates a uridine and wherein s indicates a phosphorothioate (PS) linkage. In some embodiments, the chemically modified gRNA or sgRNA comprises 3 phosphorothioate (PS) linkages at the 5′ end. In some embodiments, the chemically modified gRNA or sgRNA comprises 3 phosphorothioate (PS) linkages at the 3′ end. In some embodiments, the chemically modified gRNA or sgRNA comprises the two phosphorothioate linkages at the 5′ end, wherein the two phosphorothioate (PS) linkages are two contiguous phosphorothioate (PS) linkages at the first two nucleotide positions of the 5′ end. In some embodiments, the chemically modified gRNA or sgRNA comprises the two phosphorothioate linkages at the 5′ end, wherein the two phosphorothioate (PS) linkages are within the first 3-10 nucleotides of the 5′ end. In some embodiments, the chemically modified gRNA or sgRNA comprises the two phosphorothioate (PS) linkages at the 3′ end, wherein the two phosphorothioate (PS) linkages are two contiguous phosphorothioate (PS) linkages at the first two nucleotide positions of the 3′ end. In some embodiments, the chemically modified gRNA or sgRNA comprises the two phosphorothioate (PS) linkages at the 3′ end, wherein the two phosphorothioate (PS) linkages are within the first 3-10 nucleotides of the 3′ end. In some embodiments, the chemically modified gRNA or sgRNA comprises the sequence 5′-UsUsUs-3′ at the 3′ end, wherein U indicates a uridine and s indicates a phosphorothioate (PS) linkage. In some embodiments, the chemically modified gRNA or sgRNA comprises the sequence 5′-UsUsU-3′ at the 3′end, wherein U indicates a uridine and s indicates a phosphorothioate (PS) linkage.

[0357] In some embodiments, the chemically modified gRNA or sgRNA comprises PS linkages at the internal positions of the gRNA or sgRNA sequence. In some embodiments, the chemically modified gRNA or sgRNA comprises 1, 2, 3, 4, 5, 6, 7, 8, 9, or 10 PS linkages at the internal positions of the gRNA or sgRNA sequence. In some embodiments, the chemically modified gRNA or sgRNA comprises 1 PS linkage at the internal position of the gRNA or sgRNA sequence. In some embodiments, the chemically modified gRNA or sgRNA comprises 2 PS linkages at the internal positions of the gRNA or sgRNA sequence. In some embodiments, the chemically modified gRNA or sgRNA comprises 3 PS linkages at the internal positions of the gRNA or sgRNA sequence. In some embodiments, the chemically modified gRNA or sgRNA comprises 4 PS linkages at the internal positions of the gRNA or sgRNA sequence. In some embodiments, the chemically modified gRNA or sgRNA comprises 5 PS linkages at the internal positions of the gRNA or sgRNA sequence. In some embodiments, the chemically modified gRNA or sgRNA comprises 6 PS linkages at the internal positions of the gRNA or sgRNA sequence. In some embodiments, the chemically modified gRNA or sgRNA comprises 7 PS linkages at the internal positions of the gRNA or sgRNA sequence. In some embodiments, the chemically modified gRNA or sgRNA comprises 8 PS linkages at the internal positions of the gRNA or sgRNA sequence. In some embodiments, the chemically modified gRNA or sgRNA comprises 9 PS linkages at the internal positions of the gRNA or sgRNA sequence. In some embodiments, the chemically modified gRNA or sgRNA comprises 10 PS linkages at the internal positions of the gRNA or sgRNA sequence.

[0358] In some embodiments, the chemically modified gRNA or sgRNA comprises PS linkages at the 5′ end, the 3′ end, or at the internal positions, or any combination thereof, of the gRNA or sgRNA sequence. In some embodiments, the chemically modified gRNA or sgRNA comprises 0, 1, 2, 3, 4, 5, 6, 7, 8, 9, or 10 PS linkages at the 5′end, the 3′ end, or at the internal positions, or any combination thereof, of the gRNA or sgRNA sequence.

[0359] In some embodiments, the chemically modified gRNA or sgRNA comprises 2 PS linkages at the 5′ end, 3 PS linkages at the 3′ end, and 0 PS linkage (i.e., no modification) at the internal position of the gRNA or sgRNA sequence. In some embodiments, the chemically modified gRNA or sgRNA comprises 2 PS linkages at the 5′ end, 3 PS linkages at the 3′ end, and 1 PS linkage at the internal position of the gRNA or sgRNA sequence. In some embodiments, the chemically modified gRNA or sgRNA comprises 2 PS linkages at the 5′ end, 3 PS linkages at the 3′ end, and 2 PS linkages at the internal positions of the gRNA or sgRNA sequence. In some embodiments, the chemically modified gRNA or sgRNA comprises 2 PS linkages at the 5′ end, 3 PS linkages at the 3′ end, and 3 PS linkages at the internal positions of the gRNA or sgRNA sequence. In some embodiments, the chemically modified gRNA or sgRNA comprises 2 PS linkages at the 5′ end, 3 PS linkages at the 3′ end, and 4 PS linkages at the internal positions of the gRNA or sgRNA sequence. In some embodiments, the chemically modified gRNA or sgRNA comprises 2 PS linkages at the 5′ end, 3 PS linkages at the 3′ end, and 5 PS linkages at the internal positions of the gRNA or sgRNA sequence. In some embodiments, the chemically modified gRNA or sgRNA comprises 2 PS linkages at the 5′ end, 3 PS linkages at the 3′ end, and 6 PS linkages at the internal positions of the gRNA or sgRNA sequence.

[0360] In some embodiments, the chemically modified gRNA or sgRNA comprises 3 PS linkages at the 5′ end, 2 PS linkages at the 3′ end, and 0 PS linkage (i.e., no modification) at the internal position of the gRNA or sgRNA sequence. In some embodiments, the chemically modified gRNA or sgRNA comprises 3 PS linkages at the 5′ end, 2 PS linkages at the 3′ end, and 1 PS linkage at the internal position of the gRNA or sgRNA sequence. In some embodiments, the chemically modified gRNA or sgRNA comprises 3 PS linkages at the 5′ end, 2 PS linkages at the 3′ end, and 2 PS linkages at the internal positions of the gRNA or sgRNA sequence. In some embodiments, the chemically modified gRNA or sgRNA comprises 3 PS linkages at the 5′ end, 2 PS linkages at the 3′ end, and 3 PS linkages at the internal positions of the gRNA or sgRNA sequence. In some embodiments, the chemically modified gRNA or sgRNA comprises 3 PS linkages at the 5′ end, 2 PS linkages at the 3′ end, and 4 PS linkages at the internal positions of the gRNA or sgRNA sequence. In some embodiments, the chemically modified gRNA or sgRNA comprises 3 PS linkages at the 5′ end, 2 PS linkages at the 3′ end, and 5 PS linkages at the internal positions of the gRNA or sgRNA sequence. In some embodiments, the chemically modified gRNA or sgRNA comprises 3 PS linkages at the 5′ end, 2 PS linkages at the 3′ end, and 6 PS linkages at the internal positions of the gRNA or sgRNA sequence.

[0361] In some embodiments, the chemically modified gRNA or sgRNA comprises 2 PS linkages at the 5′ end, 2 PS linkages at the 3′ end, and 0 PS linkage (i.e., no modification) at the internal position of the gRNA or sgRNA sequence. In some embodiments, the chemically modified gRNA or sgRNA comprises 2 PS linkages at the 5′ end and 2 PS linkages at the 3′ end and 1 PS linkage at the internal position of the gRNA or sgRNA sequence. In some embodiments, the chemically modified gRNA or sgRNA comprises 2 PS linkages at the 5′ end and 2 PS linkages at the 3′ end and 2 PS linkages at the internal positions of the gRNA or sgRNA sequence. In some embodiments, the chemically modified gRNA or sgRNA comprises 2 PS linkages at the 5′ end and 2 PS linkages at the 3′ end and 3 PS linkages at the internal positions of the gRNA or sgRNA sequence. In some embodiments, the chemically modified gRNA or sgRNA comprises 2 PS linkages at the 5′ end and 2 PS linkages at the 3′ end and 4 PS linkages at the internal positions of the gRNA or sgRNA sequence. In some embodiments, the chemically modified gRNA or sgRNA comprises 2 PS linkages at the 5′ end and 2 PS linkages at the 3′ end and 5 PS linkages at the internal positions of the gRNA or sgRNA sequence. In some embodiments, the chemically modified gRNA or sgRNA comprises 2 PS linkages at the 5′ end and 2 PS linkages at the 3′ end and 6 PS linkages at the internal positions of the gRNA or sgRNA sequence.

[0362] In some embodiments, the chemically modified gRNA or sgRNA comprises 3 PS linkages at the 5′ end, 3 PS linkages at the 3′ end, and 0 PS linkage (i.e., no modification) at the internal position of the gRNA or sgRNA sequence. In some embodiments, the chemically modified gRNA or sgRNA comprises 3 PS linkages at the 5′ end and 3 PS linkages at the 3′ end and 1 PS linkage at the internal position of the gRNA or sgRNA sequence. In some embodiments, the chemically modified gRNA or sgRNA comprises 3 PS linkages at the 5′ end and 3 PS linkages at the 3′ end and 2 PS linkages at the internal positions of the gRNA or sgRNA sequence. In some embodiments, the chemically modified gRNA or sgRNA comprises 3 PS linkages at the 5′ end and 3 PS linkages at the 3′ end and 3 PS linkages at the internal positions of the gRNA or sgRNA sequence. In some embodiments, the chemically modified gRNA or sgRNA comprises 3 PS linkages at the 5′ end and 3 PS linkages at the 3′ end and 4 PS linkages at the internal positions of the gRNA or sgRNA sequence. In some embodiments, the chemically modified gRNA or sgRNA comprises 3 PS linkages at the 5′ end and 3 PS linkages at the 3′ end and 5 PS linkages at the internal positions of the gRNA or sgRNA sequence. In some embodiments, the chemically modified gRNA or sgRNA comprises 3 PS linkages at the 5′ end and 3 PS linkages at the 3′ end and 6 PS linkages at the internal positions of the gRNA or sgRNA sequence.

[0363] In some embodiments, the chemically modified gRNA or sgRNA comprises additional modified or unmodified nucleotide (N) with phosphodiester linkage, wherein N is an A, C, G, U, dA (deoxy A), dC (deoxyC), dG (deoxyG), or T, and any combinations thereof. In some embodiments, the chemically modified gRNA or sgRNA comprises 1, 2, 3, 4, or 5 additional N with phosphodiester linkage, wherein N is an A, G, U, dA, dG, dC, or T, and any combinations thereof. In some embodiments, the chemically modified gRNA or sgRNA comprises 1, 2, 3, 4, or 5 additional N with phosphodiester linkage at the 5′ or 3′ end. In one embodiment, the chemically modified gRNA or sgRNA comprises 1, 2, 3, 4, or 5 additional N with phosphodiester linkage at the 5′ end. In a preferred embodiment, the chemically modified gRNA or sgRNA comprises 1, 2, 3, 4, or 5 additional N with phosphodiester linkage at the 3′ end. In some embodiments, the chemically modified gRNA or sgRNA comprises 1, 2, 3, 4, or 5 additional N with phosphodiester linkage and each N is the same modified or unmodified nucleotide. For example, the chemically modified gRNA or sgRNA may comprise 4 additional N with phosphodiester linkage and each N of the 4 additional N is A, C, G, U, dA, dC, dG, or T. For example, the chemically modified gRNA or sgRNA may comprise 4 additional N with phosphodiester linkage and each N of the 4 additional N is A. For example, the chemically modified gRNA or sgRNA may comprise 3 additional N with phosphodiester linkage and each N of the 3 additional N is A, C, G, U, dA, dC, dG, or T. For example, the chemically modified gRNA or sgRNA may comprise 3 additional N with phosphodiester linkage and each N of the 3 additional N is A. For example, the chemically modified gRNA or sgRNA may comprise 3 additional N with phosphodiester linkage and each N of the 3 additional N is C. For example, the chemically modified gRNA or sgRNA may comprise 3 additional N with phosphodiester linkage and each N of the 3 additional N is G. For example, the chemically modified gRNA or sgRNA may comprise 3 additional N with phosphodiester linkage and each N of the 3 additional N is U. For example, the chemically modified gRNA or sgRNA may comprise 3 additional N with phosphodiester linkage and each N of the 3 additional N is dA. For example, the chemically modified gRNA or sgRNA may comprise 3 additional N with phosphodiester linkage and each N of the 3 additional N is dC. For example, the chemically modified gRNA or sgRNA may comprise 3 additional N with phosphodiester linkage and each N of the 3 additional N is dG. For example, the chemically modified gRNA or sgRNA may comprise 3 additional N with phosphodiester linkage and each N of the 3 additional N is T.

[0364] In some embodiments, the chemically modified gRNA or sgRNA comprises additional Uracil (U) with phosphodiester linkage at the 5′ or 3′ end. In one embodiment, the chemically modified gRNA or sgRNA comprises additional U with phosphodiester linkage at the 5′ end. In a preferred embodiment, the chemically modified gRNA or sgRNA comprises additional U with phosphodiester linkage at the 3′ end. In some embodiments, the chemically modified gRNA or sgRNA comprises 1, 2, 3, 4, or 5 additional U with phosphodiester linkage at the 5′ or 3′ end. In some embodiments, the chemically modified gRNA or sgRNA comprises 1 additional U with phosphodiester linkage at the 5′ end. In some embodiments, the chemically modified gRNA or sgRNA comprises 1 additional U with phosphodiester linkage at the 3′ end. In some embodiments, the chemically modified gRNA or sgRNA comprises 2 additional U with phosphodiester linkage at the 5′ end. In some embodiments, the chemically modified gRNA or sgRNA comprises 2 additional U with phosphodiester linkage at the 3′ end. In some embodiments, the chemically modified gRNA or sgRNA comprises 3 additional U with phosphodiester linkage at the 5′ end. In a preferred embodiment, the chemically modified gRNA or sgRNA comprises 3 additional U with phosphodiester linkage at the 3′ end. In some embodiments, the chemically modified gRNA or sgRNA comprises 4 additional U with phosphodiester linkage at the 5′ end. In some embodiments, the chemically modified gRNA or sgRNA comprises 4 additional U with phosphodiester linkage at the 3′ end. In some embodiments, the chemically modified gRNA or sgRNA comprises 5 additional U with phosphodiester linkage at the 5′ end. In some embodiments, the chemically modified gRNA or sgRNA comprises 5 additional U with phosphodiester linkage at the 3′ end.

[0365] In some embodiments, the chemically modified gRNA or sgRNA comprises a ribonebularine (depicted as “X” in this application, e.g., in Table 1 or Table 24). In some embodiments, the chemically modified gRNA or sgRNA comprises 0, 1, 2, 3, 4, 5, 6, 7, 8, 9, or 10 ribonebularines. In some embodiments, the chemically modified gRNA or sgRNA does not comprise ribonebularine. In some embodiments, the chemically modified gRNA or sgRNA comprises 1 ribonebularine. In some embodiments, the chemically modified gRNA or sgRNA comprises 2 ribonebularines. In some embodiments, the chemically modified gRNA or sgRNA comprises 3 ribonebularines. In some embodiments, the chemically modified gRNA or sgRNA comprises 4 ribonebularines. In some embodiments, the chemically modified gRNA or sgRNA comprises 5 ribonebularines. In some embodiments, the chemically modified gRNA or sgRNA comprises 6 ribonebularines. In some embodiments, the chemically modified gRNA or sgRNA comprises 7 ribonebularines. In some embodiments, the chemically modified gRNA or sgRNA comprises 8 ribonebularines. In some embodiments, the chemically modified gRNA or sgRNA comprises 9 ribonebularines. In some embodiments, the chemically modified gRNA or sgRNA comprises 10 ribonebularines. In some embodiments, the nebularine replaces an adenine in an unmodified gRNA or sgRNA or sgRNA or sgRNA. In some embodiments, the nebularine is in the spacer sequence. In some embodiments, the nebularine is in a tracrRNA sequence. In some embodiments, the nebularine is in a crRNA sequence in the tracrRNA sequence. In some embodiments, the nebularine is in a stem loop structure in the tracrRNA sequence.

[0366] In some embodiments, the chemically modified gRNA or sgRNA comprises a 2′-O-methylnebularine (depicted as “x” in this application, e.g., in Table 1 or Table 24). In some embodiments, the chemically modified gRNA or sgRNA comprises 0, 1, 2, 3, 4, 5, 6, 7, 8, 9, or 10 2′—O-methylnebularines. In some embodiments, the chemically modified gRNA or sgRNA does not comprise 2′-O-methylnebularine. In some embodiments, the chemically modified gRNA or sgRNA comprises 1 2′—O-methylnebularine. In some embodiments, the chemically modified gRNA or sgRNA comprises 2 2′—O-methylnebularines. In some embodiments, the chemically modified gRNA or sgRNA comprises 3 2′—O-methylnebularines. In some embodiments, the chemically modified gRNA or sgRNA comprises 4 2′—O-methylnebularines. In some embodiments, the chemically modified gRNA or sgRNA comprises 5 2′—O-methylnebularines. In some embodiments, the chemically modified gRNA or sgRNA comprises 6 2′—O-methylnebularines. In some embodiments, the chemically modified gRNA or sgRNA comprises 7 2′—O-methylnebularines. In some embodiments, the chemically modified gRNA or sgRNA comprises 8 2′—O-methylnebularines. In some embodiments, the chemically modified gRNA or sgRNA comprises 9 2′—O-methylnebularines. In some embodiments, the chemically modified gRNA or sgRNA comprises 10 2′—O-methylnebularines. In some embodiments, the 2′-O-methylnebularine replaces an adenine in an unmodified gRNA or sgRNA or sgRNA or sgRNA. In some embodiments, the 2′-O-methylnebularine is in the spacer sequence. In some embodiments, the 2′-O-methylnebularine is in a tracrRNA sequence. In some embodiments, the 2′-O-methylnebularine is in a crRNA sequence in the tracrRNA sequence. In some embodiments, the 2′-O-methylnebularine is in a stem loop structure in the tracrRNA sequence.

[0367] In some embodiments, the chemically modified gRNA or sgRNA comprises a 2′-deoxynebularine (depicted as “dX” in this application, e.g., in Table 1 or Table 24). In some embodiments, the chemically modified gRNA or sgRNA comprises 0, 1, 2, 3, 4, 5, 6, 7, 8, 9, or 10 2′-deoxynebularine. In some embodiments, the chemically modified gRNA or sgRNA does not comprise 2′-deoxynebularine. In some embodiments, the chemically modified gRNA or sgRNA comprises 1 2′-deoxynebularine. In some embodiments, the chemically modified gRNA or sgRNA comprises 2 2′-deoxynebularine. In some embodiments, the chemically modified gRNA or sgRNA comprises 3 2′-deoxynebularines. In some embodiments, the chemically modified gRNA or sgRNA comprises 4 2′-deoxynebularines. In some embodiments, the chemically modified gRNA or sgRNA comprises 5 2′-deoxynebularines. In some embodiments, the chemically modified gRNA or sgRNA comprises 6 2′-deoxynebularines. In some embodiments, the chemically modified gRNA or sgRNA comprises 7 2′-deoxynebularines. In some embodiments, the chemically modified gRNA or sgRNA comprises 8 2′-deoxynebularines. In some embodiments, the chemically modified gRNA or sgRNA comprises 9 2′-deoxynebularines. In some embodiments, the chemically modified gRNA or sgRNA comprises 10 2′-deoxynebularines. In some embodiments, the 2′-deoxynebularine replaces an adenine in an unmodified gRNA or sgRNA or sgRNA or sgRNA. In some embodiments, the 2′-deoxynebularine is in the spacer sequence. In some embodiments, the 2′-deoxynebularine is in a tracrRNA sequence. In some embodiments, the 2′-deoxynebularine is in a crRNA sequence in the tracrRNA sequence. In some embodiments, the 2′-deoxynebularine is in a stem loop structure in the tracrRNA sequence.

[0368] In some embodiments, the chemically modified gRNA or sgRNA comprises a 2′-O-methylribonucleotide (2′-OMe). In some embodiments, the chemically modified gRNA or sgRNA comprises from about 0 to about 70 2′—OMe. In some embodiments, the chemically modified gRNA or sgRNA comprises 0, 1, 2, 3, 4, 5, 6, 7, 8, 9, 10, 11, 12, 13, 14, 15, 16, 17, 18, 19, 20, 21, 22, 23, 24, 25, 26, 27, 28, 29, 30, 31, 32, 33, 34, 35, 36, 37, 38, 39, 40, 41, 42, 43, 44, 45, 46, 47, 48, 49, 50, 51, 52, 53, 54, 55, 56, 57, 58, 59, 60, 61, 62, 63, 64, 65, 66, 67, 68, 69, or 70 2′—OMe. In some embodiments, the chemically modified gRNA or sgRNAs may comprise from about 0 to about 70 2′—OMe. In some embodiments, the chemically modified gRNA or sgRNAs may comprise from about 0 to about 10, about 0 to about 20, about 0 to about 30, about 0 to about 35, about 0 to about 40, about 0 to about 45, about 0 to about 50, about 0 to about 55, about 0 to about 60, about 0 to about 65, about 0 to about 70, about 10 to about 20, about 10 to about 30, about 10 to about 35, about 10 to about 40, about 10 to about 45, about 10 to about 50, about 10 to about 55, about 10 to about 60, about 10 to about 65, about 10 to about 70, about 20 to about 30, about 20 to about 35, about 20 to about 40, about 20 to about 45, about 20 to about 50, about 20 to about 55, about 20 to about 60, about 20 to about 65, about 20 to about 70, about 30 to about 35, about 30 to about 40, about 30 to about 45, about 30 to about 50, about 30 to about 55, about 30 to about 60, about 30 to about 65, about 30 to about 70, about 35 to about 40, about 35 to about 45, about 35 to about 50, about 35 to about 55, about 35 to about 60, about 35 to about 65, about 35 to about 70, about 40 to about 45, about 40 to about 50, about 40 to about 55, about 40 to about 60, about 40 to about 65, about 40 to about 70, about 45 to about 50, about 45 to about 55, about 45 to about 60, about 45 to about 65, about 45 to about 70, about 50 to about 55, about 50 to about 60, about 50 to about 65, about 50 to about 70, about 55 to about 60, about 55 to about 65, about 55 to about 70, about 60 to about 65, about 60 to about 70, or about 65 to about 70 2′—OMe. In some embodiments, the chemically modified gRNA or sgRNAs may comprise from about 0, about 10, about 20, about 30, about 35, about 40, about 45, about 50, about 55, about 60, about 65, or about 70 2′—OMe. In some embodiments, the chemically modified gRNA or sgRNAs may comprise from at least about 0, about 10, about 20, about 30, about 35, about 40, about 45, about 50, about 55, about 60, or about 65 2′—OMe. In some embodiments, the chemically modified gRNA or sgRNAs may comprise from at most about 10, about 20, about 30, about 35, about 40, about 45, about 50, about 55, about 60, about 65, or about 70 2′—OMe. In some embodiments, the chemically modified gRNA or sgRNA does not comprise 2′-OMe. In some embodiments, the chemically modified gRNA or sgRNA comprises 62 2′—OMe. In some embodiments, the chemically modified gRNA or sgRNA comprises 54 2′—OMe.

[0369] In some embodiments, the chemically modified gRNA or sgRNA comprises 2′-OMe at the 5′ end of the gRNA or sgRNA sequence. In some embodiments, the chemically modified gRNA or sgRNA comprises 2′-OMe at the 3′ end of the gRNA or sgRNA sequence. In some embodiments, the chemically modified gRNA or sgRNA comprises 2′-OMe at the internal positions of the gRNA or sgRNA sequence. In some embodiments, the chemically modified gRNA or sgRNA comprises 2′-OMe at the 5′ end, 3′ end, or internal positions of the gRNA or sgRNA sequence. In some embodiments, the chemically modified gRNA or sgRNA comprises 2′-OMe at the 5′ end, 3′ end, and internal positions of the gRNA or sgRNA sequence. In some embodiments, the chemically modified gRNA or sgRNA does not comprise 2′-OMe at the positions 2, 3, 4, 23, 24, 25, 27, 31, or 42, or any combinations thereof, in the 5′-3′ direction in the gRNA or sgRNA sequence. In some embodiments, the chemically modified gRNA or sgRNA does not comprise 2′-OMe at the positions 2, 3, 4, 23, 24, 25, 27, 31, and 42 in the 5′-3′ direction in the gRNA or sgRNA sequence.

[0370] An exemplary chemically modified gRNA or sgRNA sequence is shown below:

(SEQ ID NO: 55)
5′-csasgsGUUCCAUGGGAUGCUCUgUUUUAGagcuaGaaauagcaaGU
UaAaAuAaggCUaGUCcGUUAucAAcuuGaaaaaguGgcaccgAgUCggu
gcusususu-3

wherein the uppercase A, U, G, or C denote a ribonucleotide adenosine, uridine, guanine, or cytidine, the lowercase a, u, g, and c indicate 2′-O-Methyl-modified adenine, uridine, guanine, and cytidine, and “s” denotes phosphorothioate (PS) linkage.

[0371] An exemplary chemically modified spacer sequence is shown below:

(SEQ ID NO: 56)
5′-csasgsGUUCCAUGGGAUGCUCU-3′

wherein the uppercase A, U, G, or C denote a ribonucleotide adenosine, uridine, guanine, or cytidine, the lowercase a, u, g, and c indicate 2′-O-Methyl-modified adenine, uridine, guanine, and cytidine, and “s” denotes phosphorothioate (PS) linkage.

[0372] An exemplary chemically modified tracrRNA sequence is shown below:

(SEQ ID NO: 57)
5′-gUUUUAGagcuaGaaauagcaaGUUaAaAuAaggCUaGUCcGUUAuc
AAcuuGaaaaaguGgcaccgAgUCggugcusususu-3′

wherein the uppercase A, U, G, or C denote a ribonucleotide adenosine, uridine, guanine, or cytidine, the lowercase a, u, g, and c indicate 2′-O-Methyl-modified adenine, uridine, guanine, and cytidine, and “s” denotes phosphorothioate (PS) linkage.

[0373] Another exemplary chemically modified gRNA or sgRNA sequence is shown below:

(SEQ ID NO: 2238)
5'-csasgsGUUCCAUGGGAUGCUCUgUUUUAGagcuagaaauagcaaGU
UaAaAuAaggcuaGUccGUUAucAAcuugaaaaagugGcaccgagucggu
gcusususu-3'

wherein the uppercase A, U, G, or C denote a ribonucleotide adenosine, uridine, guanine, or cytidine, the lowercase a, u, g, and c indicate 2′-O-Methyl-modified adenine, uridine, guanine, and cytidine, and “s” denotes phosphorothioate (PS) linkage.

[0374] Another exemplary chemically modified tracrRNA sequence is shown below:

(SEQ ID NO: 2241)
:5'-gUUUUAGagcuagaaauagcaaGUUaAaAuAaggcuaGUccGUUAu
cAAcuugaaaaagugGcaccgagucggugcusususu-3'

[0375] Another exemplary chemically modified guide RNA sequence is shown below: 5′-cscscsGCACCTTGGCGCAGCGGGUUUUAGAGCUAGAAAUAGCAAGUUAAAAUAA GGCUAGUCCGUUAUCAACUUGAAAAAGUGGCACCGAGUCGGUGCUsususu-3′ (SEQ ID NO: 58), wherein the uppercase A, U, G, or C denote a ribonucleotide adenosine, uridine, guanine, or cytidine, the lowercase a, u, g, and c indicate 2′-O-Methyl-modified adenine, uridine, guanine, and cytidine, and “s” denotes phosphorothioate (PS) linkage.

[0376] Another exemplary chemically modified guide RNA sequence is shown below:

(GA091)
(SEQ ID NO: 59)
5'-asasgsAUACCUGAAUAACCCUCGUUUUAGAGCUAGAAAUAGCAAGU
UAAAAUAAGGCUAGUCCGUUAUCAACUUGAAAAAGUGGCACCGAGUCGGU
GCUsususu-3'

[0377] Another exemplary chemically modified guide RNA sequence is shown below:

(GA098)
(SEQ ID NO: 60)
5'-asasgsAUACCUGAAUAACCCUCGUUUUAGAgcuagaaauagcAAGU
UAAAAUAAGGCUAGUCCGUUAUCAacuugaaaaaguggcaccgagucggu
gcusususu 3'

wherein the uppercase A, U, G, or C denote a ribonucleotide adenosine, uridine, guanine, or cytidine, the lowercase a, u, g, and c indicate 2′-O-Methyl-modified adenine, uridine, guanine, and cytidine, and “s” denotes phosphorothioate (PS) linkage.

[0378] Another exemplary chemically modified guide RNA sequence is shown below:

(GA099)
(SEQ ID NO: 2242)
5'-asasgsAUACCUGAAUAACCCUCgUUUUAGagcuaGaaauagcaaGU
UaAaAuAaggCUaGUCcGUUAucAAcuuGaaaaaguGgcaccgAgUCggu
gcusususu-3'

wherein the uppercase A, U, G, or C denote a ribonucleotide adenosine, uridine, guanine, or cytidine, the lowercase a, u, g, and c indicate 2′-O-Methyl-modified adenine, uridine, guanine, and cytidine, and “s” denotes phosphorothioate (PS) linkage.

[0379] Another exemplary chemically modified guide RNA sequence is shown below:

(GA100)
(SEQ ID NO: 2243)
5'-asasgsAUACCUGAAUAACCCUCgUUUUAGagcuagaaauagcaaGU
UaAaAuAaggcuaGUccGUUAucAAcuugaaaaagugGcaccgagucggu
gcusususu-3'

wherein the uppercase A, U, G, or C denote a ribonucleotide adenosine, uridine, guanine, or cytidine, the lowercase a, u, g, and c indicate 2′-O-Methyl-modified adenine, uridine, guanine, and cytidine, and “s” denotes phosphorothioate (PS) linkage.

[0380] Another exemplary chemically modified guide RNA sequence is shown below:

(GA385)
(SEQ ID NO: 11)
5'-cscscsGCACCUUGGCGCAGCGGgUUUUAGagcuagaaauagcaaGU
UaAaAuAaggcuaGUccGUUAucAAcuugaaaaagugGcaccgagucggu
gcusususuuuu-3'

wherein the uppercase A, U, G, or C denote a ribonucleotide adenosine, uridine, guanine, or cytidine, the lowercase a, u, g, and c indicate 2′-O-Methyl-modified adenine, uridine, guanine, and cytidine, and “s” denotes phosphorothioate (PS) linkage.

[0381] Another exemplary chemically modified guide RNA sequence is shown below:

(GA386)
(SEQ ID NO: 2260)
5'-cscscsGCACCUUGGCGCAGCGGgUUUUAGagcuagaaauagcaaGU
UaAaAuAaggcuaGUccGUUAucAAcuugaaaaagugGcaccgagucggu
gcusususuuUu-3',

wherein the uppercase A, U, G, or C denote a ribonucleotide adenosine, uridine, guanine, or cytidine, the lowercase a, u, g, and c indicate 2′-O-Methyl-modified adenine, uridine, guanine, and cytidine, and “s” denotes phosphorothioate (PS) linkage.

[0382] Another exemplary chemically modified guide RNA sequence is shown below:

(GA387)
(SEQ ID NO: 12)
5′-cscscsGCACCUUGGCGCAGCGgUUUUAGagcuaGaaauagcaaGUU
aAaAuAaggcuaGUccGUUAucAAcuuGaaaaagugGcaccgagucggug
cuususuuuu-3′,

wherein the uppercase A, U, G, or C denote a ribonucleotide adenosine, uridine, guanine, or cytidine, the lowercase a, u, g, and c indicate 2′-O-Methyl-modified adenine, uridine, guanine, and cytidine, and “s” denotes phosphorothioate (PS) linkage.

[0383] Additional chemically modified guide RNA sequences and target gene information are provided in Table 1 or Table 24.

[0384] In some embodiments, the chemical modification comprises a phosphorothioate linkage (PS). In some embodiments, the sgRNA comprises a phosphorothioate linkage (PS) at a 5′ end or at a 3′ end. In some embodiments, the sgRNA comprises two and no more than two contiguous phosphorothioate linkages (PS) at the 5′ end or at the 3′ end. In some embodiments, the sgRNA comprises three contiguous phosphorothioate linkages (PS) at the 5′ end or at the 3′ end. In some embodiments, the sgRNA comprises the sequence 5′-UsUsU-3′ at the 3′end or at the 5′ end, wherein U indicates a uridine and wherein s indicates a phosphorothioate linkage (PS).

[0385] In some aspects, provided herein, is an sgRNA that comprises (i) a spacer sequence and (ii) a tracrRNA sequence, wherein the spacer sequence hybridizes with a target polynucleotide sequence in a PCSK9 gene or an ANGPTL3 gene when contacted with the target polynucleotide sequence, wherein the tracrRNA sequence binds a Cas protein in a base editor system when contacted with the base editor system, and wherein the sgRNA comprises a nebularine or a deoxynebularine. In some embodiments, the nebularine or the deoxynebularine replaces an adenine in an unmodified sgRNA. In some embodiments, the nebularine or the deoxynebularine is in the spacer sequence. In some embodiments, wherein the nebularine or the deoxynebularine is in the tracrRNA sequence. In some embodiments, the nebularine or the deoxynebularine is in a tracrRNA sequence. In some embodiments, the nebularine or the deoxynebularine is in a crRNA sequence in the tracrRNA sequence. In some embodiments, the nebularine or the deoxynebularine is in a stem loop structure in the tracrRNA sequence.

[0386] In some aspects, provided herein, is a single guide RNA that comprises a sequence selected from Table 1 or Table 24, wherein a, u, g, and c indicate 2′-OMe modified adenine, uridine, guanine, and cytidine, wherein s indicates a phosphorothioate (PS) linkage.

[0387] In some embodiments, the chemically modified guide RNA comprises an unmodified tracrRNA sequence GUUUUAGAGCUAGAAAUAGCAAGUUAAAAUAAGGCUAGUCCGUUAUCAACUU GAAAAAGUGGCACCGAGUCGGUGCUUUU (SEQ ID NO: 61). In some embodiments, the chemically modified guide RNA comprises a tracrRNA sequence GUUUUAGAGCUAGAAAUAGCAAGUUAAAAUAAGGCUAGUCCGUUAUCAACUU GAAAAAGUGGCACCGAGUCGGUGCUUUU (SEQ ID NO: 61), which comprises 1 or more modification.

[0388] In some embodiments, the chemically modified guide RNA comprises an oligonucleotide that is at least 60%, at least 65%, at least 70%, at least 75%, at least 80%, at least 85%, at least 90%, at least 95%, at least 96%, at least 97%, at least 98%, at least 99%, at least 99.5%, at least 99.7%, or at least 99.9% identical to any one of the chemically modified guide RNAs listed in Table 1 or Table 24. In some embodiments, the chemically modified guide RNA comprises any one of the chemically modified guide RNAs listed in Table 1 or Table 24. In some embodiments, the chemically modified guide RNA is any one of the chemically modified guide RNAs listed in Table 1 or Table 24. In some embodiments, the chemically modified guide RNA comprises an oligonucleotide that is at least 60%, at least 65%, at least 70%, at least 75%, at least 80%, at least 85%, at least 90%, at least 95%, at least 96%, at least 97%, at least 98%, at least 99%, at least 99.5%, at least 99.7%, or at least 99.9% identical to any one of the chemically modified guide RNAs of SEQ ID NOs: 9-11, 55, 59, 253-452, 1618-1635, 1637-1800, 1802-2135, and 2191. In some embodiments, the chemically modified guide RNA comprises any one of the chemically modified guide RNAs of SEQ ID NOs: 9-11, 55, 59, 253-452, 1618-1635, 1637-1800, 1802-2135, and 2191. In some embodiments, the chemically modified guide RNA is any one of the chemically modified guide RNAs of SEQ ID NOs: 9-11, 55, 59, 253-452, 1618-1635, 1637-1800, 1802-2135, and 2191.

### Base Editing at Splice Sites

[0389] In an aspect, provided herein are base editor systems and methods of using same for modifying target genes by generating a genetic alteration in the DNA sequence that occurs at the boundary of an exon and an intron (splice site) at a splice site of a target gene. In some embodiments, the base editor system modifies a nucleobase at a splice acceptor site of a target gene. In some embodiments, the base editor system modifies a nucleobase at a splice donor site of a target gene. Modification at a splice donor or splice acceptor site may result in alternated transcripts. In some embodiments, modification at a splice donor or splice acceptor site results in aberrant transcripts. In some embodiments, modification at a splice donor or splice acceptor site results in unstable transcripts that are subject to degradation upon transcription. In some embodiments, modification at a splice donor or splice acceptor site results in a premature stop codon in the transcript. In certain embodiments, the methods comprise knocking out or knocking down genes by targeting splice acceptor-splice donor (SA-SD) sites or premature STOP (pmSTOP) sites. For such methods, guide polynucleotides are designed to disrupt one or more slice acceptor/donor sites within the target nucleotide sequence. In some embodiments, a guide polynucleotide, e.g. a single guide RNA comprises a sequence of at least 10 contiguous nucleotides or a sequence of 17-23 contiguous nucleotides, that is complementary to a target sequence in the genome of an organism and comprises a target base pair.

[0390] Disruptions at SA-SD sites are particularly advantageous because one may knock out coding sequence and non-coding RNAs (ncRNAs) without stop codon read through. Efficiency of base editing can be determined on the genomic level by EditR analysis of Sanger sequencing traces or by next generation sequencing (NGS), and also on the protein level by flow cytometry. Splice acceptor-splice donor base editing gRNAs that target the splice donor regions and the splice acceptor region exhibit base conversion efficiency of at least 5% and, in some cases, at least 80% or greater (e.g., 5%, 10%, 15%, 20%, 25%, 30%, 35%, 40%, 45%, 50%, 55%, 60%, 65%, 70%, 75%, 80%, 85%, 90%, 95%, 99%). In some cases, SA-SD gRNAs are significantly more efficient at C-to-T conversions than gRNAs that introduce premature stop codons disrupting.

[0391] Guide RNAs for targeting SA-SD sites can be designed using an R based program that identifies gRNAs targeting all ncRNAs and protein coding gene SA-SD sites. In some cases, the user supplies the reference genome, Ensembl transcript ID of the reference sequence, protospacer adjacent motif (PAM) site, and distance to subset upstream and downstream of exon-intron boundary. The program extracts sequences of 20 base pairs+the PAM length upstream and 15 base pairs downstream of an exon-intron boundary, as well as the splice site motif. In some embodiments, a guide molecule can be from 20 to 120 bases in length, or more. In certain embodiments, a guide molecule can be from 20 to 60 bases in length, or 20 to 50 bases, or 30 to 50 bases, or 39 to 46 bases.

[0392] In some cases, it is advantageous to use chemically modified gRNAs having increased stability when transfected into mammalian cells. For example, gRNAs can be chemically modified to comprise 2′-O-methyl phosphorthioate modifications on at least one 5′ nucleotide and at least one 3′ nucleotide of each gRNA. In some cases, the three terminal 5′ nucleotides and three terminal 3′ nucleotides are chemically modified to comprise 2′-O-methyl phosphorthioate modifications.

[0393] In an aspect, provided herein are base editing systems and methods for targeting diseases for base editing disruption. The target sequence can be any disease-associated polynucleotide or gene, as have been established in the art.

[0394] Without being bound by a particular theory, where the goal is to disrupt a gene in vivo for a therapeutic purpose, cytosine base editors may be used to directly introduce stop codons into the coding sequence of the gene (nonsense mutations) by altering specific codons for glutamine (CAG-TAG, CAA-TAA), arginine (CGA-TGA), and tryptophan (TGG-TAG/TAA/TGA, with editing of cytosines on the antisense strand). In certain embodiments, adenine base editors may be used to disrupt gene function and/or expression by modifying nucleobases at splice sites of target genes. The more favorable off-target profile of adenine base editors, particularly with respect to gRNA-independent off-target DNA base editing, recommend the use of adenine base editors over cytosine base editors for therapeutic purposes. In some embodiments, a base editor, e.g. an adenosine nucleobase editor as describe herein may be used to disrupt a splice donors at the 5′ ends of introns or splice acceptors at the 3′ ends of introns. In some embodiments, splice site disruption results in the inclusion of intronic sequences in messenger RNA (mRNA)—potentially introducing nonsense, frameshift, or in-frame indel mutations that result in premature stop codons or in insertion/deletion of amino acids that disrupt protein activity—or in the exclusion of exonic sequences, which can also introduce nonsense, frameshift, or in-frame indel mutations.

[0395] Canonical splice donors comprise the DNA sequence GT on the sense strand, whereas canonical splice acceptors comprise the DNA sequence AG. In some embodiments, a base editor, e.g. an adenosine nucleobase editor as described herein can be used to generate alteration of the sequence disrupts normal splicing. In some embodiments, the adenosine base editor disrupts a complementary base in the second position in the antisense strand (GT-GC). In some embodiments, the adenosine base editor disrupts the first position in the sense strand (AG-GG).

[0396] Examples of useful applications of mutation or disruption of an endogenous gene sequence that reduces or abolishes expression of the target gene related to the disease, with significantly reduced off-target effect, indels frequency, and/or other unintended genetic interruptions related to double stranded breaks that result from traditional CRISPR-Cas9 nuclease modification. In some embodiments, the target gene is a PCSK9 gene. In some embodiments, the target gene is an ANGPTL3 gene.

[0397] The chemically modified gRNAs or sgRNAs of the present disclosure can enhance or increase the binding affinity between a programmable DNA binding component of a base editor fusion protein, such as a Cas protein (e.g., a Cas9 protein, a nuclease inactive Cas9 protein, a Cas9 nickase) and guide RNAs (e.g., gRNAs or sgRNAs). In some embodiments, the chemically modified gRNAs or sgRNAs of the present disclosure can enhance or increase the binding affinity between a Cas protein and gRNAs or sgRNAs by at least 1%, 2%, 3%, 4%, 5%, 6%, 7%, 8%, 9%, 10%, 11%, 12%, 13%, 14%, 15%, 20%, 25%, 30%, 35%, 40%, 50%, 75%, 90%, 100%, 110%, 120%, 130%, 140%, 150%, 160%, 170%, 180%, 190%, 200%, 210%, 220%, 230%, 240%, 250%, 260%, 270%, 280%, 290%, 300%, 400% 500%, 600%, 700%, 800%, 900%, or 1000% compared to unmodified gRNAs or sgRNAs. In some embodiments, the chemically modified gRNAs or sgRNAs of the present disclosure can enhance or increase the binding affinity between a Cas protein, e.g. a Cas9 protein, a nuclease inactive Cas9 protein, a Cas9 nickase, and gRNAs or sgRNAs by about 20% to about 300%, about 50% to about 300%, about 100% to about 300%, about 150% to about 300%, about 20% to about 50%, about 20% to about 100%, about 20% to about 150%, about 20% to about 200%, about 20% to about 250%, about 50% to about 100%, about 50% to about 150%, about 50% to about 200%, about 50% to about 250%, about 100% to about 150%, about 100% to about 200%, about 100% to about 250%, about 150% to about 200%, about 150% to about 250%, about 200% to about 250%, at least about 20%, at least about 50%, at least about 100%, at least about 150%, at least about 200%, at least about 250%, or at least about 300% compared to unmodified gRNAs or sgRNAs. In some embodiments, the chemically modified gRNAs or sgRNAs of the present disclosure can enhance or increase the binding affinity between a base editor fusion or Cas protein and gRNAs or sgRNAs by about 20% to about 300%, about 50% to about 300%, about 100% to about 300%, about 150% to about 300%, about 20% to about 50%, about 20% to about 100%, about 20% to about 150%, about 20% to about 200%, about 20% to about 250%, about 50% to about 100%, about 50% to about 150%, about 50% to about 200%, about 50% to about 250%, about 100% to about 150%, about 100% to about 200%, about 100% to about 250%, about 150% to about 200%, about 150% to about 250%, about 200% to about 250%, at least about 20%, at least about 50%, at least about 100%, at least about 150%, at least about 200%, at least about 250%, or at least about 300% compared unmodified gRNAs or sgRNAs. In some embodiments, the chemically modified gRNAs or sgRNAs of the present disclosure can enhance or increase the binding affinity between a Cas protein or component of a base editor fusion protein and gRNAs or sgRNAs by at least 1.1-fold, 1.2-fold, 1.3-fold, 1.4-fold, 1.5-fold, 1.6-fold, 1.7-fold, 1.8-fold, 1.9-fold, 2-fold, 2.5-fold, 3-fold, 3.5-fold, 4-fold, 4.5-fold, 5-fold, 6-fold, 7-fold, 8-fold, 9-fold, 10-fold, or more than 10-fold compared to unmodified gRNAs or sgRNAs.

[0398] The chemically modified gRNAs or sgRNAs of the present disclosure can enhance or increase the binding affinity between a programmable DNA binding component of a base editor fusion protein, such as a Cas protein (e.g., a Cas9 protein, a nuclease inactive Cas9 protein, a Cas9 nickase) and the tracrRNA sequence of the guide RNAs (e.g., gRNAs or sgRNAs). In some embodiments, the chemically modified gRNAs or sgRNAs of the present disclosure can enhance or increase the binding affinity between a base editor fusion or Cas protein and the tracrRNA sequence of the gRNAs or sgRNAs by at least 1%, 2%, 3%, 4%, 5%, 6%, 7%, 8%, 9%, 10%, 11%, 12%, 13%, 14%, 15%, 20%, 25%, 30%, 35%, 40%, 50%, 75%, 90%, 100%, 110%, 120%, 130%, 140%, 150%, 160%, 170%, 180%, 190%, 200%, 210%, 220%, 230%, 240%, 250%, 260%, 270%, 280%, 290%, 300%, 400% 500%, 600%, 700%, 800%, 900%, or 1000% compared to unmodified gRNAs or sgRNAs. In some embodiments, the chemically modified gRNAs or sgRNAs of the present disclosure can enhance or increase the binding affinity between a base editor fusion or Cas protein and the tracrRNA sequence of the gRNAs or sgRNAs by about 20% to about 300%, about 50% to about 300%, about 100% to about 300%, about 150% to about 300%, about 20% to about 50%, about 20% to about 100%, about 20% to about 150%, about 20% to about 200%, about 20% to about 250%, about 50% to about 100%, about 50% to about 150%, about 50% to about 200%, about 50% to about 250%, about 100% to about 150%, about 100% to about 200%, about 100% to about 250%, about 150% to about 200%, about 150% to about 250%, about 200% to about 250%, at least about 20%, at least about 50%, at least about 100%, at least about 150%, at least about 200%, at least about 250%, or at least about 300% compared to unmodified gRNAs or sgRNAs. In some embodiments, the chemically modified gRNAs or sgRNAs of the present disclosure can enhance or increase the binding affinity between a base editor fusion or Cas protein and the tracrRNA sequence of the gRNAs or sgRNAs by about 20% to about 300%, about 50% to about 300%, about 100% to about 300%, about 150% to about 300%, about 20% to about 50%, about 20% to about 100%, about 20% to about 150%, about 20% to about 200%, about 20% to about 250%, about 50% to about 100%, about 50% to about 150%, about 50% to about 200%, about 50% to about 250%, about 100% to about 150%, about 100% to about 200%, about 100% to about 250%, about 150% to about 200%, about 150% to about 250%, about 200% to about 250%, at least about 20%, at least about 50%, at least about 100%, at least about 150%, at least about 200%, at least about 250%, or at least about 300% compared unmodified gRNAs or sgRNAs. In some embodiments, the chemically modified gRNAs or sgRNAs of the present disclosure can enhance or increase the binding affinity between a base editor fusion or Cas protein and the tracrRNA sequence of the gRNAs or sgRNAs by at least 1.1-fold, 1.2-fold, 1.3-fold, 1.4-fold, 1.5-fold, 1.6-fold, 1.7-fold, 1.8-fold, 1.9-fold, 2-fold, 2.5-fold, 3-fold, 3.5-fold, 4-fold, 4.5-fold, 5-fold, 6-fold, 7-fold, 8-fold, 9-fold, 10-fold, or more than 10-fold compared to unmodified gRNAs or sgRNAs.

[0399] In some embodiments, the tracrRNA sequence of the gRNAs or sgRNAs may bind a programmable DNA binding component of a base editor fusion protein, such as a Cas protein (,) with increased binding affinity compared to a tracrRNA sequence in an unmodified sgRNA. The type II Cas protein may be used as a system or base editor as described herein. In some embodiments, the tracrRNA sequence of the gRNAs or sgRNAs may bind a Type II Cas protein with at least 1%, 2%, 3%, 4%, 5%, 6%, 7%, 8%, 9%, 10%, 11%, 12%, 13%, 14%, 15%, 20%, 25%, 30%, 35%, 40%, 50%, 75%, 90%, 100%, 110%, 120%, 130%, 140%, 150%, 160%, 170%, 180%, 190%, 200%, 210%, 220%, 230%, 240%, 250%, 260%, 270%, 280%, 290%, 300%, 400% 500%, 600%, 700%, 800%, 900%, or 1000% increased binding affinity compared to a tracrRNA sequence in an unmodified sgRNA. In some embodiments, the tracrRNA sequence of the gRNAs or sgRNAs may bind a base editor comprising a Type II Cas protein with at least 1.1-fold, 1.2-fold, 1.3-fold, 1.4-fold, 1.5-fold, 1.6-fold, 1.7-fold, 1.8-fold, 1.9-fold, 2-fold, 2.5-fold, 3-fold, 3.5-fold, 4-fold, 4.5-fold, 5-fold, 6-fold, 7-fold, 8-fold, 9-fold, 10-fold, or more than 10-fold increased binding affinity compared to a tracrRNA sequence in an unmodified sgRNA. In some embodiments, the tracrRNA sequence of the gRNAs or sgRNAs may bind a base editor fusion protein comprising a Cas9 protein with increased binding affinity compared to a tracrRNA sequence in an unmodified sgRNA. In some embodiments, the tracrRNA sequence of the gRNAs or sgRNAs may bind a Cas9 protein with at least 1%, 2%, 3%, 4%, 5%, 6%, 7%, 8%, 9%, 10%, 11%, 12%, 13%, 14%, 15%, 20%, 25%, 30%, 35%, 40%, 50%, 75%, 90%, 100%, 110%, 120%, 130%, 140%, 150%, 160%, 170%, 180%, 190%, 200%, 210%, 220%, 230%, 240%, 250%, 260%, 270%, 280%, 290%, or 300% increased binding affinity compared to a tracrRNA sequence in an unmodified sgRNA. In some embodiments, the tracrRNA sequence of the gRNAs or sgRNAs may bind a base editor fusion protein comprising a Cas9 protein with at least 1.1-fold, 1.2-fold, 1.3-fold, 1.4-fold, 1.5-fold, 1.6-fold, 1.7-fold, 1.8-fold, 1.9-fold, 2-fold, 2.5-fold, 3-fold, 3.5-fold, 4-fold, 4.5-fold, 5-fold, 6-fold, 7-fold, 8-fold, 9-fold, 10-fold, or more than 10-fold increased binding affinity compared to a tracrRNA sequence in an unmodified sgRNA.

[0400] The chemically modified gRNAs or sgRNAs of the present disclosure can reduce off-target effect in gene modification (e.g., gene or genome editing) of the target sequence. In some embodiments, the chemically modified gRNAs or sgRNAs of the present disclosure can reduce off-target effect in gene modification of the target sequence by at least 1%, 2%, 3%, 4%, 5%, 6%, 7%, 8%, 9%, 10%, 11%, 12%, 13%, 14%, 15%, 20%, 25%, 30%, 35%, 40%, 50%, 75%, 90%, 100%, 110%, 120%, 130%, 140%, 150%, 160%, 170%, 180%, 190%, 200%, 210%, 220%, 230%, 240%, 250%, 260%, 270%, 280%, 290%, 300%, 400% 500%, 600%, 700%, 800%, 900%, or 1000% compared to unmodified gRNAs or sgRNAs. In some embodiments, the chemically modified gRNAs or sgRNAs of the present disclosure can reduce off-target effect in gene modification of the target sequence by about 20% to about 300%, about 50% to about 300%, about 100% to about 300%, about 150% to about 300%, about 20% to about 50%, about 20% to about 100%, about 20% to about 150%, about 20% to about 200%, about 20% to about 250%, about 50% to about 100%, about 50% to about 150%, about 50% to about 200%, about 50% to about 250%, about 100% to about 150%, about 100% to about 200%, about 100% to about 250%, about 150% to about 200%, about 150% to about 250%, about 200% to about 250%, at least about 20%, at least about 50%, at least about 100%, at least about 150%, at least about 200%, at least about 250%, or at least about 300% compared to unmodified gRNAs or sgRNAs. In some embodiments, the chemically modified gRNAs or sgRNAs of the present disclosure can reduce off-target effect in gene modification of the target sequence by about 20% to about 300%, about 50% to about 300%, about 100% to about 300%, about 150% to about 300%, about 20% to about 50%, about 20% to about 100%, about 20% to about 150%, about 20% to about 200%, about 20% to about 250%, about 50% to about 100%, about 50% to about 150%, about 50% to about 200%, about 50% to about 250%, about 100% to about 150%, about 100% to about 200%, about 100% to about 250%, about 150% to about 200%, about 150% to about 250%, about 200% to about 250%, at least about 20%, at least about 50%, at least about 100%, at least about 150%, at least about 200%, at least about 250%, or at least about 300% compared unmodified gRNAs or sgRNAs. In some embodiments, the chemically modified gRNAs or sgRNAs of the present disclosure can reduce off-target effect in gene modification of the target sequence by at least 1.1-fold, 1.2-fold, 1.3-fold, 1.4-fold, 1.5-fold, 1.6-fold, 1.7-fold, 1.8-fold, 1.9-fold, 2-fold, 2.5-fold, 3-fold, 3.5-fold, 4-fold, 4.5-fold, 5-fold, 6-fold, 7-fold, 8-fold, 9-fold, 10-fold, or more than 10-fold compared to unmodified gRNAs or sgRNAs.

[0401] In some embodiments, the target polynucleotide sequence is in a genome, wherein the gRNA or sgRNA is capable of directing a component (e.g. Cas9) of a base editor fusion protein to effect a modification in the target polynucleotide sequence, and wherein the modification results in less off-target effect in the genome as compared to an unmodified gRNA or sgRNA. In some embodiments, the gRNA or sgRNA is capable of directing a Type II Cas protein to effect a modification in the target polynucleotide sequence wherein the modification results in at least 1%, 2%, 3%, 4%, 5%, 6%, 7%, 8%, 9%, 10%, 11%, 12%, 13%, 14%, 15%, 20%, 25%, 30%, 35%, 40%, 50%, 75%, 90%, 100%, 110%, 120%, 130%, 140%, 150%, 160%, 170%, 180%, 190%, 200%, 210%, 220%, 230%, 240%, 250%, 260%, 270%, 280%, 290%, 300%, 400% 500%, 600%, 700%, 800%, 900%, or 1000% less off-target effect in the genome as compared to an unmodified gRNA or sgRNA. In some embodiments, the gRNA or sgRNA is capable of directing a Type II Cas protein of a base editor fusion protein to effect a modification in the target polynucleotide sequence wherein the modification results in at least 1.1-fold, 1.2-fold, 1.3-fold, 1.4-fold, 1.5-fold, 1.6-fold, 1.7-fold, 1.8-fold, 1.9-fold, 2-fold, 2.5-fold, 3-fold, 3.5-fold, 4-fold, 4.5-fold, 5-fold, 6-fold, 7-fold, 8-fold, 9-fold, 10-fold, or more than 10-fold less off-target effect in the genome as compared to an unmodified gRNA or sgRNA. In some embodiments, the target polynucleotide sequence is in a genome, wherein the gRNA or sgRNA is capable of directing a Cas9 protein to effect a modification in the target polynucleotide sequence, and wherein the modification results in less off-target effect in the genome as compared to an unmodified gRNA or sgRNA. In some embodiments, the gRNA or sgRNA is capable of directing a Cas9 protein to effect a modification in the target polynucleotide sequence wherein the modification results in at least 1%, 2%, 3%, 4%, 5%, 6%, 7%, 8%, 9%, 10%, 11%, 12%, 13%, 14%, 15%, 20%, 25%, 30%, 35%, 40%, 50%, 75%, 90%, 100%, 110%, 120%, 130%, 140%, 150%, 160%, 170%, 180%, 190%, 200%, 210%, 220%, 230%, 240%, 250%, 260%, 270%, 280%, 290%, 300%, 400% 500%, 600%, 700%, 800%, 900%, or 1000% less off-target effect in the genome as compared to an unmodified gRNA or sgRNA. In some embodiments, the gRNA or sgRNA is capable of directing a Cas9. In some embodiments, the target polynucleotide sequence is in a genome, wherein the gRNA or sgRNA is capable of directing a base editor fusion protein to effect a modification in the target polynucleotide sequence, and wherein the modification results in less off-target effect in the genome as compared to an unmodified gRNA or sgRNA. In some embodiments, the gRNA or sgRNA is capable of directing a base editor fusion protein to effect a modification in the target polynucleotide sequence wherein the modification results in at least 1%, 2%, 3%, 4%, 5%, 6%, 7%, 8%, 9%, 10%, 11%, 12%, 13%, 14%, 15%, 20%, 25%, 30%, 35%, 40%, 50%, 75%, 90%, 100%, 110%, 120%, 130%, 140%, 150%, 160%, 170%, 180%, 190%, 200%, 210%, 220%, 230%, 240%, 250%, 260%, 270%, 280%, 290%, 300%, 400% 500%, 600%, 700%, 800%, 900%, or 1000% less off-target effect in the genome as compared to an unmodified gRNA or sgRNA. In some embodiments, the gRNA or sgRNA is capable of directing a base editor fusion protein to effect a modification in the target polynucleotide sequence wherein the modification results in at least 1.1-fold, 1.2-fold, 1.3-fold, 1.4-fold, 1.5-fold, 1.6-fold, 1.7-fold, 1.8-fold, 1.9-fold, 2-fold, 2.5-fold, 3-fold, 3.5-fold, 4-fold, 4.5-fold, 5-fold, 6-fold, 7-fold, 8-fold, 9-fold, 10-fold, or more than 10-fold less off-target effect in the genome as compared to an unmodified gRNA or sgRNA. In some embodiments, the modification using the chemically modified gRNAs or sgRNAs results in less off-target effect in a cell as compared to an unmodified gRNA or sgRNA. In some embodiments, the modification using the chemically modified gRNAs or sgRNAs results in at least 1%, 2%, 3%, 4%, 5%, 6%, 7%, 8%, 9%, 10%, 11%, 12%, 13%, 14%, 15%, 20%, 25%, 30%, 35%, 40%, 50%, 75%, 90%, 100%, 110%, 120%, 130%, 140%, 150%, 160%, 170%, 180%, 190%, 200%, 210%, 220%, 230%, 240%, 250%, 260%, 270%, 280%, 290%, 300%, 400% 500%, 600%, 700%, 800%, 900%, or 1000% less off-target effect in a cell as compared to an unmodified gRNA or sgRNA. In some embodiments, the modification using the chemically modified gRNAs or sgRNAs results in at least 1.1-fold, 1.2-fold, 1.3-fold, 1.4-fold, 1.5-fold, 1.6-fold, 1.7-fold, 1.8-fold, 1.9-fold, 2-fold, 2.5-fold, 3-fold, 3.5-fold, 4-fold, 4.5-fold, 5-fold, 6-fold, 7-fold, 8-fold, 9-fold, 10-fold, or more than 10-fold less off-target effect in a cell as compared to an unmodified gRNA or sgRNA.

[0402] The chemically modified gRNAs or sgRNAs of the present disclosure can enhance or increase the gene modification (e.g., gene or genome editing) efficiency. In some embodiments, the chemically modified gRNAs or sgRNAs of the present disclosure can enhance or increase the gene modification (e.g., gene or genome editing) efficiency by at least 1%, 2%, 3%, 4%, 5%, 6%, 7%, 8%, 9%, 10%, 11%, 12%, 13%, 14%, 15%, 20%, 25%, 30%, 35%, 40%, 50%, 75%, 90%, 100%, 110%, 120%, 130%, 140%, 150%, 160%, 170%, 180%, 190%, 200%, 210%, 220%, 230%, 240%, 250%, 260%, 270%, 280%, 290%, 300%, 400% 500%, 600%, 700%, 800%, 900%, or 1000% compared to unmodified gRNAs or sgRNAs. In some embodiments, the chemically modified gRNAs or sgRNAs of the present disclosure can enhance or increase the gene modification (e.g., gene or genome editing) efficiency by about 20% to about 300%, about 50% to about 300%, about 100% to about 300%, about 150% to about 300%, about 20% to about 50%, about 20% to about 100%, about 20% to about 150%, about 20% to about 200%, about 20% to about 250%, about 50% to about 100%, about 50% to about 150%, about 50% to about 200%, about 50% to about 250%, about 100% to about 150%, about 100% to about 200%, about 100% to about 250%, about 150% to about 200%, about 150% to about 250%, about 200% to about 250%, at least about 20%, at least about 50%, at least about 100%, at least about 150%, at least about 200%, at least about 250%, or at least about 300% compared to unmodified gRNAs or sgRNAs. In some embodiments, the chemically modified gRNAs or sgRNAs of the present disclosure can enhance or increase the gene modification (e.g., gene or genome editing) efficiency by about 20% to about 300%, about 50% to about 300%, about 100% to about 300%, about 150% to about 300%, about 20% to about 50%, about 20% to about 100%, about 20% to about 150%, about 20% to about 200%, about 20% to about 250%, about 50% to about 100%, about 50% to about 150%, about 50% to about 200%, about 50% to about 250%, about 100% to about 150%, about 100% to about 200%, about 100% to about 250%, about 150% to about 200%, about 150% to about 250%, about 200% to about 250%, at least about 20%, at least about 50%, at least about 100%, at least about 150%, at least about 200%, at least about 250%, or at least about 300% compared unmodified gRNAs or sgRNAs. In some embodiments, the chemically modified gRNAs or sgRNAs of the present disclosure can enhance or increase the gene modification (e.g., gene or genome editing) efficiency by at least 1.1-fold, 1.2-fold, 1.3-fold, 1.4-fold, 1.5-fold, 1.6-fold, 1.7-fold, 1.8-fold, 1.9-fold, 2-fold, 2.5-fold, 3-fold, 3.5-fold, 4-fold, 4.5-fold, 5-fold, 6-fold, 7-fold, 8-fold, 9-fold, 10-fold, or more than 10-fold compared to unmodified gRNAs or sgRNAs.

[0403] The chemically modified gRNAs or sgRNAs of the present disclosure can enhance or increase the stability of the complex of a base editor protein or component (e.g., Cas9 protein) and the guide RNAs (e.g., gRNAs or sgRNAs), for example, the stability of base editor complex. In some embodiments, the chemically modified gRNAs or sgRNAs of the present disclosure can enhance or increase the stability of the Cas protein-gRNA complex by at least 1%, 2%, 3%, 4%, 5%, 6%, 7%, 8%, 9%, 10%, 11%, 12%, 13%, 14%, 15%, 20%, 25%, 30%, 35%, 40%, 50%, 75%, 90%, 100%, 110%, 120%, 130%, 140%, 150%, 160%, 170%, 180%, 190%, 200%, 210%, 220%, 230%, 240%, 250%, 260%, 270%, 280%, 290%, 300%, 400% 500%, 600%, 700%, 800%, 900%, or 1000% compared to unmodified gRNAs or sgRNAs. In some embodiments, the chemically modified gRNAs or sgRNAs of the present disclosure can enhance or increase the stability of the base editor fusion or Cas protein-gRNA complex by about 20% to about 300%, about 50% to about 300%, about 100% to about 300%, about 150% to about 300%, about 20% to about 50%, about 20% to about 100%, about 20% to about 150%, about 20% to about 200%, about 20% to about 250%, about 50% to about 100%, about 50% to about 150%, about 50% to about 200%, about 50% to about 250%, about 100% to about 150%, about 100% to about 200%, about 100% to about 250%, about 150% to about 200%, about 150% to about 250%, about 200% to about 250%, at least about 20%, at least about 50%, at least about 100%, at least about 150%, at least about 200%, at least about 250%, or at least about 300% compared to unmodified gRNAs or sgRNAs. In some embodiments, the chemically modified gRNAs or sgRNAs of the present disclosure can enhance or increase the stability of the base editor fusion or Cas protein-gRNA complex by about 20% to about 300%, about 50% to about 300%, about 100% to about 300%, about 150% to about 300%, about 20% to about 50%, about 20% to about 100%, about 20% to about 150%, about 20% to about 200%, about 20% to about 250%, about 50% to about 100%, about 50% to about 150%, about 50% to about 200%, about 50% to about 250%, about 100% to about 150%, about 100% to about 200%, about 100% to about 250%, about 150% to about 200%, about 150% to about 250%, about 200% to about 250%, at least about 20%, at least about 50%, at least about 100%, at least about 150%, at least about 200%, at least about 250%, or at least about 300% compared unmodified gRNAs or sgRNAs. In some embodiments, the chemically modified gRNAs or sgRNAs of the present disclosure can enhance or increase the stability of the base editor fusion or Cas protein-gRNA complex by at least 1.1-fold, 1.2-fold, 1.3-fold, 1.4-fold, 1.5-fold, 1.6-fold, 1.7-fold, 1.8-fold, 1.9-fold, 2-fold, 2.5-fold, 3-fold, 3.5-fold, 4-fold, 4.5-fold, 5-fold, 6-fold, 7-fold, 8-fold, 9-fold, 10-fold, or more than 10-fold compared to unmodified gRNAs or sgRNAs.

[0404] In some embodiments, the chemically modified gRNAs or sgRNAs of the present disclosure can enhance or increase the stability of the base editor complex by at least 1%, 2%, 3%, 4%, 5%, 6%, 7%, 8%, 9%, 10%, 11%, 12%, 13%, 14%, 15%, 20%, 25%, 30%, 35%, 40%, 50%, 75%, 90%, 100%, 110%, 120%, 130%, 140%, 150%, 160%, 170%, 180%, 190%, 200%, 210%, 220%, 230%, 240%, 250%, 260%, 270%, 280%, 290%, 300%, 400% 500%, 600%, 700%, 800%, 900%, or 1000% compared to unmodified sgRNAs. In some embodiments, the chemically modified gRNAs or sgRNAs of the present disclosure can enhance or increase the stability of the base editor complex by about 20% to about 300%, about 50% to about 300%, about 100% to about 300%, about 150% to about 300%, about 20% to about 50%, about 20% to about 100%, about 20% to about 150%, about 20% to about 200%, about 20% to about 250%, about 50% to about 100%, about 50% to about 150%, about 50% to about 200%, about 50% to about 250%, about 100% to about 150%, about 100% to about 200%, about 100% to about 250%, about 150% to about 200%, about 150% to about 250%, about 200% to about 250%, at least about 20%, at least about 50%, at least about 100%, at least about 150%, at least about 200%, at least about 250%, or at least about 300% compared to unmodified sgRNAs. In some embodiments, the chemically modified gRNAs or sgRNAs of the present disclosure can enhance or increase the stability of the base editor complex by about 20% to about 300%, about 50% to about 300%, about 100% to about 300%, about 150% to about 300%, about 20% to about 50%, about 20% to about 100%, about 20% to about 150%, about 20% to about 200%, about 20% to about 250%, about 50% to about 100%, about 50% to about 150%, about 50% to about 200%, about 50% to about 250%, about 100% to about 150%, about 100% to about 200%, about 100% to about 250%, about 150% to about 200%, about 150% to about 250%, about 200% to about 250%, at least about 20%, at least about 50%, at least about 100%, at least about 150%, at least about 200%, at least about 250%, or at least about 300% compared unmodified sgRNAs. In some embodiments, the chemically modified gRNAs or sgRNAs of the present disclosure can enhance or increase the stability of the base editor-sgRNA or Cas9-sgRNA complex by at least 1.1-fold, 1.2-fold, 1.3-fold, 1.4-fold, 1.5-fold, 1.6-fold, 1.7-fold, 1.8-fold, 1.9-fold, 2-fold, 2.5-fold, 3-fold, 3.5-fold, 4-fold, 4.5-fold, 5-fold, 6-fold, 7-fold, 8-fold, 9-fold, 10-fold, or more than 10-fold compared to unmodified sgRNAs.

[0405] The chemically modified gRNAs or sgRNAs of the present disclosure can enhance or increase the stability of the guide RNAs (e.g., gRNAs or sgRNAs) in vitro, in vivo, and/or ex vivo. In some embodiments, the chemically modified gRNAs or sgRNAs of the present disclosure can enhance or increase the stability of the gRNAs or sgRNAs in vitro, in vivo, and/or ex vivo by at least 1%, 2%, 3%, 4%, 5%, 6%, 7%, 8%, 9%, 10%, 11%, 12%, 13%, 14%, 15%, 20%, 25%, 30%, 35%, 40%, 50%, 75%, 90%, 100%, 110%, 120%, 130%, 140%, 150%, 160%, 170%, 180%, 190%, 200%, 210%, 220%, 230%, 240%, 250%, 260%, 270%, 280%, 290%, 300%, 400% 500%, 600%, 700%, 800%, 900%, or 1000% compared to unmodified gRNAs or sgRNAs. In some embodiments, the chemically modified gRNAs or sgRNAs of the present disclosure can enhance or increase the stability of the gRNAs or sgRNAs in vitro, in vivo, and/or ex vivo by about 20% to about 300%, about 50% to about 300%, about 100% to about 300%, about 150% to about 300%, about 20% to about 50%, about 20% to about 100%, about 20% to about 150%, about 20% to about 200%, about 20% to about 250%, about 50% to about 100%, about 50% to about 150%, about 50% to about 200%, about 50% to about 250%, about 100% to about 150%, about 100% to about 200%, about 100% to about 250%, about 150% to about 200%, about 150% to about 250%, about 200% to about 250%, at least about 20%, at least about 50%, at least about 100%, at least about 150%, at least about 200%, at least about 250%, or at least about 300% compared to unmodified gRNAs or sgRNAs. In some embodiments, the chemically modified gRNAs or sgRNAs of the present disclosure can enhance or increase the stability of the gRNAs or sgRNAs in vitro, in vivo, and/or ex vivo by about 20% to about 300%, about 50% to about 300%, about 100% to about 300%, about 150% to about 300%, about 20% to about 50%, about 20% to about 100%, about 20% to about 150%, about 20% to about 200%, about 20% to about 250%, about 50% to about 100%, about 50% to about 150%, about 50% to about 200%, about 50% to about 250%, about 100% to about 150%, about 100% to about 200%, about 100% to about 250%, about 150% to about 200%, about 150% to about 250%, about 200% to about 250%, at least about 20%, at least about 50%, at least about 100%, at least about 150%, at least about 200%, at least about 250%, or at least about 300% compared unmodified gRNAs or sgRNAs. In some embodiments, the chemically modified gRNAs or sgRNAs of the present disclosure can enhance or increase the stability of the gRNAs or sgRNAs in vitro, in vivo, and/or ex vivo by at least 1.1-fold, 1.2-fold, 1.3-fold, 1.4-fold, 1.5-fold, 1.6-fold, 1.7-fold, 1.8-fold, 1.9-fold, 2-fold, 2.5-fold, 3-fold, 3.5-fold, 4-fold, 4.5-fold, 5-fold, 6-fold, 7-fold, 8-fold, 9-fold, 10-fold, or more than 10-fold compared to unmodified gRNAs or sgRNAs.

[0406] In some embodiments, the chemically modified gRNAs or sgRNAs exhibit increased stability in a cell as compared to unmodified gRNAs or sgRNAs. In some embodiments, the chemically modified gRNAs or sgRNAs exhibit at least 1%, 2%, 3%, 4%, 5%, 6%, 7%, 8%, 9%, 10%, 11%, 12%, 13%, 14%, 15%, 20%, 25%, 30%, 35%, 40%, 50%, 75%, 90%, 100%, 110%, 120%, 130%, 140%, 150%, 160%, 170%, 180%, 190%, 200%, 210%, 220%, 230%, 240%, 250%, 260%, 270%, 280%, 290%, 300%, 400% 500%, 600%, 700%, 800%, 900%, or 1000% higher or increased stability in a cell as compared to unmodified gRNAs or sgRNAs. In some embodiments, the chemically modified gRNAs or sgRNAs exhibit be at least 1.1-fold, 1.2-fold, 1.3-fold, 1.4-fold, 1.5-fold, 1.6-fold, 1.7-fold, 1.8-fold, 1.9-fold, 2-fold, 2.5-fold, 3-fold, 3.5-fold, 4-fold, 4.5-fold, 5-fold, 6-fold, 7-fold, 8-fold, 9-fold, 10-fold, or more than 10-fold higher or increased stability in a cell as compared to unmodified gRNAs or sgRNAs.

[0407] In some embodiments, the stability of the chemically modified gRNAs or sgRNAs is measured by half-life of the gRNAs or sgRNAs in the cell. In some embodiments, the chemically modified gRNAs or sgRNAs exhibit increased half-life in the cell compared to unmodified gRNAs or sgRNAs. In some embodiments, the gRNAs or sgRNAs exhibit increased half-life in the cell by at least 1%, 2%, 3%, 4%, 5%, 6%, 7%, 8%, 9%, 10%, 11%, 12%, 13%, 14%, 15%, 20%, 25%, 30%, 35%, 40%, 50%, 75%, 90%, 100%, 110%, 120%, 130%, 140%, 150%, 160%, 170%, 180%, 190%, 200%, 210%, 220%, 230%, 240%, 250%, 260%, 270%, 280%, 290%, 300%, 400% 500%, 600%, 700%, 800%, 900%, or 1000% as compared to unmodified gRNAs or sgRNAs. In some embodiments, the gRNAs or sgRNAs exhibit increased half-life in the cell by about 20% to about 300%, about 50% to about 300%, about 100% to about 300%, about 150% to about 300%, about 20% to about 50%, about 20% to about 100%, about 20% to about 150%, about 20% to about 200%, about 20% to about 250%, about 50% to about 100%, about 50% to about 150%, about 50% to about 200%, about 50% to about 250%, about 100% to about 150%, about 100% to about 200%, about 100% to about 250%, about 150% to about 200%, about 150% to about 250%, about 200% to about 250%, at least about 20%, at least about 50%, at least about 100%, at least about 150%, at least about 200%, at least about 250%, or at least about 300% as compared to unmodified gRNAs or sgRNAs. In some embodiments, the gRNAs or sgRNAs exhibit increased half-life in the cell by at least 1.1-fold, 1.2-fold, 1.3-fold, 1.4-fold, 1.5-fold, 1.6-fold, 1.7-fold, 1.8-fold, 1.9-fold, 2-fold, 2.5-fold, 3-fold, 3.5-fold, 4-fold, 4.5-fold, 5-fold, 6-fold, 7-fold, 8-fold, 9-fold, 10-fold, or more than 10-fold as compared to unmodified gRNAs or sgRNAs.

[0408] The chemically modified gRNAs or sgRNAs of the present disclosure can be more resistant to degradation as compared to an unmodified gRNA or sgRNA. In some embodiments, the chemically modified gRNAs or sgRNAs of the present disclosure can be at least 1%, 2%, 3%, 4%, 5%, 6%, 7%, 8%, 9%, 10%, 11%, 12%, 13%, 14%, 15%, 20%, 25%, 30%, 35%, 40%, 50%, 75%, 90%, 100%, 110%, 120%, 130%, 140%, 150%, 160%, 170%, 180%, 190%, 200%, 210%, 220%, 230%, 240%, 250%, 260%, 270%, 280%, 290%, 300%, 400% 500%, 600%, 700%, 800%, 900%, or 1000% more resistant to degradation compared to unmodified gRNAs or sgRNAs. In some embodiments, the chemically modified gRNAs or sgRNAs of the present disclosure can be about 20% to about 300%, about 50% to about 300%, about 100% to about 300%, about 150% to about 300%, about 20% to about 50%, about 20% to about 100%, about 20% to about 150%, about 20% to about 200%, about 20% to about 250%, about 50% to about 100%, about 50% to about 150%, about 50% to about 200%, about 50% to about 250%, about 100% to about 150%, about 100% to about 200%, about 100% to about 250%, about 150% to about 200%, about 150% to about 250%, about 200% to about 250%, at least about 20%, at least about 50%, at least about 100%, at least about 150%, at least about 200%, at least about 250%, or at least about 300% more resistant to degradation compared to unmodified gRNAs or sgRNAs. In some embodiments, the chemically modified gRNAs or sgRNAs of the present disclosure can be about 20% to about 300%, about 50% to about 300%, about 100% to about 300%, about 150% to about 300%, about 20% to about 50%, about 20% to about 100%, about 20% to about 150%, about 20% to about 200%, about 20% to about 250%, about 50% to about 100%, about 50% to about 150%, about 50% to about 200%, about 50% to about 250%, about 100% to about 150%, about 100% to about 200%, about 100% to about 250%, about 150% to about 200%, about 150% to about 250%, about 200% to about 250%, at least about 20%, at least about 50%, at least about 100%, at least about 150%, at least about 200%, at least about 250%, or at least about 300% more resistant to degradation compared unmodified gRNAs or sgRNAs. In some embodiments, the chemically modified gRNAs or sgRNAs of the present disclosure can be at least 1.1-fold, 1.2-fold, 1.3-fold, 1.4-fold, 1.5-fold, 1.6-fold, 1.7-fold, 1.8-fold, 1.9-fold, 2-fold, 2.5-fold, 3-fold, 3.5-fold, 4-fold, 4.5-fold, 5-fold, 6-fold, 7-fold, 8-fold, 9-fold, 10-fold, or more than 10-fold more resistant to degradation compared to unmodified gRNAs or sgRNAs.

### Target Gene Modification

[0409] In some aspects, provided herein, is a method for treating or preventing a condition in a subject in need thereof, the method comprising administering to the subject the composition or lipid nanoparticle comprising chemically modified gRNAs or sgRNAs described herein, wherein the gRNAs or sgRNAs direct a base editor protein to effect a modification in a target polynucleotide sequence in a cell of the subject, thereby treating or preventing the condition. In some embodiments, the target polynucleotide is in a PCSK9 gene. In some embodiments, the target polynucleotide is in an ANGPTL3 gene. In some embodiments, the modification is at a splice site of the target polynucleotide. In some embodiments, the modification is at a splice donor site of the target polynucleotide. In some embodiments, the modification is at a splice acceptor site of the target polynucleotide. In some embodiments, the modification reduces expression of functional PCSK9 protein encoded by the PCSK9 gene in the subject. In some embodiments, the modification reduces expression of functional ANGPTL3 protein encoded by the ANGPTL3 gene in the subject. In some embodiments, the condition is atherosclerotic vascular disease. In some embodiments, the condition is an atherosclerotic vascular disease, hypertriglyceridemia, or diabetes. In some embodiments, the subject exhibits a reduced blood LDL cholesterol level and/or a reduced blood triglycerides level as compared to before the administration.

[0410] In some embodiments, the disclosure provides base-editing systems, compositions and methods for editing a polynucleotide encoding an Apolipoprotein C3 (APOC3) protein and variants thereof. In some embodiments, provided herein are genome/base-editing systems, compositions and methods for editing a polynucleotide encoding Proprotein convertase subtilisin/kexin type 9 (PCSK9) and variants thereof. In some embodiments, provided herein are genome/base-editing systems, compositions and methods for editing a polynucleotide encoding Angiopoietin-like 3 (ANGPTL3) and variants thereof. To edit a target gene, a target gene polynucleotide may contact the compositions disclosed herein comprising a sgRNA and a adenosine base editor protein, wherein the sgRNA comprises a spacer sequence and a tracrRNA sequence, wherein the spacer sequence hybridizes with a target polynucleotide sequence in a PCSK9 or ANGPTL3 gene and the tracrRNA sequence binds the adenosine base editor protein (e.g. a Cas9 component of the adenosine base editor). In some embodiments, the sgRNA therefore directs the base editor protein to the target polynucleotide sequence to result in a to G modification in the target gene. In some embodiments, the target gene or target polynucleotide is selected from a gene encoding PCSK9, APOC3, LPA, and ANGPTL3. In some embodiments, the target polynucleotide sequence is in a PCSK9 gene. In some embodiments, the target polynucleotide sequence is in an ANGPTL3 gene. In some embodiments, the modification reduces or abolishes expression of functional PCSK9 protein encoded by the PCSK9 gene in the cell. In some embodiments, the modification reduces or abolishes expression of functional ANGPTL3 protein encoded by the ANGPTL3 gene in the cell. In some embodiments, the introduction is performed via a lipid nanoparticle that comprises the composition.

[0411] For example, the sgRNA and the Adenosine base editor protein may be expressed in a cell where a target gene editing is desired (e.g., a liver cell), to thereby allowing contact of the target gene with the composition disclosed herein (e.g., sgRNA and the Adenosine base editor protein). In some embodiments, the binding of the Adenosine base editor protein to its target polynucleotide sequence in the target gene is directed by a single guide RNA disclosed herein, e.g., a single guide RNA comprising (i) a spacer sequence and (ii) a tracrRNA sequence, wherein the spacer sequence hybridizes with a target polynucleotide sequence in a target gene. Thus, by designing the guide RNA sequence, the Adenosine base editor protein can be directed to edit any target polynucleotide sequence in the target gene (e.g., target gene encoding PCSK9, APOC3 and ANGPTL3). In some embodiments, the guide RNA sequence is co-expressed with the Adenosine base editor protein in a cell where editing is desired.

[0412] In some embodiments, a target gene comprising more than one mutations described herein are contemplated. For example, a target gene encoding a variant protein can be produced using the methods described herein that includes 1, 2, 3, 4, 5, 6, 7, 8, 9, 10, or more mutations. To make multiple mutations in the target gene, a plurality of guide RNA sequences can be used, each guide RNA sequence targeting one target polynucleotide sequence in the target gene. The Adenosine base editor protein is capable of editing each and every target polynucleotide sequence dictated by the guide RNA sequence. For example, 1, 2, 3, 4, 5, 6, 7, 8, 9, 10, or more guide RNA sequences can be used in a gene editing reaction. In some embodiments, the guide RNA sequences as used (e.g., gRNA). In some embodiments, DNA molecule encoding the guide RNA sequences can also be used.

[0413] In some embodiments, simultaneous modifications into more than one target genes (e.g., more than one target gene in the LDL-mediated cholesterol clearance pathway) are also contemplated herein. For example, in some embodiments, a modification may be simultaneously introduced into PCSK9 and APOC3 gene. In some embodiments, a modification may be simultaneously introduced into PCSK9 and LDL-R gene. In some embodiments, a modification may be simultaneously introduced into PCSK9 and IODL gene. In some embodiments, a modification may be simultaneously introduced into PCSK9 and LPA gene. In some embodiments, a modification may be simultaneously introduced into APOC3 and IODL gene. In some embodiments, a modification may be simultaneously introduced into LDL-R and APOC3 gene. In some embodiments, a modification may be simultaneously introduced into LDL-R and IDOL gene. In some embodiments, a modification may be simultaneously introduced into PCSK9, APOC3, LDL-R and IDOL gene. In some embodiments, a modification can be simultaneously introduced into PCSK9 and ANGPTL3 gene. To simultaneously introduce of modifications into more than one target genes, multiple guide nucleotide sequences are used.

[0414] To edit a gene encoding the PCSK9 or ANGPTL3 protein, the gene is contacted with the composition described herein. In some embodiments, a target polynucleotide sequence in a target gene is contacted with the single guide RNA disclosed herein and a Adenosine base editor protein or a nucleic acid sequence encoding the Adenosine base editor protein, wherein the single guide RNA directs the Adenosine base editor protein to effect a modification in the target gene (e.g., target gene encoding PCSK9, APOC3 and ANGPTL3). In some embodiments, the target polynucleotide sequence is the gene locus in the genomic DNA of a cell. In some embodiments, the cell is a cultured cell. In some embodiments, the cell is in vivo. In some embodiments, the cell is in vitro. In some embodiments, the cell is ex vivo.

[0415] In some embodiments, the cell is from a mammal. In some embodiments, the mammal is a human. In some embodiments, the mammal is a rodent. In some embodiments, the rodent is a mouse. In some embodiments, the rodent is a rat. As would be understood be those skilled in the art, a target polynucleotide sequence may be a DNA molecule comprising a coding strand and a complementary strand, e.g., the PCSK9 or ANGPTL3 gene locus in a genome. As such, the target polynucleotide sequence may also include coding regions (e.g., exons) and non-coding regions (e.g., introns or splicing sites). In some embodiments, the target polynucleotide sequence is located in the coding region (e.g., an exon) of the target gene (e.g., the PCSK9 or ANGPTL3 gene locus). As such, the modification in the coding region may result in an amino acid change in the protein encoded by the target gene, i.e., a mutation. In some embodiments, the mutation is a loss of function mutation. In some embodiments, the loss-of-function mutation is a naturally occurring loss-of-function mutation. In some embodiments, the target polynucleotide sequence is located in a non-coding region of the target gene, e.g., in an intron or a splicing site. In some embodiments, the base editor system provided herein results in a A·T to G·C alteration at a splice site in a PCSK9 gene or a ANGPTL3 gene. In some embodiments, the A·T to G·C alteration is at a splice acceptor site of the PCSK9 gene. In some embodiments, the A·T to G·C alteration results in an aberrant PCSK9 transcript encoded by the PCSK9 gene. In some embodiments, the A·T to G·C alteration results in a non-functional PCSK9 polypeptide encoded by the PCSK9 gene when expressed in a cell. In some embodiments, the A·T to G·C alteration is at a 5′ end of a splice donor site of an intron 1 of the PCSK9 gene. In some embodiments, the A·T to G·C alteration is at a 5′ end of a splice donor site of an intron 4 of the PCSK9 gene. In some embodiments, the base editor system provided herein results in a A·T to G.C alteration at a splice site ANGPTL3 gene, or the second A·T to G·C alteration is at a splice donor site of the ANGPTL3 gene. In some embodiments, the A·T to G·C alteration or the second A·T to G·C alteration is at a splice acceptor site of the ANTPTL3 gene. In some embodiments, the A·T to G·C alteration or the second A·T to G·C alteration results in an aberrant ANGPTL3 transcript encoded by the ANGPTL3 gene. In some embodiments, the A·T to G·C alteration or the second A·T to G·C alteration results in a non-functional ANGPTL3 polypeptide encoded by the ANGPTL3 gene. In some embodiments, the A·T to G·C alteration or the second A·T to G·C alteration is at a 5′ end of a splice donor site of an intron 6 of the ANGPLT3 gene.

[0416] In some embodiments, a target polynucleotide sequence is located in a splicing site and the editing of such sequence causes alternative splicing of the mRNA of a target gene. In some embodiments, the alternative splicing leads to leading to loss-of-function mutants. In some embodiments, the alternative splicing leads to the introduction of a premature stop codon in a mRNA encoded by the target gene, resulting in truncated and unstable proteins. In some embodiments, mutants that are defective in folding are produced. A loss-of-function variant generated by a gene that is modified using the compositions and methods disclosed herein, may have reduced activity compared to a wild type protein encoded by an unmodified target gene. Activity refers to any known biological activity of the wild-type protein in the art.

[0417] In some embodiments, the activity of a loss-of-function variant may be reduced by at least 20%, at least 30%, at least 40%, at least 50%, at least 60%, at least 70%, at least 80%, at least 90%, at least 99%, or more. In some embodiments, the loss-of-function variant has no more than 50%, no more than 40%, no more than 30%, no more than 20%, no more than 10%, no more than 5%, no more than 1% or less activity compared to a wild type protein.

[0418] In some embodiments, cellular activity of a protein encoded by a target gene may be reduced by reducing the level of properly folded and active protein. Introducing destabilizing mutations into the wild type protein may cause misfolding or deactivation of the protein. A variant generated by modifying a target gene using the compositions and methods disclosed herein comprises one or more destabilizing mutations may have reduced activity compared to the wild type protein encoded by an unmodified target gene. For example, the activity of a variant comprising one or more destabilizing mutations may be reduced by at least about 20%, at least about 30%, at least about 40%, at least about 50%, at least about 60%, at least about 70%, at least about 80%, at least about 90%, at least about 95%, at least about 99%, or more.

[0419] In some embodiments, the methods and composition disclosed herein reduces or abolishes expression and/or function of protein encoded by a target gene. For example, the methods and composition disclosed herein reduces expression and/or function of protein encoded by the target gene by at least 3-fold, at least 4-fold, at least 5-fold, at least 6-fold, at least 7-fold, at least 8-fold, at least 9-fold, or at least 10-fold relative to a control.

[0420] In some embodiments, the methods and composition disclosed herein reduces or abolishes expression and/or function of the protein encoded by a target gene by at least 2-fold relative to a control. For example, the methods and composition disclosed herein reduces or abolishes expression and/or function of the protein encoded by a target gene by at least 3-fold, at least 4-fold, at least 5-fold, at least 6-fold, at least 7-fold, at least 8-fold, at least 9-fold, or at least 10-fold relative to a control.

[0421] Some aspects of the present disclosure provide strategies of editing target gene to reduce the amount of full-length, functional protein being produced. In some embodiments, stop codons may be introduced into the coding sequence of target gene upstream of the normal stop codon (referred to as a “premature stop codon”). Premature stop codons cause premature translation termination, in turn resulting in truncated and nonfunctional proteins and induces rapid degradation of the mRNA via the non-sense mediated mRNA decay pathway. See, e.g., Baker et al., Current Opinion in Cell Biology 16 (3): 293-299, 2004; Chang et al, Annual Review of Biochemistry 76:51-74, 2007; and Behm-Ansmant et ah, Genes & Development 20 (4): 391-398, 2006, each of which is incorporated herein by reference.

### Proprotein Convertase Subtilisin-Kexin Type 9 (PCSK9)

[0422] In some embodiments, the target gene for modification using the compositions and methods disclosed herein is gene encoding PCSK9. Proprotein convertase subtilisin-kexin type 9 (PCSK9), also known as neural apoptosis-regulated convertase 1 (NARC-I), is a proteinase K-like subtilase identified as the 9th member of the secretory subtilase family. “Proprotein convertase subtilisin/kexin type 9 (PCSK9)” refers to an enzyme encoded by the PCSK9 gene. PCSK9 binds to the receptor for low-density lipoprotein (LDL) particles. In the liver, the LDL receptor removes LDL particles from the blood through the endocytosis pathway. When PCSK9 binds to the LDL receptor, the receptor is channeled towards the lysosomal pathway and broken down by proteolytic enzymes, limiting the number of times that a given LDL receptor is able to uptake LDL particles from the blood. Thus, blocking PCSK9 activity may lead to more LDL receptors being recycled and present on the surface of the liver cells, and will remove more LDL cholesterol from the blood.

[0423] Therefore, blocking PCSK9 can lower blood cholesterol levels. PCSK9 orthologs are found across many species. PCSK9 is inactive when first synthesized, a pre-pro enzyme, because a section of the peptide chain blocks its activity; proprotein convertases remove that section to activate the enzyme. Pro-PCSK9 is a secreted, globular, serine protease capable of proteolytic auto-processing of its N-terminal pro-domain into a potent endogenous inhibitor of PCSK9, which blocks its catalytic site. PCSK9's role in cholesterol homeostasis has been exploited medically. Drugs that block PCSK9 can lower the blood level of low-density lipoprotein cholesterol (LDL-C). The first two PCSK9 inhibitors, alirocumab and evolocumab, were approved by the U.S. Food and Drug Administration in 2015 for lowering cholesterol where statins and other drugs were insufficient.

[0424] The human gene for PCSK9 localizes to human chromosome Ip33-p34.3. PCSK9 is expressed in cells capable of proliferation and differentiation including, for example, hepatocytes, kidney mesenchymal cells, intestinal ileum, and colon epithelia as well as embryonic brain telencephalon neurons. See, e.g., Seidah et al., 2003 PNAS 100:928-933, which is incorporated herein by reference.

[0425] Original synthesis of PCSK9 is in the form of an inactive enzyme precursor, or zymogen, of 72-kDa, which undergoes autocatalytic, intramolecular processing in the endoplasmic reticulum (ER) to activate its functionality. This internal processing event has been reported to occur at the SSVFAQ jSIP motif (SEQ ID NO: 3181), and has been reported as a requirement of exit from the ER. “j” indicates cleavage site. See, Benjannet et al., 2004 J. Biol. Chem. 279:48865-48875, and Seidah et al, 2003 PNAS 100:928-933, each of which are incorporated herein by reference. The cleaved protein is then secreted. The cleaved peptide remains associated with the activated and secreted enzyme.

[0426] The gene sequence for human PCSK9 is ˜22-kb long with 12 exons encoding a 692 amino acid protein. The protein sequence of human PCSK9 can be found, for example, at Deposit No. NP_777596.2, which sequence is incorporated herein in its entirety. Human, mouse and rat PCSK9 nucleic acid sequences have been deposited; see, e.g., GenBank Accession Nos.: AX127530 (also AX207686), AX207688, and AX207690, respectively, each of which sequence is incorporated herein in its entirety. The gene sequence of Macaca fascicularis can be found publically, for example, NCBI Gene ID: 102142788, which sequence is incorporated herein in their entirety. Macaca fascicularis proprotein convertase subtilisin/kexin type 9 isoform X2 sequence can be found publically, for example, at NCBI Reference Sequence: XP_005543317.1, which sequence is incorporated herein in its entirety.

[0427] The translated protein contains a signal peptide in the NH2-terminus, and in cells and tissues an about 74 kDa zymogen (precursor) form of the full-length protein is found in the endoplasmic reticulum. During initial processing in the cell, the about 14 kDa prodomain peptide is autocatalytically cleaved to yield a mature about 60 kDa protein containing the catalytic domain and a C-terminal domain often referred to as the cysteine-histidine rich domain (CHRD). This about 60 kDa form of PCSK9 is secreted from liver cells. The secreted form of PCSK9 appears to be the physiologically active species, although an intracellular functional role of the about 60 kDa form has not been ruled out.

[0428] Numerous PCSK9 variants are disclosed and/or claimed in several patent publications including, but not limited to the following: PCT Publication Nos. WO2001031007, WO2001057081, WO2002014358, WO2001098468, WO2002102993, WO2002102994, WO2002046383, WO2002090526, WO2001077137, and WO2001034768; US Publication Nos. US 2004/0009553 and US 2003/0119038, and European Publication Nos. EP 1 440 981, EP 1 067 182, and EP 1 471 152, each of which are incorporated herein by reference.

[0429] Several mutant forms of PCSK9 are well characterized, including S 127R, N157K, F216L, R218S, and D374Y, with S 127R, F216L, and D374Y being linked to autosomal dominant hypercholesterolemia (ADH). Benjannet et al. (J. Biol. Chem., 279 (47): 48865-48875 (2004)) demonstrated that the S 127R and D374Y mutations result in a significant decrease in the level of pro-PCSK9 processed in the ER to form the active secreted zymogen. As a consequence, it is believed that wild-type PCSK9 increases the turnover rate of the LDL receptor causing inhibition of LDL clearance (Maxwell et al, PNAS, 102 (6): 2069-2074 (2005); Benjannet et al, and Lalanne et al), while PCSK9 autosomal dominant mutations result in increased levels of LDLR, increased clearance of circulating LDL, and a corresponding decrease in plasma cholesterol levels. See, Rashid et al, PNAS, 102 (15): 5374-5379 (2005); Abifadel et al, 2003 Nature Genetics 34:154-156; Timms et al, 2004 Hum. Genet. 114:349-353; and Leren, 2004 Clin. Genet. 65:419-422, each of which are incorporated herein by reference.

[0430] A later-published study on the S127R mutation of Abifadel et al, reported that patients carrying such a mutation exhibited higher total cholesterol and apoB 100 in the plasma attributed to (1) an overproduction of apoB 100-containing lipoproteins, such as low density lipoprotein (LDL), very low density lipoprotein (VLDL) and intermediate density lipoprotein (IDL), and (2) an associated reduction in clearance or conversion of said lipoproteins. Together, the studies referenced above evidence the fact that PCSK9 plays a role in the regulation of LDL production. Expression or upregulation of PCSK9 is associated with increased plasma levels of LDL cholesterol, and inhibition or the lack of expression of PCSK9 is associated with low LDL cholesterol plasma levels. Significantly, lower levels of LDL cholesterol associated with sequence variations in PCSK9 have conferred protection against coronary heart disease; Cohen et al, 2006 N. Engl. J. Med. 354:1264-1272.

[0431] Lalanne et al. demonstrated that LDL catabolism was impaired and apolipoprotein B-containing lipoprotein synthesis was enhanced in two patients harboring S 127R mutations in PCSK9 (J. Lipid Research, 46:1312-1319 (2005)). Sun et al. also provided evidence that mutant forms of PCSK9 are also the cause of unusually severe dominant hypercholesterolaemia as a consequence of its effect of increasing apolipoprotein B secretion (Sun et al, Hum. Mol. Genet, 14 (9): 1161-1169 (2005)). These results were consistent with earlier results which demonstrated adenovirus-mediated overexpression of PCSK9 in mice results in severe hypercholesteromia due to drastic decreases in the amount of LDL receptor Dubuc et al., Thromb. Vase. Biol., 24:1454-1459 (2004), in addition to results demonstrating mutant forms of PCSK9 also reduce the level of LDL receptor (Park et al., J. Biol. Chem., 279:50630-50638 (2004). The overexpression of PCSK9 in cell lines, including liver-derived cells, and in livers of mice in vivo, results in a pronounced reduction in LDLR protein levels and LDLR functional activity without changes in LDLR mRNA level (Maxwell et al., Proc. Nat. Amer. Set, 101:7100-7105 (2004); Benjannet S. et al, J. Bio. Chem. 279:48865-48875 (2004)).

[0432] Various therapeutic approaches to the inhibition of PSCK9 have been proposed, including: inhibition of PSCK9 synthesis by gene silencing agents, e.g., RNAi; inhibition of PCSK9 binding to LDLR by monoclonal antibodies, small peptides or adnectins; and inhibition of PCSK9 autocatalytic processing by small molecule inhibitors. These strategies have been described in Hedrick et al., Curr Opin Investig Drugs 2009; 10:938-46; Hooper et al, Expert Opin Biol Ther, 2013; 13:429-35; Rhainds et al, Clin Lipid, 2012; 7:621-40; Seidah et al;, Expert Opin Ther Targets 2009; 13:19-28; and Seidah et al, Nat Rev Drug Discov 2012; 11:367-83, each of which are incorporated herein by reference.

[0433] In some embodiments, the loss of function mutation induced in PCSK9 e.g., G106R, L253F, A443T, R93C, etc. In some embodiments, the loss-of-function mutation is engineered (i.e., not naturally occurring), e.g., G24D, S47F, R46H, S 153N, H193Y, etc.

[0434] PCSK9 variants that can be useful in the present disclosure are loss-of-function variants that may boost LDL receptor-mediated clearance of LDL cholesterol, alone or in combination with other genes involved in the pathway, e.g., APOC3, LDL-R, or Idol. In some embodiments, the PCSK9 loss-of-function variants produced using the methods of the present disclosure express efficiently in a cell. In some embodiments, the PCKS9 loss-of-function variants produced using the methods of the present disclosure is activated and exported to engage the clathrin-coated pits from unmodified cells in a paracrine mechanism, thus competing with the wild-type PCSK9 protein. In some embodiments, the PCSK9 loss-of-function variant comprises mutations in residues in the LDL-R bonding region that make direct contact with the LDL-R protein. In some embodiments, the residues in the LDL-R bonding region that make direct contact with the LDL-R protein are selected from the group consisting of R194, R237, F379, S372, D374, D375, D378, R46, R237, and A443.

[0435] As described herein, a loss-of-function PCSK9 variant, may have reduced activity compared to a wild type PCSK9 protein. PCSK9 activity refers to any known biological activity of the PCSK9 protein in the art. For example, in some embodiments, PCSK9 activity refers to its protease activity. In some embodiments, PCSK9 activity refers to its ability to be secreted through the cellular secretory pathway. In some embodiments, PCSK9 activity refers to its ability to act as a protein-binding adaptor in clathrin-coated vesicles. In some embodiments, PCSK9 activity refers to its ability to interact with LDL receptor. In some embodiments, PCSK9 activity refers to its ability to prevent LDL receptor recycling. These examples are not meant to be limiting.

[0436] In some embodiments, the activity of a loss-of-function PCSK9 variant may be reduced by at least 20%, at least 30%, at least 40%, at least 50%, at least 60%, at least 70%, at least 80%, at least 90%, at least 99%, or more. In some embodiments, the loss-of-function PCSK9 variant has no more than 50%, no more than 40%, no more than 30%, no more than 20%, no more than 10%, no more than 5%, no more than 1% or less activity compared to a wild type PCSK9 protein. Non-limiting, exemplary assays for determining PCSK9 activity have been described in the art, e.g., in US Patent Application Publication US20120082680, which are incorporated herein by reference.

[0437] In some embodiments, cellular PCSK9 activity may be reduced by reducing the level of properly folded and active PCSK9 protein. Introducing destabilizing mutations into the wild type PCSK9 protein may cause misfolding or deactivation of the protein. A PCSK9 variant comprising one or more destabilizing mutations described herein may have reduced activity compared to the wild type PCSK9 protein. For example, the activity of a PCSK9 variant comprising one or more destabilizing mutations described herein may be reduced by at least about 20%, at least about 30%, at least about 40%, at least about 50%, at least about 60%, at least about 70%, at least about 80%, at least about 90%, at least about 95%, at least about 99%, or more.

[0438] In some embodiments, the methods and composition disclosed herein reduce or abolish expression of protein encoded by a target gene and/or function thereof. For example, the methods and composition disclosed herein reduces expression and/or function of PCSK9 protein encoded by the PCSK9 gene by at least 3-fold, at least 4-fold, at least 5-fold, at least 6-fold, at least 7-fold, at least 8-fold, at least 9-fold, or at least 10-fold relative to a control. For example, the methods and composition disclosed herein reduces expression and/or function of APOC3 protein encoded by the APOC3 gene by at least 3-fold, at least 4-fold, at least 5-fold, at least 6-fold, at least 7-fold, at least 8-fold, at least 9-fold, or at least 10-fold relative to a control. For example, the methods and composition disclosed herein reduces expression and/or function of ANGPTL3 protein encoded by the ANGPTL3 gene by at least 3-fold, at least 4-fold, at least 5-fold, at least 6-fold, at least 7-fold, at least 8-fold, at least 9-fold, or at least 10-fold relative to a control.

[0439] In some embodiments, the gene modification methods and compositions disclosed herein reduces expression of functional PCSK9 protein encoded by the PCSK9 gene in the cell by at least 5%, at least 10%, at least 15%, at least 20%, at least 25%, at least 30%, at least 35%, at least 40%, at least 45%, at least 50%, at least 55%, at least 60%, at least 65%, at least 70%, at least 75%, at least 80%, at least 85%, at least 90%, at least 95%, at least 97%, at least 98%, at least 99%, at least 99.5%, at least 99.9%, or 100%. In some embodiments, the modification reduces expression of functional PCSK9 protein encoded by the PCSK9 gene in the cell by at least 2 fold, at least 3 fold, at least 4 fold, at least 5 fold, at least 10 fold, at least 20 fold, at least 25 fold, at least 30 fold, at least 40 fold, at least 50 fold, at least 60 fold, at least 70 fold, at least 80 fold, at least 90 fold, at least 100 fold, at least 200 fold, at least 300 fold, at least 400 fold, at least 500 fold, at least 600 fold, at least 700 fold, at least 800 fold, at least 900 fold, at least 1000 fold, at least 2000 fold, at least 3000 fold, at least 4000 fold, at least 5000 fold, at least 6000 fold, at least 7000 fold, at least 8000 fold, at least 9000 fold, or at least 10000 fold. In some embodiments, the modification abolishes expression of functional PCSK9 protein encoded by the PCSK9 gene in the cell.

[0440] Some aspects of the present disclosure provide strategies of reducing cellular PCSK9 activity via preventing PCSK9 mRNA maturation and production. In some embodiments, such strategies involve alterations of splicing sites in the PCSK9 gene. Altered splicing site may lead to altered splicing and maturation of the PCSK9 mRNA. For example, in some embodiments, an altered splicing site may lead to the skipping of an exon, in turn leading to a truncated protein product or an altered reading frame. In some embodiments, an altered splicing site may lead to translation of an intron sequence and premature translation termination when an in frame stop codon is encountered by the translating ribosome in the intron. In some embodiments, a start codon is edited and protein translation initiates at the next ATG codon, which may not be in the correct coding frame.

[0441] The splicing sites typically comprises an intron donor site, a Lariat branch point, and an intron acceptor site. The mechanism of splicing is familiar to those skilled in the art. As a non-limiting example, the intron donor site has a consensus sequence of GGGTRAGT, and the C bases paired with the G bases in the intron donor site consensus sequence may be targeted by the methods and compositions described herein, thereby altering the intron donor site. The Lariat branch point also has consensus sequences, e.g., YTRAC, wherein Y is a pyrimidine and R is a purine. The C base in the Lariat branch point consensus sequence may be targeted by the nucleobase editors described herein, leading to the skipping of the following exon. The intron acceptor site has a consensus sequence of YNCAGG, wherein Y is a pyrimidine and N is any nucleotide. The C base of the consensus sequence of the intron acceptor site, and the C base paired with the G bases in the consensus sequence of the intron acceptor site may be targeted by the nucleobase editors described herein, thereby altering the intron acceptor site, in turn leading the skipping of an exon. As described herein, gene sequence for human PCSK9 is-22-kb long and contains 12 exons and 11 introns. Each of the exon-intron junction may be altered to disrupt the processing and maturation of the PCSK9 mRNA.

[0442] In some embodiments, a splice site disruption generated by a base editor system disclosed herein can result in the inclusion of intronic sequences in messenger RNA (mRNA) encoded by the PCSK9 gene. In some embodiments, the splice site disruption generates a nonsense, frameshift, or an in-frame indel mutation that result in premature stop codons or in insertion/deletion of amino acids that disrupt protein activity. In some embodiments, the splice site disruption generates exclusion of exonic sequences. In some embodiments, the splice site disruption generates exclusion of exonic sequences that results in nonsense, frameshift, or in-frame indel mutations in the PCSK9 transcript. Canonical splice donors comprise the DNA sequence GT on the sense strand, whereas canonical splice acceptors comprise the DNA sequence AG. Alteration of the sequence disrupts normal splicing. Splice donors can be disrupted by adenine base editing of the complementary base in the second position in the antisense strand (GT to GC), and splice acceptors can be disrupted by adenine base editing of the first position in the sense strand (AG to GG).

[0443] Further, the present disclosure also contemplates the use of destabilizing mutations to counteract the effect of gain-of-function PCSK9 variant. Gain-of-function PCSK9 variants (e.g., the gain-of-function variants have been described in the art and are found to be associated with hypercholesterolemia (e.g., in Peterson et al., J Lipid Res. 2008 June; 49 (6): 1152-1156; Benjannet et al., J Biol Chem. 2012 Sep. 28;287 (40): 33745-55; Abifadel et al, Atherosclerosis. 2012 August; 223 (2): 394-400; and Cameron et al, Hum. Mol. Genet. (1 May 2006) 15 (9): 1551-1558, each of which is incorporated herein by reference). Introducing destabilizing mutations into these gain-of-function PCSK9 variants may cause misfolding and deactivation of these gain-of-function variants, thereby counteracting the hyper-activity caused by the gain-of-function mutation. Further, gain-of-function mutations in several other key factors in the LDL-R mediated cholesterol clearance pathway, e.g., LDL-R, APOB, or APOC, have also been described in the art. Thus, making destabilizing mutations in these factors to counteract the deleterious effect of the gain-of-function mutation using the compositions and methods described herein, is also within the scope of the present disclosure. As such, the present disclosure further provides mutations that cause misfolding of PCSK9 protein or structurally destabilization of PCSK9 protein.

[0444] The polypeptide and coding nucleic acid sequences of PCSK9 and of other members of the family of human origin and those of a number of animals are publicly available, e.g., from the NCBI website or ENSEMBL website. Examples include, but are not limited to the following sequences, each of which sequences are incorporated herein in their entireties;

Wild Type PCSK9 Gene (NG_009061.1),
Homo sapiens proprotein convertase subtilisin/
kexin type 9 (PCSK9), RefSeqGene (LRG_275) on
chromosome 1
(SEQ ID NO: 5)
GTCCGATGGGGCTCTGGTGGCGTGATCTGCGCGCCCCAGGCGTCAAGCAC
CCACACCCTAGAAGGTTTCCGCAGCGACGTCGAGGCGCTCATGGTTGCAG
GCGGGCGCCGCCGTTCAGTTCAGGGTCTGAGCCTGGAGGAGTGAGCCAGG
CAGTGAGACTGGCTCGGGCGGGCCGGGACGCGTCGTTGCAGCAGCGGCTC
CCAGCTCCCAGCCAGGATTCCGCGCGCCCCTTCACGCGCCCTGCTCCTGA
ACTTCAGCTCCTGCACAGTCCTCCCCACCGCAAGGCTCAAGGCGCCGCCG
GCGTGGACCGCGCACGGCCTCTAGGTCTCCTCGCCAGGACAGCAACCTCT
CCCCTGGCCCTCATGGGCACCGTCAGCTCCAGGCGGTCCTGGTGGCCGCT
GCCACTGCTGCTGCTGCTGCTGCTGCTCCTGGGTCCCGCGGGCGCCCGTG
CGCAGGAGGACGAGGACGGCGACTACGAGGAGCTGGTGCTAGCCTTGCGT
TCCGAGGAGGACGGCCTGGCCGAAGCACCCGAGCACGGAACCACAGCCAC
CTTCCACCGCTGCGCCAAGGTGCGGGTGTAGGGATGGGAGGCCGGGGCGA
ACCCGCAGCCGGGACGGTGCGGTGCTGTTTCCTCTCGGGCCTCAGTTTCC
CCCCATGTAAGAGAGGAAGTGGAGTGCAGGTCGCCGAGGGCTCTTCGCTT
GGCACGATCTTGGGGACTGCAGGCAAGGCGGCGGGGGAGGACGGGTAGTG
GGGAGCACGGTGGAGAGCGGGGACGGCCGGCTCTTTGGGGACTTGCTGGG
GCGTGCGGCTGCGCTATTCAGTGGGAAGGTTCGCGGGGTTGGGAGACCCG
GAGGCCGAGGAAGGGCGAGCAGAGCACTGCCAGGATATCCTGCCCAGATT
TCCCAGTTTCTGCCTCGCCGCGGCACAGGTGGGTGAAGGAGTGAATGCCT
GGAACGTACTGGGAACTGCACCAGGCACAGAGAAAGCGGGCTTGCCATTA
TAGTGGGTTCCGATTTGGTTTGGAAAACATGGGCAGCGGAGGGTGGAGGG
CCTGGAGAGAAGGCCCTACCCGAGACAGGGGCGGGGTGGGAAGGACGGCA
GATGCTGGGAGCACGAGGCAATTTCTTTATGACACAGAACTCATGCTCTA
GTATTCCATCTGTTTCAGCCGAAGAAAAGAACCAGCTGAAGGGGCAGGGG
AGAAGGGGCGGAGGTATTCTCGAGGCCCATTGGCGTCCTTTAGGACTCAG
GCAGGGAAGGGCCCTTGGTGCTCTGGAGCCGGAGGTGGTGCGCCTGGTAC
TGGGACCCCGGAGCTGAGCCCGGCGCCTCAGCCCACCTGGCTGTCTGCCG
ACCGTGTGCGGGGCGAGTTTGCTCAACAACTCTGCCAGCTTCTGGCCCTC
AGGCTGTGGGAAGCTTCTTCCCGGGGCGAGACCACTAGCTTTTTCTAAGT
ATTACCAGCCCAGGACTTGGCTGAGGTTCTGTGTCCCCCAGCTTGGAGTC
AGATGTGGGGTTGAATCTTGGCTTCCTCTCACTAGCTGTGGTGCTTGACA
AGTCACTTATCCTTGAGCCTCCATTGCCTAATCTTTAAAAGGGAGGTGAC
AATCGTCCCTACGGCTCAGTGGCAGCAGATGGGGAGATGAAGGGAAAGTT
CTGTTGACCATGAGTGAACTTACAATGCAAGCCCCGGGGGGATCACTTGC
AGTTTTGTCCCTGTCTGCAGTGTGACCTGTTGGTGACATTGTCTTTGCTC
CAAACCACAGCTCCTGGGGCAGAGGGGAAAATTCTGCCACTCACAGCTGC
CTGCCCACGCTTCTGTCTGAGTGTGCTGGGTGGCAGGATGGCAAGTCCTT
ACTCAGCTCAGTATAGCCCTCTTCCTTGTTCCCTGAGCCTTTGACTTTCT
CGAGGGATGTTGTGGGGTTGTGGCCAGGATAAGAAAGGGCATTTCAAGTT
ACCACTGCTCCAAAACAACTGTTCTGGAAATAGTGAGTACCCCATCCTGA
GAGGTGAGTAAGCAGAGGCTGTATGACCACCTGAACCAAGCCCTTGAGGA
TGTTTCTTCTCTGGTGGAAGTTTGGAACAGGAGCCTCCTCAAGTTCATTT
ATTCATTCATTCAATGGTTATTTTGTGGGAATCGAATTTAGAATGAAAAT
ATTTTTTGGCAAGCAGAAAATAATTTTTAGACCAATCCTTTTCTTTTAGT
CATGAGAAACTGAGGCCCAGAGAGAGGAGGTCACCCCAGGTGCATTAGAA
CTGGGTTTCCAGAACTGACACTCCACTGCACAGAGTACTCTCCCAATTCA
TTCAATTTTTATTTAGCGGAAGGCATTTTCAGATGGGTCTTTGAAGCATT
AGTAGGAGTTCAGCGATGATGGTGTCATGAGAATTTTATTCTAGGATTAG
GAGGTACCATGAACAAAGATACAGAGCTGGGAAAACCAGAGGTGGAAGAT
AAGGAGCACATGTCCACAGTTCTTTTTCTTTTTTTTTTGAGATGGAGTTT
CGCTCTTGTTGCCCAGGCTGGAGTGCAATGGTGCAGTCTCAGCTCACTGC
AACATCTGTCTCCCGGGTTCAAGTGGTTCTCCTGCCTCAGCCTCCCAAGA
AGCTGGGATTACAGGTACCTGCCACCACGCCCGGCTAATTTTTGTATTTT
TAGTAGAGAAGGGGTTTCACCACGTTGGCCAGGCTAGTCGCAAACTCCTG
ACCTCCTCAGTGGATCCGAGGAGGTGATCCTCCCGCCTCAGCCTCCCAAA
GTGCTCGAATTACAGGTGTGAGCCACCACGCCTGGCCTCCACAGTTCTTT
ATCCACCGTCTGAAATGTAAAATGTTACGAAAACCAAAAGTTTTTTTTGT
GATTTATTTGATGGTAGCACCTGACGTGAACTGACATGAGATTATTTTTA
ATTTAGTTGTGTGAATATGCATATTCATATATTTTGCTGCATAGATTACA
GTATGCAGCTCCAGATTCTTCCAAGCAGACTCTGATTGCCCATTACTGCC
TTTCTAAAATCCAAACAAGTTCTGAGGTTCAAAACCGTTTTGGCCCTAAG
GCTTTGGGTAAAGGGGGTGGACTCTGTTCTACTCTGACTGGAGTCCAAGA
TGCATATATACAGAGATATGGGTGATGGGGCTGCAAGGTAGGTTGAGGTA
GGGGCCAAGGAGGAGCATGGAGTTTGGACTTGATTCATGAGGCTGTGGGG
AGCCAGTGAAGGTTCTTAAGCAGGTATGTCTGCCTGAGAGCAGTTGGAGC
AGACAAGAGCTAAAAACCAAACAAATCACCATAGATAGTGGCTGCTATAA
TTTGTTTGTCCCCTCCAAATCTCATGTGGAAATTTGGTCCTCAGTGTTGG
AAGTGGGGCCTAATGGGAGGTGTTTGGGTCATGGGGGAGGAACCCCTGTG
AAAGGCTTGGTGCCGTCCTTGTGATAATGAGTAAGTTCTCCCGCTATGAT
TTCCCTTGAAGGCTGATTATTAAAAAGAGCTTGGCACCTCCCTCTCTTCT
CTCTTGCTTCTTCTCTTGCCATGTGATTGATCTCTGCACATGTAGGCTCC
CCTTCACCTTCTGCCATCAGTGAAAGCAGCTTAAGGCCCTCACCAGAAGC
AGATGCTGGTGCCATGCTTCCTGGAGAGCTTGCAGAATCATGAGCTGAAT
AAATCCCTTTTCCTTGTAAATTACTCACCTTCAGGTATTCCTTTATATAG
CAACACAAAAGGACTAAGACAGTGGCCTTGACTTTTCTCTCTCTTTAAGA
AGTGTTGCCTTTGCTCACTTAGTCATCCCTTCTGCCTGCATTTGTAGAGC
ATCTGGATGGGAGATTTATATAACCGTCACTCTTGACTTTCCCAGCAGGC
CTATGTCATAGGTACTGTGGTCTCTACAATACAGCAGAGGTATCTGAGGC
TCCGAGAGGTTGAGTGACTTGCTCATGGCTGCACAACCAGTAAATATTGG
AGCTGGAATTCAGGTCCACGGTTTCCTGGCTCCAAAGCCCATGATTTTTT
CCCTCAATTTATTCTGACTGGGGCATGGGGGAGGGGGTGGCCTTTGGGCA
GGGCCACCAGGAGCGACCAGGCCCGTAGAGAGCTGGGTGCAGGTACAGAG
GAAAACCTGTTGTCGAGTGTGGCCCGTAGTTCCCATTTTTGCCTGAATGG
CACATTTGAAAGTGTTATATAACCATGTGAATAATAATAGTTGGCCTATA
TGAGTTCTTTAATTTGCTTTTTGGTCCGCATTTGGTAACTTCTTTATCAT
CTACTATACTCTGTTGTGTCTCTTTTGTTGTAATTTGTAAGTAGGGGTGA
GATAAAGTACACCTAGGGTTTGCTGGGTTTCTTCCATGTCATCATGTTCC
TCCTTGCATGGGGCCAGGATCCGTGGAGGTTGCCTGGCACCTACGTGGTG
GTGCTGAAGGAGGAGACCCACCTCTCGCAGTCAGAGCGCACTGCCCGCCG
CCTGCAGGCCCAGGCTGCCCGCCGGGGATACCTCACCAAGATCCTGCATG
TCTTCCATGGCCTTCTTCCTGGCTTCCTGGTGAAGATGAGTGGCGACCTG
CTGGAGCTGGTGAGCCACCCTTTTTGGGAATGGCACTTCCTGATAGGGCT
GGGCCACTGCATATACACTGGGGACTGTGCTTAGTAGGCCCATTGCTGAA
AATCAGAAGGGGACAGCAAGTATGTATTGAGCACTTATCGGGTACCAAGC
ACAGTAACTACTGGCTTTCTGTATAGAATTCCCTTTAAGCCTGGCCATGC
CCCAGTGGTACGTCTATCTTCATTTGAAAGACGAGGAGACTGAAGTTCAG
AGGGGACCACACAGACAGCTAGGGGTAGAGCCTGGATCAAACCCATTGGT
CTGCCTGCCAGCCATTCTTGTGCCAATGCATCTGCTGCCTACGGAAACCT
GTAGGGACAAGGCCCTGGGATGTTCAGTGGAGCCTGAGTCATTTTATAAA
AAAGCATGACTCTAGGGTCCAAAATTCCTTTGAAGCTGTTGCTATCCAGA
GTGAAGTCCCTTCTTTAGGACAGGGTGGCCCTCCTCCCTCCTGGATGTCA
CATCTTCGGTGGAGGGGCAGAAAGGGGACTGGGTATTCTCCTCACCCTGG
CCCTAGTGCTTCAAATCTTAAAAAAACGTTTTTATTTGTGCTTCTGCACC
ACCTTCTAGCCCACCTCGTTTCCTGGCCTCTAACTTGATGAGAGCGTGTG
TCATTTTCACACTGATTCTCCACATGGCAGGCGGTGCTTCTTAGCCTCCT
GCAGACAGTGAGGCCCCACGGTCTTGTCCAAGGTCACACAGCGTGTAATG
GGCAGGGTCAGAGTCTGGAGTCTGGACCTGGGTCTCCTAGCTGCACTGCA
CTGCTGCCCCATGGGTTAATCAGCTCAGCATACCGTGGCTGAACAGCTAC
CTCATACCAAGGCCTGTGGCGCCATGACAGGGATTGACAGGGTCCCTGCC
TTGGAAACCCGTAGTCTAAGTAGAGGAGACTGACAAGTCAATGCCTTCCA
TCAGTCTGCTCAACACACGTTTACCAAGTGCCTACTGTGTGCTGCAGAGG
CGAAGATGACACAGCTCAGGCCTTTCCCTTGAGCTTACAGTTCAGGAGGA
GAGACTGACCAGTGACTGCCAGTACAGTTGACTATGGGACAATGTGCTCA
GCCTTGGGGAGAGACGAAGAAGGTACCCGTATAGCACCAGATGACAGGCA
CGAGCCCCACAGGCCAGGGCAGCTGCTCAGAGGAGAGTAGGCCAAGCAGA
AGGCAAACAGAAGGCTGCAGGCATTTGCCATCGAGAGCTGGACTTCAAAC
TGGGCATCATACCAGCCTGGGTTCGAGTCCTGCCCAGCCCCTTATTGGCT
GTCTAACCCTGAGCAAATCCCTTCACCTCTCTGAGCCTCATTCCTCTATC
TGTAAACCAGTTATAATAATTGGAACATTCATTTAAGGACTAAATGAGGT
CGTGAAGCATTCAGCAGATGCTAGGTACGGAAACTCGCTGAAGTGGGGGC
AGGTTAAGAAGCCTCTGGGGATACGAAGGCATCCAGGGACTAGTTGTGGC
AGGAGGCTGTTACCACTTAGGTCTGAAGGGTAAGGAGAGGGAATAGCTTT
CCCTCTGCCCAGTTGGAGCCGGTGGCATGGAGGAGAGGCTGCCTGTGGGG
AATCACCCGAGGGTTCACCGCTGCCATGCGCAGGGAGTCAGGAGGTAGGG
AGGGAGTGGGGCAGATGCACACCATTTTTTTTTTTTTTTGAGACTCTGTT
GCCCAGACTGGAGTGCAGTGGTGCCATATCTGCACCTCTGCCTCCCGGGT
TCAAGCTCACTGCAACCTCTGCCTCCCGGGTTCAAGCGATTCTCCTGCCT
CAGCCTCCCGAGTAGCTGGGACTACAGGTGTGTGCCACCATGCCTGGCTA
ATTTTTGTATTTTTAATAGAGATGGGGTTTCACCATGTTGGCCAGGCTGG
TCTCGAACTCTCGACCTCAGGTGATCCCCCACCTCGGCCTCCCAAAGTGC
TGGGATTACAGGCGTGAGTCACCGCTCCCAGCTGCTGATGCACTCTTGTC
CTTCTAACTCCTGCTAGTGCCTCCCATTGGCTGAGCCCAACTGGAAGCTT
TGCAAGGGAGCTGGTGCTGCAGTTTGCACTGAGCAGGCTGGAGAAGGCTG
GAGAATAGACTAGGGGACAAACCGAATTGCCAGTGCTGTTATGTCATGAT
TTAGGCATGGAGTCCAGGGCCTGAGCTTCACTCCATGTCCATCCTGCCCA
GAGCCTTGGCACAGCCTGGCTCCCAGACAAGATGTCAAGTTCAGAATCCT
TCCTAAAAGGAATCCTCTATGCCAGACCGTGTTGCAGGGATATGGGAGTG
CTGGGCTCCCAGCCTGATCAAGGAGCGAGAAAACTCAGGCTCCTAGTCTG
TCCTCCGGGGCACTAGCAGGGACAAGGTGGGAGGCTGCTGGGCTGGGATG
TGGGGACAGGTTTGATCAGGTAAGGCCAGGCTGTGGCTGTGTTTGCTGCT
GTCCAAATGGCTTAAGCAGAGTCCCCCGGCCTCTCTGGCTTCTGCAGGCC
TTGAAGTTGCCCCATGTCGACTACATCGAGGAGGACTCCTCTGTCTTTGC
CCAGAGCATCCCGTGGAACCTGGAGCGGATTACCCCTCCACGGTACCGGG
CGGATGAATACCAGCCCCCCGGTAAGACCCCCATCTGTGCCCTGCCCCAC
CCCATCTGAGCTGAATCCATTTGCTCTGCCCTGGCCTGGCCTCCCTGCTG
GTGGTTTCCACTTCTCGGGGGGCTTTGGGACTCAGCACCTCCACTGACCC
CTTTTTTTCTGTCCCATCCCCATCCCCTGCAGCCCCCACTGCCTGCCTTC
CTGTTGCCCCACAAATGCAAAAGTCTTGCCTTAAATGATCCTCTTTTCCT
TCTTTTCTCTTGTTTTCCTTTTCTCACCATTTGGAATGGCCCAGCAGGCT
GCACTTACCTTGGAAGGAGGGTTCATCTGATGGTGACTCTACCTAGGGCC
CCCAGGCCTCTATAACTCCCAGTGCCCTGCAGACTGGACCAGATCCTTTA
ATGGGATAGACACAACCCTGTCTGGGATGCCTCTGCCTACCTTCCTGTTT
TGCTGCTCCACCTGCCTCCAGCTCCGTTTGGCTTCCTGGGGCTCCCTGCC
TGGGCCACTTTGTGTCTTCCCTCTAGGCCTTTCTTTCCACTGTTCCCTCT
GCCTGGTGTGGCCTGGCTATGGAAGGGAGGGAGGAGGAGCGGCCATGGAA
AACGGTCTGCATTCTAGCAGGGACTTGCAGGTGGCAATTCAGTCGGGGAA
GACTCTAGATGCACCTGGCCTGAGGAGAGAATGAAGGGTTCTAGTTGGAC
TGTGTTAAGTTTGAGGTGCCCATGGTGTGAGGTCTGGAGCTCAGCGCAGA
GATGATGCAATGTGGTGGGTCCATGCAACATGGTGCCAGGACGCAGAGCT
TGGGGTGAACTCAGCTTTCACCCCTTACCGGTTCTCGTGGGATCTTGGGA
AGCCACTTTCTTCTATGAGCTTTGTCGTTCTTGTCTGTAAAATGGGCACA
TAACCCTGTCCCTGTCCTTCTCACAGGTTGCTGTGAGACTCCAATGAGTT
GAAGGATGTGCAGATGCTTTTGGAAGTGAAAAGTTGGGGGGCTACTGTGT
GACTTTGCATACACCCAAACTGTGTGACCTTGCATATGTCTGAGTTGCTG
CCATTGCAACAGATCAGAGCTGGTGGGCTGGGTGTGGAGAAAGGGTTTGT
GTGGGGGACATCCTCTGGCAAGGGTGGCAGCAGCAGAAGTGAGGGGCCTG
GTCGGTCATGTGTGCTGACCCGGCCTGGGCAGCCTGTGGCCAGGGAGAGG
ACAGCTCCTCTGTAGGAAGAGCCTGTTCCTTTCCAACCAGGTGAGACCTC
TTCAGTGGAGCCCTGGAGCCCCCTGTACTCCACATCAGTGCCTCAGGGAC
CTCCCGGAGCAGGCTAATATCAGAGACCAAGAGGGACACTGGCAGAGGAT
CACAGAGACCCCAGTCCAGGCAGGGACTGAGAAGATCTTGCCCCCTAAGT
TAGTTTCCTAGCACTGCTGTGACAAATTACCACCCCCTCGGTTGGAACAA
GTTGATTCTCTGCAGTCCTGGAGGCCAGAAGCCTGAATCAGTGTCGGCAG
GACCACTTTCTCCCGGGGGGCTCCAGGGAGAAGCTTCTCTTGCCTCTTCC
GTGTCCCAACAGCGGCAGCACACCAATCCCAGCCTCTGTCTTCACACAGC
CTTCTCTGTGTCTCTCTCCTCTTCATTGTCTCATAAGGACACTTGTCATT
GGATTTAGGGCCCACTGGATCCTCCAGGATGATCTCATGTGGGGAACCTT
AACCACATCTGCAAGGACCCTTTTTCCAAATAAGGTCACAGCCACAGGTT
GTGGGGGTTAGGATGTGAGTGTATCTCTTTGGCAGCCACTGTTCCCTCCT
CTCCCTTGGGCCAGAAGCAGACGTGGGGCCCTTTCTTCCCCATAGGATGC
CCATGGATTGCCCCCCTTCCCGCTTCCCCCGAGTGTCTGTGGGAGGTGGC
AGGAATGGCAGGCAGGGGTGTGGAACCCCTTCTGGAGTCATATCAAGGGC
TTGGCTGGAGGAAGTCCTCCTGGAGCTGTTGGGCTGGCATGGGGCAGGCT
GGCTGGGCCCAGCAGCAGCTTCTTCATTCATGGGGAGGCCACAAGCATGG
GCCCTAGAGCTGGCTGCCGCCCTCAAACCCAGACCCTGCACTCTTAACTG
TGTGACCTTGCATACGTCACTCACCCTCTCTGATCTTCAGGTTCCTCTGC
AAAAGGGAGGTAATGATAACCCTCACTCTGGGGGGCTGTTTGGAGGGTTA
AATCAGTTATTGCTGTAGCATGCATTTCTCTGTCAGGTATTGAGTGAGGT
GCTGTGATTTTAGCCCTGCATTTTTCTTTTCTTACCATTCAATAATAACG
TTTTGAGCACCCACTGTGCGCCAGGCACCATATTAGGTGCTGGGGATACA
AATGTGAATGAAATGAATGTGGTCTCTTCCCCCAACAGTGTATCCAGAAG
ATTAATCCATTCCTTAAACAAATGCTACTTGACACAGATTAGTTCTGGAT
AGGCTGAGAGCTCTGAAGGAGTGCAGGCAGCTGCGAGCCTGTGTATCCAG
CAGAAGGATCAGGAAAGGATTCCTGGAGGAAGCGCTGTTCTAGCCAAGAC
CTACGGGGGCATTATTAACCAGGCAAAGGGGACGGTGTCCAAGCAGTGGA
ATGAACGTGGATTGAAGCTGTGAGGCAGGAGGGAGTGTGGCCTGTGCAGA
AGGGACCGAGGCTGGTGAGACCAGGAGGGCCTGGGTGGCCTCCAGGTCAG
ATGTGAAAGGAAGAACTTGGCCACAGTCTGAGCTTCTCAGGCGTATGGCA
GGGCTGCCTGGTGAGAGGGAATGAGCTCCCTGCTCTGGAGGTATGCAAGC
AGGACTGGGCTCTCACCTGCCAGAGGCCACAGAGCTTTCCAGAGGCTGGA
AGAGGCCACTCCAAGGCCTCTTTGCCCCTGAGAGTGGTGGCTCTTCTTGA
GGCCACCTTGCCACGCTGTCACAGGGAACTAGCAGCCCCTGCCTCACCCG
GGGGTTTGGAAGATAGAGGGAGGCCTAGGAAGGGCCCTGTGTCTCATCCG
AGCTGGGCCCCTTTCCAGCCTCTCACTGGAAGGAAGCCCAAGGATGTTCC
TGTGGGGGCTTTTACCAGGCCCACCTGCCCTCTGCTGGCCATGCTTGCAG
CCTCCTGACCCTGTCCCAGCAGGACAGTGGGCTGGTGTGAGCGGGCAGGA
ACCGCCTGCACTTAGAAGGTGTGGGGCTGCCTCCCCGAGCTTCCATCTGC
CGCTGGGGCCACACCCCAGGCCCAGGGATGGGACCCCACAGTGGTCACAT
CATCTTGCAGCAGAACCCAGGTACAGCTCCTGGAGCAGATGGTGGTCCCA
AGCACGGGTGGGACCAGAAAGGACTCTCACCTGGGCTAACTCAGCTGCAG
CCTCAGTTCCCTCCTCACACACGACGAGGAACATGGACTGGAAGCCTGCC
CAGCAGGCCTTCTGCTCGATGTGCGTTGTGTGGCTTACGTCCAGGGAGGG
AAGCAGCCTCTGTGCTGTCTTCTAGATAAGCCTGTATTCCCCGGGCTGTC
TGCCAATGTATCCAGTTGTCCCGTCAGCCTGGAAGCTCTGAGGGAAAACC
TTGGGCTGCTTCCTGAGCACCTGTATCCCCTGCAGCCAGCCCGGGGCCTC
TGCTAGGAGCAGACTGAGCATGGCTTATGGGCCTGGCACCATCTGGCCTC
TGCCCACCTTGCTGGCCTTGTCTTGTGTCTGCCCCTTCGACATTCCATAG
CCCAGCTCAATATCTAGTGGTTCCTCTAGGGTGGCGAGCACTGTTTGGTC
TCCAGATGTCTTCAGGTCGGAGCTCACAGCGCTCTCAGCCACCCCTTCCC
AGTGTAGCACCGGGCACATGGTAGATGCCTATTGATGAGTGAAAGCTCCT
AACACACTCAGAGAGCAAGGACTCCGCCTCATCCCACAGCCTGGGAGGAG
AGGCAGACTGCCAAGGACCTGCTCAGCATGCTACAGAAGAAACCAAAGTG
CCCACGGGACTGATCAGTGGAGCTTCCTGCCGAGACTGGAGGCCTTAGGG
CAGGGTAGACAGTGTGTGTGCAGGCTGGGGACTCACAGTTCGGACTGTGC
CCAGACCTACTAGCATAGTGGGTGGGTGGGAGGATGCGGGACTGGGGGCC
GACCTTGCCTGAAATTCATGTGGGATCTCAGAGCAGCCACTGAATTGCTC
TGTAGGGGGCTAAATAGTGGCCCCCACAGATACACACACCCAGACAGAGC
CTGTGAGCCAGACCTTATTTGGAGAAAAGGTCTTTGTAGATGTAATTAAG
CATCTCAAGATGGCATCATCTGGATTATGCGGTGGGCTGTAAGTCCTGTG
ATGTGTCTTTATGAGAGAAAGGCAGAGGGAGATTTGACACACACAGGAGG
GGCCACGTGGAGACAGAGGTGGAGATTGGAGAAATGTGGCCACAAGCCAG
GGAACACCAGCAGCCACCAGAAGCCGGAAGACGTGAGGCAGGGTTCTTCC
CAGAGCCTTCGCTGCTGAGTCTGGGAATTTGTGACCGAAGCCATAAGAAG
TGGGTACACGCCCTGAGCCTCCCACACTTGCTCACCTGTCCTGAGATGAG
AATCTCTACTCTGCAGCATATTTGGAGGATCACTGCGGGGGCCACAGAGG
TGCTGTTCAGATGGCACTTCAGAAGACTCAGGAGACCCTGGGGCAGGAGC
AGTTTGACTGACAGCCCAGAGGGCTGCCCTCTGATTCCACCTGAGGCCCT
GCTTTTCCTGGCTGCAGGGGTTCCAGGGCCAGGCCATTTCCGCTGGCGCA
GGACTCTGCTAGCAGCAACCTGCCTGAAGTCTTCCTTTGGCCTGGCTGAG
AGTTTCTGAGACCTGCGCTGGAGCGGAGGTGCTTCCTTCCTTGCTTCCTT
TCTTCCTCTCTCCCTTCTCCATCCAGCAGGCTGGACCTGCCTGGCATCTG
TGAGCTCTCCCTACTTTCTCCTATACCCTAACCTTTGTCCTGCATGGGCG
ACTCCCCCAGTGAGTCTCTTGCAGCTTTTACCCCAGTGCCTGCTTCTTGG
AGAATCCAAACTGATCCAGTTAGGGATGATAAAGTGTAGGGTAGGCGCTC
GGTGACTGTTTTCTCTGAGGTTGTGACTCGTGTGAGGCAGAAGCAGTCCC
CGTGAGCCCTCCTGGTATCTTGTGGAGTGGAGAACGCTTGGACCTGGAGC
CAGGAGGCCCAGACATACATCCTGTCCGAGCTGCAGCTTCCTGTCTCTAA
AATGAGCCGGCCAGCGCAGGTGGCCAGACATCACTGTTATTCTCCTTTGA
GTCTTTAAATCTTGTTGTCTTTCTTGCAGACTCGGTGAGCTGTGAAAGGC
TATAATAGGGGCTTTATTTTACACTTTGATACTATTTTTTGAACATTCAT
ATTATTGTTAGATATTGATATTCATATGAAGGAGCAGGATGACTTGGGTC
CTTCTTGGCAGTAGCATTGCCAGCTGATGGCCTTGGACAGTTACCTGCCC
TCTCTAGGCCTCCCTTTCCTTGTCTATGAAATACATTATAGAATAGGATG
TAGTGTGTGAGGATTTTTTGGAGGTTAAACGAGTGAATATATTTAAGGCG
CTTTCACCAGTGCCTGGGATGTGCTCTGTAGTTTCTGTGTGTTAACTATA
AGGTTGACTTTATGCTCATTCCCTCCTCTCCCACAAATGTCGCCTTGGAA
AGACGGAGGCAGCCTGGTGGAGGTGTATCTCCTAGACACCAGCATACAGA
GTGACCACCGGGAAATCGAGGGCAGGGTCATGGTCACCGACTTCGAGAAT
GTGCCCGAGGAGGACGGGACCCGCTTCCACAGACAGGTAAGCACGGCCGT
CTGATGGGAGGGCTGCCTCTGCCCATATCCCCATCCTGGAGGTGGGTGGG
GACTGCCACCCCAGAGCGTTGCAGCTGTACTCCTGGGTTGCACCCCCCCC
AGCTGTCACTGTCCCCTCCCTGCCATCAGTTGTGGGAAGGGCGTTCATCC
ATCCAGCCACCTGCTGATTTGTTATAGGGTGGAGGGGGGGTCTTTCTCAT
GTGGTCCTTGTGTTCGTCGAGCAGGCCAGCAAGTGTGACAGTCATGGCAC
CCACCTGGCAGGGGTGGTCAGCGGCCGGGATGCCGGCGTGGCCAAGGGTG
CCAGCATGCGCAGCCTGCGCGTGCTCAACTGCCAAGGGAAGGGCACGGTT
AGCGGCACCCTCATAGGTAAGTGATGGCCCCAGACGCTGGTCTCTCTCCA
TCTGGACCTGGCCTGGGAGGTGGCTTGGGCTGGGCCCAGGGAGAGCTAAT
GTCTCCTAACCAAGAATGCTGTGGCAGCCTCTGCCGCAGAGCCAGAGAAC
CAGAGTGCCAAGGCTGGCAGGGTTCCCAGTGGCCACGAGTGCAGATGAAG
AAACCCAGGCCCCAAGAGGGTCATGCAGGTAGCCCAGGGAGTTCAGCCTT
GACCCTGGGTCAATGACCTTTCCACAGTTCCACACTGCTCCCCTTTTAAA
ATCCGGTGATGTCTTTATGTCTTTTGTTATGTTATCTTCAATGTGGAGGG
ACTCGAGGTGATCTAAGCAAACTTTTTCTATCTTCTGCTTGCATACCTCT
GAGACCAGGGGACTCACTCACTTGCATGACTGGGCCCTGCAGGTCACACT
GGCCAGGCAGATGTGGTGGAGGAACTGGCAGAGGACTTTTTCTAGACTGT
GACTACATTTAGTCCACCCAGCGGCCCCCCTATGAAGTCCAGTTGAGAAC
TAGGACTCTGGGGGCCGGTGGACAGAGAAGAGGGAGGGTTCTCTCCCTTA
CTGACTTCCTTCTGTGGCCAGACATTGAGCAAGGCCTCTGTACAGCATGT
CCTGGGGCTGGCCTTGCCGTAGCTGCTAAATAGTTGACGAAACCAGTCCA
GAGAGGGGAGGTGACTGCCAGGGTCGCACAGCTCAAGCTGGGGAACTCGC
TGGGAAAACTGTCAGCTCTGGGCAGCAGCTTGACTTCCACTGTAAGCCCC
AGCCCCCAGGGTCAAACACTGGCTCTGGTGCTGGCAGAGGCAGCCCACTA
GCCTGTTTCAAAGGCTGAGAAGGCCCAGGAGTCTGCCCTGTGCTCCACCA
GTTCTGCCCTGAGACTTTCCTACAGAGTACAGGTTTTGATGTTCAGTTTT
AAAGGCAAGAATCAATAACCTTCTGCCCCATCAGGTGACCCCTTGTGCCT
GTCCCACCCCTTTATTGACTGACCTCGGCTCAGTCAGGTCAGTTCCTGAA
GGTCAGTGTGTGGAGGGGAGGCTGTTCTTTCCCAGAAAGGCCTTCCCCAG
GCCTGGTGCTCTGGCCTCTGGAGGACTTCCTGGAGAAGTCCCTTCTTTGG
GGTCCCAGTCAGTGTATGGGAAGCCCTTATTGCATGACCTGGCACGGGGC
AGGGGCTCAACAGTCACTATTGCCTTCCTTGCCACTGCCATTTCCTCCTC
TGTAAGCAGGTGATTGTGTGTCCAGTCTGAGCACAGAGATAAGCACACAG
CAGGTGCTTAATAACTAGCAGCTGTAGGCTGGGCGCGGTGGCTCATGCCT
GTAATCCCAGCACTTTGGGAGGCCGAGGTGGGCAGATCACCTGAGGTCAG
GAGTTCGAGACCAGCCTGTTCAACATGGTGAAACCCCGTCTCTACTAAAA
ATACAAAAATTAGCCAGGCATGGTGGTGGGTGTCTGTATCCCAGCTACTT
GGGAGGCTAAGGCAGGAGAATCGCTTGAACCCAGGAGGTGGAGGTTGCAG
TGAGCTGAGATCGTGCCACTGCAATCCAGCCTGAGTGATAGAGCGAGATT
CCATCTCAAAAATAAATAAGTAAATAACTAGCAGCTGTAAATGTGGCTGT
TGTTCTTCACCTCCACACTCAGTGCCACTCCACTCCCTCCCTCCGTGGTG
TGAGGGGCCTCACTAGCTGTCTCCTAGGAGGAGCATGGCTGTGAGATTCC
AGCTCCATCCTTGGCCACGGCTCCTGGAGACATCTTAGAGGCCAGGATCC
AGAAGGCTCCCACACCTCATTTGACAGGGGAGAAGCTGTCAGTTCCAGGT
CCCCTTGCACATCAGGGCCAGAGCTGCGTTAGGCCTCCAGTCTCCAGGCC
ACTGGGCCAGAGCTCACAGGCTGGCAGAGGGTTAGAACTGTTACTGGTGG
CTGGGTGCAGTGGCTCACGCCTGTAATCTTAGCACTTTGGGAGGGCAAGG
CGGGAGGATCATGAGGTCAGGACATCGAGACCATCCTTGCTAACACGGTG
AAGCCCCGTCTCTACTAAAACTACAAAAAATTAGCCGGGCGTGGTGGCAG
GCGCCTGTAGTCCCAGCTACTCAGGAGGCTGAGGCAGGAGAATGGCGTGA
ACCCGGGAGGCGGAGCTTGCAGTGAGCCGAGATTGCGCCACTGCACTCCA
GCCTGGGCAATAGAGCGAGACTCCGTCTGGAAAGAAAAAAAAAAAAAAGA
GCTGTTACTGTTGACAGTAGCATGAGGTAGACCATGGCCTGCACCAAAAT
GGGGGAGTGGAGTGCCACTGAGGCCAGAAGGAACCACACCCTCAAGGGTG
GGGAGTTATGGTATGGGGGGTCCTAGGCATGGAGTCTTTTAATTCTTTAG
ACAATCCTGGGAGCAACTGTCCCTGTTTCACAGAGGGCGGGGCCACACAG
CTGGTGAGTGGGCAGCCAAGACTCTGTTCAAGTTTGTGTGGGTCCAACAC
TTGCGGCCACGGTGGAGGGGCATCTGAGCCAGGCCTCAGAGAGTGGCGGG
GGAAGTTGGGTGGGGAAGTGTGCCCTTCTCATTCCTCTGAGGCTCATCCT
CTTGGTGCCTCTCTTTCATGGAAAGGGATAATAAGGTTATTGTGAGGATC
CCCTGAGTTCGTATATTCAGACGCTTAGACAGAGCCAGGCACAGAGAAGG
GCCCGGGGTTGGCTAGTTTGATTGCTGGTGTAATTGCTAATATCTTCCAG
TTTGTATTGGTCAAGGTTCTGCAGAGAAGCAGAACCAGTAGGATGTATAT
ATTAAGAGTTTCAAGCTCATGTGACCGTGCGGGCTGGCAAGTCTGAAATC
CGCAGGGCAGGCCAGGCAGGCTGGCAATTCCTGCAGAATTTGATGTTGCA
ATACTGAGTCCTAAGGCAGTCCTGGGGCAGAATTCCTTCTTCCCTGGGAG
GCCTCAGTCTGTTCTCTTAAGGCCTTCAACTGATTAAATGAGGCCTGCCC
AAGTTATAGAGAGTAACCTGCCTTACTCCGTCTTCTGATTTAAATGTTAG
TCACATCTAAAAAATATTTTCGCAGCAGCATTTCCACTGGCTTTTGACCA
AACATCAGGCCACAAAGTTGATCCCCAAAATTAACCATCACTCTGTGCCT
GTAAGGGAGGGGCTGGGAAAGGGGAGCAGGTCTCCCCAAGGGGTGACCTT
GGCTTTGTTCCTCCCAGGCCTGGAGTTTATTCGGAAAAGCCAGCTGGTCC
AGCCTGTGGGGCCACTGGTGGTGCTGCTGCCCCTGGCGGGTGGGTACAGC
CGCGTCCTCAACGCCGCCTGCCAGCGCCTGGCGAGGGCTGGGGTCGTGCT
GGTCACCGCTGCCGGCAACTTCCGGGACGATGCCTGCCTCTACTCCCCAG
CCTCAGCTCCCGAGGTAGGTGCTGGGGCTGCTGCCCCAAGGCGCGGGTAG
GGGGCGGAGGGCGGAGGGCGGAGGGAGGGGGGCGGGCAGGCGGGCTTCTT
GTGGCACGTGGGCTTCTTGTGGCACGTTCCTGGAGGCCGAACCCTTCTGG
CTTTGGAAGGAGTCGTCAGAGACCCCCGCCATGCGGGAGGCTGGGGAGGA
AGGGGCTCGAAACCTCCATCATCGCAGAGTCTGAATAGCAGTGGCCCCGC
CATGCGCCCACGTAGCGGCGCCTACGTAGCCACGCCCCCACACCCCGTCC
TGGCCACTCTCCCTCCTGAAGGTCTTCTGGTACCCGCCCCCTCCCCATCT
CCATCCCCAGGCCCTGCGTCCTCTGCCCAATACTCTTTGGGCCTCCCTGT
TGTCCAGCTCTCTCCGCGGCTCCATGACTGACAACTTGAGCAAGGCTAAT
GTGAATGGGAGCGGTTGAGGGCTCAGACCTCTCACCCGAGGAACATCCAC
AGAGTGTGCCGCATGCCCGGTGCAGTGTGGCTGCGGGGACACAGACACGG
AGCCTCGGCCCTGAGGAGCTGGGGGGCAGTGACCGTCCCTCCTCTGACCC
ACCACTCCTCCAGTGTCAGGACACTGCGGGTATCTAGGGGAAGGAATCTT
GTTCCACTTCAAGTCTGGAACTTCAAGTCTGTGTGTGTGCGTGCGCGCGC
GCGCGTTGGGGGTGGGGGTTGCAGAGCAGATGCGTACCTGACAGCGGTAA
CCTAGGTCCCCCCTGGCCTATCAAGGCTTCCCTGGCGGCCGAATTTAAAG
GCATCAAGCAAACAAAGCCCAACACATCTCTGCCTTGTCCTCTCAGTTTC
CCCCCGTGGCACTTAGAACCACTTGATACACCGAATAGTTTCCTATCTCC
CCCACTAGGATGTAAACTCCACAGGGGCATTGGGAATGCTGCCTGGCTAT
GGTAGGGACAGAGGGGAGCACCAGGGCGGGGCAGGGGTGCCAGAGTTCTG
CCTGGGCAGTCAGATTTTCCTTAGGAGGGGACATTTGAGTGGGACCCAAA
CAGGTGTATAGCAGTTGTCCAGCCCAGCTGGCAAGGCCTGAGTCTGCCTC
TGCAACCCCTCTCTTGGGCTCCTTTCTCTGCCACCCACCTCCTCACCTTT
CCAGGTCATCACAGTTGGGGCCACCAATGCCCAAGACCAGCCGGTGACCC
TGGGGACTTTGGGGACCAACTTTGGCCGCTGTGTGGACCTCTTTGCCCCA
GGGGAGGACATCATTGGTGCCTCCAGCGACTGCAGCACCTGCTTTGTGTC
ACAGAGTGGGACATCACAGGCTGCTGCCCACGTGGCTGGTAAGTCACCAC
CCCACTGCCTCGGCCACCGTGATGCTAACAGCCCCTTTGGCAGTCAGGGT
CTGTGCCGGGACCTCCAGTGCCAGGCTCTGTGCAGGGGGACCAGAGATGA
AGTAGGCCTGATGGTGCCTTCAAGGACACTCAGTCTGATGAGGGAGGCGA
GTGCACAGAGGAAACACGAGGTCAGGGCTGTATTAGAGGGAGCCCAGAGG
AGGCACCTGCCCAGCCCGAGGGTCAGAGAAGGCATCTTGGAGGAGGGACA
TTTGATCGGGAGCTTGATGGATGAATAGGAGTTCACCTGGCCGATAAGAC
AGCAACTACCAAGGCTTAGAGGTGTGAGAGGAGGCTGTCTTACCTCACTG
AGTAAGGACTGCAGGCGGCTTACCTTCGAGAAGAGAGCTTAGTGTCTGTG
TGCACGTGTGTTTGTGTGTATGTGTGTGCGTGTGTGCACTGGCAGGAGTC
CCCTGCTGGGGCAGGAGGGCCGGGCCATCACCATCTTTCACCATTCACCC
CTGCACCAGGCATTGCAGCCATGATGCTGTCTGCCGAGCCGGAGCTCACC
CTGGCCGAGTTGAGGCAGAGACTGATCCACTTCTCTGCCAAAGATGTCAT
CAATGAGGCCTGGTTCCCTGAGGACCAGCGGGTACTGACCCCCAACCTGG
TGGCCGCCCTGCCCCCCAGCACCCATGGGGCAGGTAAGCAGGATGGCAGG
GTGGGCAAGTCCAGGCTGGGGCTTGGGAGGTCTGTGTGACCTTGACAGTC
TCTCCCTTCTCCCTTGTCTGTGTAAGGAGGATGACGCCACCTTAAATAGG
ATTAAATGAGAATGGGGCTCTGAAAGGGCTGTGCAATATTTTCATAACGT
GTTTTTATAGAGACAGTTGAGTATGTTCTTTAAGCCCTCCTCTCTCCTAC
CATGAACTAAAGATTTCTGTGGAGGTCCCCTCACTCCCAGCACCCCCTCC
TCATCCCAGGCCCTTTTTGCAGGTTGGCAGCTGTTTTGCAGGACTGTATG
GTCAGCACACTCGGGGCCTACACGGATGGCCACAGCCGTCGCCCGCTGCG
CCCCAGATGAGGAGCTGCTGAGCTGCTCCAGTTTCTCCAGGAGTGGGAAG
CGGCGGGGCGAGCGCATGGAGGTGACTGTACCCCTCCTTCGTGTGTGTGT
GTGTGTGTGTGTGTGTGTGTGTGTGTGTGTGTGTGTGTGTGTCAGTGCTG
GGCCCTCAGGGACCCCCAGCAAGCCCCTCCATCCTCCAGACTCCAGCTCT
TCTGTAAGCTTACAGGGCTGGCCAGACCAGGAGTGGGGCACTCCTCACTT
CACGCGGCTGGGGGCTGCTGGAGAGAGCCACAGCGGGAAGGGTTTCCTAG
AGGCTGCAGGACAGTGCTGGATGGATTTTCAATGCTCACCTGGGTGTGAG
CGTGCGGCAGGGCCGCGTGAGGGTCAGCGATCTGCTACTCTGGACTCAGC
CATCTCTAGGCCCCTCTCACTCAGGTGCTCCATGGTTCTGGGAGCTGAGA
AATCTCAAACCAGCAAAAAAGTGGAATTGATGTTGATGCTACAGGATAGT
GCACAGATGCCATCTGGTTGCAGCATTTTGGTGGAAGGGCAGTGCCCAGC
TAGGAGAGTGAGGAGGGGCAGGCATTTCTGGCTTGAGGAGATGGGGTCTT
AATGCTCGTGTGAGAGGCAGAGTGGGTGGAGTGGAGCTGGCTGGATCCTT
GCTTTGGCCTCCTGGATTTCTCTCTATCTCCATTTTGAAACCACTCTGTG
TTTGGAAGAACTTTTGAGTATTCAGAGCTGCCCACTGGCAGAACAGTCTT
CCTTGGGCAGGAGTGAGCTCCTTGTCCCCAGAAGGCTGGGTCTGGCTGGC
CCCTGGCAGGGACACTGATGAGGGTGCTTGAGTTGATCCTGTCTAGTCCC
TTTCTGTGTTTTCAAAGCCCATTCTAAAGCAGATTCCCATTTCCGTCTTT
GACTCTAAGGCCCAAGGGGGCAAGCTGGTCTGCCGGGCCCACAACGCTTT
TGGGGGTGAGGGTGTCTACGCCATTGCCAGGTGCTGCCTGCTACCCCAGG
CCAACTGCAGCGTCCACACAGCTCCACCAGCTGAGGCCAGCATGGGGACC
CGTGTCCACTGCCACCAACAGGGCCACGTCCTCACAGGTAGGAGGCTGGG
CTTGCCCTGGGGTGAGGAGGGGTCTCTTTCTCCTTATGCACCCACTGCCC
GCGAGGCTTGGTCCTCACAAGTGTGATCCATGAGACTCAAGCCTGACTTG
CAGTTCCATACTCTGGTTCTGCCACTTCCATGCCCTTTGAGCCTGGGCAG
GTGACCTTACTTCTCCTCATCTCAGCTTCCTCCTCCATAAGAGGGAAAAA
GGTATTACCTGCCTCATTGTGTTGCAAGGAGATGGGCAGCATCTAGGGCA
CTGGCCTGGAGTATCGCAGGTGCTTTGCCTAAGGTGGTGCAGTCCAGGAG
AGGCAGCTCCAGAGAGAGGCCCCCGGCTGGGGCTGAAAGGAGGGCAGACC
TCGGTTTGAATTTCACCCTGCCGCTCTATAGCTGTGTGACTTGGGCAAAT
TACTTAACATCTCTGTATGAGGAAATGATGAGTGCTAAGCACTTAGCTTA
GTGCCGGGACAATATAAATTCTAGCTATCGTTACTATTGTTTTCATCACC
CGTTGCTTTAAAATCCAGCCTCTGGTATAGGCAACTATTGACGGGCTACC
CTGTGTCGAAAACATGCCCAGGCAGGTAGCAGGAAGTCACAGATGGGGAC
CTCTTGGGGCATCAAGGGATGGTGCCCTGAGGCTGAGCTGTTCTGGTTGG
GTGGAGCATGAGAGGTCTGGGAAGACAGTGGGACTCCAGCCTGGAATAAG
AGGCTCAGAGTTGATTCTCGTCTGAGCACGTCCAGGGGAACCACTGAGGG
TTTGGGAACAGGAGAGTGAGGGTGAGAACCTGGTTCTGGGCACAGCAGGC
TGGCATGTAGGATGGATGTTCAGGAAAGATGAGCATAGTCAGGTGGCTGG
TGCCCTTGTCCAGGGGAGAGGCTCCGTCAGGTTCAGGGGTCCTGGCTTGG
AGGGAAGTCCGCCATGCTCTAATCACGCTCCCCTTTGGAAGTGCTCAGCC
GATGAGCTCACAGGCACATGTCAGTTTGAAGTCATGGAATCTGACTCCAT
GAAGCGCACCTCAAAGAGCACCATTTTGCAGCTAAGGGAACTGCAGGCTG
GACATGCTGAGTGGCTGCCCCGAGCCCTTGCAGCTAGGACATAGAGAATG
CTAGTAACCACAACCCTACCATGTTCAGAGCACATGCCAGGCTCCATGCT
GGGGCTTCGCACGTGTCATCTTCACAGTGTCCCTGTGAGTAGGTGTGGTT
TCTCTTTCCATCTTACAAATGAGTAAACAGAGCCTCAGTGTAGCTAAGTA
ACCACTATTTTAGGTTTCTTAGCCAATGGGTGTGTCTGACTCCTAAGCCC
ATGGAGGGCATTCTGAGGTGGTTCAGACAGACCCCGGCTTACCCTTGAAC
TTCTGCCTGCTGGCTGCATAGGGAGGGGCTGGGGGGAGTTTGAGCATCTC
AGGCCATAGAGCCCCTGCCTCACTGTCTCCATCTCTGGGTGGAAAGATGG
TGTTTTCCCTGAGAAACTAAGGCTCAGAGAGGTTGAATGGCTCTCCCAAG
GTCACACAGCTGGTCAGCTGCAGAGTTGAGAACACAGGAGTCCTGGTGCT
CAGGCCAGCATCTCTTTTTTTCTTTGAGTTGTTTCTAGGTTTCCTAGCTC
TTGCCTCAGACCTTAAAGAGAGAGGGTCTGATGGGGATGGGCACTGGAGA
CGGAGCATCCCAGCATTTCACATCTGAGCTGGCTTTCCTCTGCCCCAGGC
TGCAGCTCCCACTGGGAGGTGGAGGACCTTGGCACCCACAAGCCGCCTGT
GCTGAGGCCACGAGGTCAGCCCAACCAGTGCGTGGGCCACAGGGAGGCCA
GCATCCACGCTTCCTGCTGCCATGCCCCAGGTCTGGAATGCAAAGTCAAG
GAGCATGGAATCCCGGCCCCTCAGGAGCAGGTGAAGAGGCCCGTGAGGCC
GGGTGGGTGGGGTGCTGCGTGTCTCTCCTGCACAGCTTTTCTGTGTCAGT
TTGTGCCACCACCATACCGCCATGCATCAGGGTGGCGGTTTGCCAGGTAG
ATGCTGTGGGCAGCTTCCGCCATTGTGTGGACAGCATGTATATGTGTCTC
TGTGTGGCTGGGTCTGTTTTTGCTTTTGTCCAGATCAGTAAGGTTTGCTA
CCTGGGTACCCCACTCCACTTGGAGTAGAATGTGCATAAATATGGCATAA
AGAAATGCAATATGCATGCATTTATTGATTGATCTATTTTTTTCTGAGAT
GGGGTCTTGCTGTGTTGCCCAGGCTGGTCTCAAATTCCTGGGCTCAAGCA
ATCCTCTGGTCTCAGCCTCCCCAAGTGTTGGGATTATAGGCATGAGCCGC
TGCACCTGGCCTCTCTGATCTATTTAACAAACCTGCTGGGAGGGTCTCAG
GGTCAGGAGCAGCACTGGGCTCTGAGGACACAGAGCTCACTCAGCCGTGA
CCCAGAGGGGGTGCCTGAGCTGCATGCTGAAGGTTGTTAGCATGACCAGC
AAGGCAAGAAAAGGCCCTGCCGAGATTAGCAAGGCATGTGCCAAGCCCTG
GAATGTGACAGCCGGGCCTTCTAGAAACCTGAGTGTATAACTCTCCTTAA
AAGCCAGTAGGAGCTCCTCAAAAGGCAGCCCTAAGGAGTCCACTCTTAAA
TGAACTCAGAGTCAGTTTTAAAATGCAAGTCTGTGTTGATTCTGGTCTGG
ATGGTGCATTCCTCGAGAGCAAAAGACAGTCTTGGTCTTGGATCCACTTG
CCCTGGGTACACTGAGGGCTGCTAGGTTCCAGGTGCTCTTCCTGGCACTG
GGGAGGGATACAGGCCCAAGAGACATGCTGTTCTCCCTCCTGGAGCATCT
ATTTTAGTGGAGGAAGACAGAAAACAAACCATTAATATAGAGTACTGAAA
AGATGCGATGGAGAAAACTATAGCAAGGAAGGGAATGGGGTGGGAGAGAG
GTCAGGAGAGGTCTCGCTGACAAGGTGGACGAAACAGGCCATGAGGCAGA
GAACATGTTCCAGGCAAAGCAAAGGCCCCCAGGTGGGGATGTGCAGGGAG
TACCAGGAAACCAGAGAGGTGGGAATAGTTATGAGATGGGGGGTGCCTCA
GAGGGGACAGGGCCAAGTCAGGTGAGACCTGAGGGTCACAGTCAGCAGTG
AGCTGGGGCCATGCAGGGGTCTGGCCTCAGAGGAGTGTGGTCTGGCCTGG
ATCTGAACCTCTCACTGTGGCCTAGCTGCTGAGCTGAGAAGAGATGACAA
GGACCTTGGGCAGAAGCAGGGAGACTGGAGGGAGGCGGTGGAGGGTCCAG
GCGTTGGGGCGGGGCTCAGGCTGGAGTCTGAAGGGAGCCTGCAGGCCTGG
TGGGTGGATGTGGGTGGGAGAGGGGGAGGATGGCACCAAGGCTCGGGCCC
CTGGACAGATGGAGTTGCCATTAAGTGGGATGGGGCAGGCTATGGGGCCA
TCAGTTTCAGAGGGATGAGTTTGGCACTGGCATGGTAGGCATCTGTCTAT
CTCCACGGCCCTCAAACCAGGCATGAAGCAGGAGCTCACGTGTTTGGTCA
GCCATGGTGCAGAACCGCCTGGGTGGGAGGTGCGGGGTGGGAGATACACG
GTTGTGTCCCAAATGGGCTCTGAGCCAGCGAGGGCCGTCTGCACTTTGGC
CTCACAGAAGGATGTCGGAGGGAGAAATGAAGTGTGGGTGGGGGTCCCGG
GCCACGCTAGACATGTGCTTTCTTTTCCTCGGGCTCTGGCAGGTGACCGT
GGCCTGCGAGGAGGGCTGGACCCTGACTGGCTGCAGTGCCCTCCCTGGGA
CCTCCCACGTCCTGGGGGCCTACGCCGTAGACAACACGTGTGTAGTCAGG
AGCCGGGACGTCAGCACTACAGGCAGCACCAGCGAAGGGGCCGTGACAGC
CGTTGCCATCTGCTGCCGGAGCCGGCACCTGGCGCAGGCCTCCCAGGAGC
TCCAGTGACAGCCCCATCCCAGGATGGGTGTCTGGGGAGGGTCAAGGGCT
GGGGCTGAGCTTTAAAATGGTTCCGACTTGTCCCTCTCTCAGCCCTCCAT
GGCCTGGCACGAGGGGATGGGGATGCTTCCGCCTTTCCGGGGCTGCTGGC
CTGGCCCTTGAGTGGGGCAGCCTCCTTGCCTGGAACTCACTCACTCTGGG
TGCCTCCTCCCCAGGTGGAGGTGCCAGGAAGCTCCCTCCCTCACTGTGGG
GCATTTCACCATTCAAACAGGTCGAGCTGTGCTCGGGTGCTGCCAGCTGC
TCCCAATGTGCCGATGTCCGTGGGCAGAATGACTTTTATTGAGCTCTTGT
TCCGTGCCAGGCATTCAATCCTCAGGTCTCCACCAAGGAGGCAGGATTCT
TCCCATGGATAGGGGAGGGGGCGGTAGGGGCTGCAGGGACAAACATCGTT
GGGGGGTGAGTGTGAAAGGTGCTGATGGCCCTCATCTCCAGCTAACTGTG
GAGAAGCCCCTGGGGGCTCCCTGATTAATGGAGGCTTAGCTTTCTGGATG
GCATCTAGCCAGAGGCTGGAGACAGGTGCGCCCCTGGTGGTCACAGGCTG
TGCCTTGGTTTCCTGAGCCACCTTTACTCTGCTCTATGCCAGGCTGTGCT
AGCAACACCCAAAGGTGGCCTGCGGGGAGCCATCACCTAGGACTGACTCG
GCAGTGTGCAGTGGTGCATGCACTGTCTCAGCCAACCCGCTCCACTACCC
GGCAGGGTACACATTCGCACCCCTACTTCACAGAGGAAGAAACCTGGAAC
CAGAGGGGGCGTGCCTGCCAAGCTCACACAGCAGGAACTGAGCCAGAAAC
GCAGATTGGGCTGGCTCTGAAGCCAAGCCTCTTCTTACTTCACCCGGCTG
GGCTCCTCATTTTTACGGGTAACAGTGAGGCTGGGAAGGGGAACACAGAC
CAGGAAGCTCGGTGAGTGATGGCAGAACGATGCCTGCAGGCATGGAACTT
TTTCCGTTATCACCCAGGCCTGATTCACTGGCCTGGCGGAGATGCTTCTA
AGGCATGGTCGGGGGAGAGGGCCAACAACTGTCCCTCCTTGAGCACCAGC
CCCACCCAAGCAAGCAGACATTTATCTTTTGGGTCTGTCCTCTCTGTTGC
CTTTTTACAGCCAACTTTTCTAGACCTGTTTTGCTTTTGTAACTTGAAGA
TATTTATTCTGGGTTTTGTAGCATTTTTATTAATATGGTGACTTTTTAAA
ATAAAAACAAACAAACGTTGTCCTAAC
Human PCSK9 Amino Acid Sequence (NP_777596.2)
(SEQ ID NO: 6)
MGTVSSRRSWWPLPLLLLLLLLLGPAGARAQEDEDGDYEELVLALRSEED
GLAEAPEHGTTATFHRCAKDPWRLPGTYVVVLKEETHLSQSERTARRLQA
QAARRGYLTKILHVFHGLLPGFLVKMSGDLLELALKLPHVDYIEEDSSVF
AQSIPWNLERITPPRYRADEYQPPDGGSLVEVYLLDTSIQSDHREIEGRV
MVTDFENVPEEDGTRFHRQASKCDSHGTHLAGVVSGRDAGVAKGASMRSL
RVLNCQGKGTVSGTLIGLEFIRKSQLVQPVGPLVVLLPLAGGYSRVLNAA
CQRLARAGVVLVTAAGNFRDDACLYSPASAPEVITVGATNAQDQPVTLGT
LGTNFGRCVDLFAPGEDIIGASSDCSTCFVSQSGTSQAAAHVAGIAAMML
SAEPELTLAELRQRLIHFSAKDVINEAWFPEDQRVLTPNLVAALPPSTHG
AGWQLFCRTVWSAHSGPTRMATAVARCAPDEELLSCSSFSRSGKRRGERM
EAQGGKLVCRAHNAFGGEGVYAIARCCLLPQANCSVHTAPPAEASMGTRV
HCHQQGHVLTGCSSHWEVEDLGTHKPPVLRPRGQPNQCVGHREASIHASC
CHAPGLECKVKEHGIPAPQEQVTVACEEGWTLTGCSALPGTSHVLGAYAV
DNTCVVRSRDVSTTGSTSEGAVTAVAICCRSRHLAQASQELQ

### Apolipoprotein C3 (APOC3)

[0445] In some embodiments, the target gene for modification using the compositions and methods disclosed herein is gene encoding APOC3. The LDL-R mediated cholesterol clearance pathway involves multiple players. Non-limiting examples of protein factors involved in this pathway include: Apolipoprotein C3 (APOC3), LDL receptor (LDL-R), and Increased Degradation of LDL Receptor Protein (IDOL). These protein factors and their respective function are described in the art. Further, loss-of-function variants of these factors have been identified and characterized, and are determined to have cardio protective functions. See, e.g., Jorgensen et al., N Engl J Med 2014; 371:32-41Jul. 3, 2014; Scholtzl et al, Hum. Mol. Genet. (1999) 8 (11): 2025-2030; De Castro-Oros et al., BMC Medical Genomics, 20147:17; and Gu et al., J Lipid Res. 2013, 54 (12): 3345-57, each of which are incorporated herein by reference. Thus, some aspects of the present disclosure provide the generation of loss-of-function variants of APOC3 (e.g., A43T and R19X), LDL-R, and IDOL (e.g., R266X) using the methods and compositions disclosed herein.

[0446] Apolipoprotein C—III (APOC3) is a protein that in humans is encoded by the APOC3 gene. APOC3 is a component of very low density lipoproteins (VLDL). APOC3 inhibits lipoprotein lipase and hepatic lipase. It is also thought to inhibit hepatic uptake of triglyceride-rich particles. An increase in APOC3 levels induces the development of hypertriglyceridemia. Recent evidence suggests an intracellular role for APOC3 in promoting the assembly and secretion of triglyceride-rich VLDL particles from hepatic cells under lipid-rich conditions. However, two naturally occurring point mutations in human apoC3 coding sequence, A23T and K58E have been shown to abolish the intracellular assembly and secretion of triglyceride-rich VLDL particles from hepatic cells.

[0447] Loss-of-function mutations that may be made in APOC3 gene using the methods and compositions described herein are also provided. The strategies to generate loss-of-function mutation are similar to that used for PCSK9 or ANGPTL3 (e.g., premature stop codons, destabilizing mutations, altering splicing, etc.).

[0448] In some embodiments, the gene modification methods and compositions described herein reduces expression of functional APOC3 protein encoded by the APOC3 gene in the cell. In some embodiments, the modification reduces expression of functional APOC3 protein encoded by at least 5%, at least 10%, at least 15%, at least 20%, at least 25%, at least 30%, at least 35%, at least 40%, at least 45%, at least 50%, at least 55%, at least 60%, at least 65%, at least 70%, at least 75%, at least 80%, at least 85%, at least 90%, at least 95%, at least 97%, at least 98%, at least 99%, at least 99.5%, at least 99.9%, or 100%. In some embodiments, the modification reduces expression of functional ANGPTL3 protein encoded by the APOC3 or ANGPTL3 gene in the cell by at least 2 fold, at least 3 fold, at least 4 fold, at least 5 fold, at least 10 fold, at least 20 fold, at least 25 fold, at least 30 fold, at least 40 fold, at least 50 fold, at least 60 fold, at least 70 fold, at least 80 fold, at least 90 fold, at least 100 fold, at least 200 fold, at least 300 fold, at least 400 fold, at least 500 fold, at least 600 fold, at least 700 fold, at least 800 fold, at least 900 fold, at least 1000 fold, at least 2000 fold, at least 3000 fold, at least 4000 fold, at least 5000 fold, at least 6000 fold, at least 7000 fold, at least 8000 fold, at least 9000 fold, or at least 10000 fold. In some embodiments, the modification abolishes expression of functional APOC3 protein encoded by the APOC3 gene in the cell.

[0449] The protein sequence of human APOC3 can be found, for example, at Deposit No. NP_000031.1, which reference is incorporated herein in its entirety. Human nucleic acid sequences can be found at e.g., GenBank Accession Nos.: NG_008949.1, which sequence is incorporated herein in its entirety. Mouse, rat and monkey APOC3 nucleic acid sequences have been deposited; see, e.g., Ensembl accession number ENSMUSG00000032081, ENSRNOG00000047503, and ENSMFAG00000001837 respectively, each of which sequences is incorporated herein in its entirety.

[0450] The polypeptide and coding nucleic acid sequences of APOC3 and of other members of the family of human origin and those of a number of animals are publicly available, e.g., from the NCBI website or ENSEMBL website. Examples include, but are not limited to the following sequences, each of which sequences are incorporated herein in their entireties;

NG_008949.1:5000-8165 Homo sapiens apolipoprotein
C3 (APOC3), RefSeqGene on chromosome 11
(SEQ ID NO: 62)
CTGCTCAGTTCATCCCTAGAGGCAGCTGCTCCAGGTAATGCCCTCTGGGG
AGGGGAAAGAGGAGGGGAGGAGGATGAAGAGGGGCAAGAGGAGCTCCCTG
CCCAGCCCAGCCAGCAAGCCTGGAGAAGCACTTGCTAGAGCTAAGGAAGC
CTCGGAGCTGGACGGGTGCCCCCCACCCCTCATCATAACCTGAAGAACAT
GGAGGCCCGGGAGGGGTGTCACTTGCCCAAAGCTACACAGGGGGTGGGGC
TGGAAGTGGCTCCAAGTGCAGGTTCCCCCCTCATTCTTCAGGCTTAGGGC
TGGAGGAAGCCTTAGACAGCCCAGTCCTACCCCAGACAGGGAAACTGAGG
CCTGGAGAGGGCCAGAAATCACCCAAAGACACACAGCATGTTGGCTGGAC
TGGACGGAGATCAGTCCAGACCGCAGGTGCCTTGATGTTCAGTCTGGTGG
GTTTTCTGCTCCATCCCACCCACCTCCCTTTGGGCCTCGATCCCTCGCCC
CTCACCAGTCCCCCTTCTGAGAGCCCGTATTAGCAGGGAGCCGGCCCCTA
CTCCTTCTGGCAGACCCAGCTAAGGTTCTACCTTAGGGGCCACGCCACCT
CCCCAGGGAGGGGTCCAGAGGCATGGGGACCTGGGGTGCCCCTCACAGGA
CACTTCCTTGCAGGAACAGAGGTGCCATGCAGCCCCGGGTACTCCTTGTT
GTTGCCCTCCTGGCGCTCCTGGCCTCTGCCCGTAAGCACTTGGTGGGACT
GGGCTGGGGGCAGGGTGGAGGCAACTTGGGGATCCCAGTCCCAATGGGTG
GTCAAGCAGGAGCCCAGGGCTCGTCCAGAGGCCGATCCACCCCACTCAGC
CCTGCTCTTTCCTCAGGAGCTTCAGAGGCCGAGGATGCCTCCCTTCTCAG
CTTCATGCAGGGTTACATGAAGCACGCCACCAAGACCGCCAAGGATGCAC
TGAGCAGCGTGCAGGAGTCCCAGGTGGCCCAGCAGGCCAGGTACACCCGC
TGGCCTCCCTCCCCATCCCCCCTGCCAGCTGCCTCCATTCCCACCCGCCC
CTGCCCTGGTGAGATCCCAACAATGGAATGGAGGTGCTCCAGCCTCCCCT
GGGCCTGTGCCTCTTCAGCCTCCTCTTTCCTCACAGGGCCTTTGTCAGGC
TGCTGCGGGAGAGATGACAGAGTTGAGACTGCATTCCTCCCAGGTCCCTC
CTTTCTCCCCGGAGCAGTCCTAGGGCGTGCCGTTTTAGCCCTCATTTCCA
TTTTCCTTTCCTTTCCCTTTCTTTCTCTTTCTATTTCTTTCTTTCTTTCT
TTCTTTCTTTCTTTCTTTCTTTCTTTCTTTCTTTCTTTCTTTCTTTCTTT
CCTTTCTTTCTTTCCTTTCTTTCTTTCCTTTCTTTCTTTCTTTCCTTTCT
TTCTCTTTCTTTCTTTCTTTCCTTTTTCTTTCTTTCCCTCTCTTCCTTTC
TCTCTTTCTTTCTTCTTCTTTTTTTTTTAATGGAGTCTCCCTCTGTCACC
TAGGCTGGAGTGCAGTGGTGCCATCTCGGCTCACTGCAACCTCCGTCTCC
CGGGTTCAACCCATTCTCCTGCCTCAGCCTCCCAAGTAGCTGGGATTACA
GGCACGCGCCACCACACCCAGCTAATTTTTGTATTTTTAGCAGAGATGGG
GTTTCACCATGTTGGCCAGGTTGGTCTTGAATTCCTGACCTCAGGGGATC
CTCCTGCCTCGGCCTCCCAAAGTGCTGGGATTACAGGCATGAGCCACTGC
GCCTGGCCCCATTTTCCTTTTCTGAAGGTCTGGCTAGAGCAGTGGTCCTC
AGCCTTTTTGGCACCAGGGACCAGTTTTGTGGTGGACAATTTTTCCATGG
GCCAGCGGGGATGGTTTTGGGATGAAGCTGTTCCACCTCAGATCATCAGG
CATTAGATTCTCATAAGGAGCCCTCCACCTAGATCCCTGGCATGTGCAGT
TCACAATAGGGTTCACACTCCTATGAGAATGTAAGGCCACTTGATCTGAC
AGGAGGCGGAGCTCAGGCGGTATTGCTCACTCACCCACCACTCACTTCGT
GCTGTGCAGCCCGGCTCCTAACAGTCCATGGACCAGTACCTATCTATGAC
TTGGGGGTTGGGGACCCCTGGGCTAGGGGTTTGCCTTGGGAGGCCCCACC
TGACCCAATTCAAGCCCGTGAGTGCTTCTGCTTTGTTCTAAGACCTGGGG
CCAGTGTGAGCAGAAGTGTGTCCTTCCTCTCCCATCCTGCCCCTGCCCAT
CAGTACTCTCCTCTCCCCTACTCCCTTCTCCACCTCACCCTGACTGGCAT
TAGCTGGCATAGCAGAGGTGTTCATAAACATTCTTAGTCCCCAGAACCGG
CTTTGGGGTAGGTGTTATTTTCTCACTTTGCAGATGAGAAAATTGAGGCT
CAGAGCGATTAGGTGACCTGCCCCAGATCACACAACTAATCAATCCTCCA
ATGACTTTCCAAATGAGAGGCTGCCTCCCTCTGTCCTACCCTGCTCAGAG
CCACCAGGTTGTGCAACTCCAGGCGGTGCTGTTTGCACAGAAAACAATGA
CAGCCTTGACCTTTCACATCTCCCCACCCTGTCACTTTGTGCCTCAGGCC
CAGGGGCATAAACATCTGAGGTGACCTGGAGATGGCAGGGTTTGACTTGT
GCTGGGGTTCCTGCAAGGATATCTCTTCTCCCAGGGTGGCAGCTGTGGGG
GATTCCTGCCTGAGGTCTCAGGGCTGTCGTCCAGTGAAGTTGAGAGGGTG
GTGTGGTCCTGACTGGTGTCGTCCAGTGGGGACATGGGTGTGGGTCCCAT
GGTTGCCTACAGAGGAGTTCTCATGCCCTGCTCTGTTGCTTCCCCTGACT
GATTTAGGGGCTGGGTGACCGATGGCTTCAGTTCCCTGAAAGACTACTGG
AGCACCGTTAAGGACAAGTTCTCTGAGTTCTGGGATTTGGACCCTGAGGT
CAGACCAACTTCAGCCGTGGCTGCCTGAGACCTCAATACCCCAAGTCCAC
CTGCCTATCCATCCTGCGAGCTCCTTGGGTCCTGCAATCTCCAGGGCTGC
CCCTGTAGGTTGCTTAAAAGGGACAGTATTCTCAGTGCTCTCCTACCCCA
CCTCATGCCTGGCCCCCCTCCAGGCATGCTGGCCTCCCAATAAAGCTGGA
CAAGAAGCTGCTATGA
NP_000031.1 Human apolipoprotein C-III precursor
(SEQ ID NO: 63)
MQPRVLLVVALLALLASARASEAEDASLLSFMQGYMKHATKTAKDALSSV
QESQVAQQARGWVTDGFSSLKDYWSTVKDKFSEFWDLDPEVRPTSAVAA

### Angiopoietin-Like 3 (ANGPTL3)

[0451] In some embodiments, the target gene for modification using the compositions and methods disclosed herein is gene encoding ANGPTL3. ANGPTL3 has been associated with diseases and disorders such as, but not limited to, Arteriosclerosis, Atherosclerosis, Cardiovascular Diseases, Coronary heart disease, Diabetes, Diabetes Mellitus, Non-Insulin-Dependent Diabetes Mellitus, Fatty Liver, Hyperinsulinism, Hyperlipidemia, Hypertriglyceridemia, Hypobetalipoproteinemias, Inflammation, Insulin Resistance, Metabolic Diseases, Obesity, Malignant neoplasm of mouth, Lipid Metabolism Disorders, Lip and Oral Cavity Carcinoma, Dyslipidemias, Metabolic Syndrome X, Hypotriglyceridemia, Opitz trigonocephaly syndrome, Ischemic stroke, Hypertriglyceridemia result, Hypobetalipoproteinemia Familial 2, Familial hypobetalipoproteinemia, and Ischemic Cerebrovascular Accident. Editing the ANGPTL3 gene using any of the methods described herein may be used to treat, prevent and/or mitigate the symptoms of the diseases and disorders described herein.

[0452] The ANGPTL3 gene encodes the Angiopoietin-Like 3 protein, which is a determinant factor of high density lipoprotein (HDL) level in human. It positively correlates with plasma triglyceride and HDL cholesterol. The activity of ANGPTL3 is expressed predominantly in the liver. ANGPTL3 is associated with Dyslipidemias. Dyslipidemias is a genetic disease characterized by elevated level of lipids in the blood that contributes to the development of clogged arteries (atherosclerosis). These lipids include plasma cholesterol, triglycerides, or high-density lipoprotein. Dyslipidemia increases the risk of heart attacks, stroke, or other circulatory concerns. Current management includes lifestyle changes such as exercise and dietary modifications as well as use of lipid-lowering drugs such as statins. Non-statin lipid-lowering drugs include bile acid sequestrants, cholesterol absorption inhibitors, drugs for homozygous familial hypercholesteremia, fibrates, nicotinic acid, omega-3 fatty acids and/or combination products. Treatment options usually depend on the specific lipid abnormality, although different lipid abnormalities often coexist. Treatment of children is more challenging as dietary changes may be difficult to implement and lipid-lowering therapies have not been proven effective.

[0453] ANGPTL3 is also known to cause hypobetalipoproteinemia.

[0454] Hypobetalipoproteinemia is an inherited disease (autosomal recessive) that affects between 1 in 1000 and 1 in 3000 people worldwide. Common symptoms of hypobetalipoproteinemia include plasma levels of LDL cholesterol or apolipoprotein B below the 5th percentile which impairs the body's ability to absorb and transport fats and can lead to retinal degeneration, neuropathy, coagulopathy, or abnormal buildup of fats in the liver called hepatic steatosis. In severely affected patients, hepatic steatosis may progress to chronic liver disease (cirrhosis). Current treatment of hypobetalipoproteinemia includes severe restriction of long-chain fatty acids to 15 grams per day to improve fat absorption. In infants with hypobetalipoproteinemia, brief supplementation with medium-chain triglycerides may be effective but amount must be closely monitored to avoid liver toxicity. Another option for treating hypobetalipoproteinemia is administration high doses of vitamin E to prevent neurologic complications. Alternatively, vitamin A (10,000-25,000 IU/d) supplementation may be effective if an elevated prothrombin time suggests vitamin K depletion.

[0455] In one example, the target tissue for the compositions and methods described herein is liver tissue. In one example, the gene is ANGPTL3 which may also be referred to as Angiopoietin 5, ANGPT5, ANG-5, Angiopoietin-Like Protein 3, Angiopoietin-5, FHBL2, and ANL3. ANGPTL3 has a cytogenetic location of lp31.3 and the genomic coordinate are on Chromosome 1 on the forward strand at position 62,597,487-62,606,159.

[0456] Loss-of-function mutations that may be made in ANGPTL3 gene using the methods and compositions described herein are also provided. The strategies to generate loss-of-function mutation are similar to that used for PCSK9 (e.g., include, but are not limited to premature stop codons, destabilizing mutations, altering splicing, etc.).

[0457] In some embodiments, the modification reduces expression of functional ANGPTL3 protein encoded by the ANGPTL3 gene in the cell. In some embodiments, the modification reduces expression of functional ANGPTL3 protein encoded by at least 5%, at least 10%, at least 15%, at least 20%, at least 25%, at least 30%, at least 35%, at least 40%, at least 45%, at least 50%, at least 55%, at least 60%, at least 65%, at least 70%, at least 75%, at least 80%, at least 85%, at least 90%, at least 95%, at least 97%, at least 98%, at least 99%, at least 99.5%, at least 99.9%, or 100%. In some embodiments, the modification reduces expression of functional ANGPTL3 protein encoded by the ANGPTL3 gene in the cell by at least 2 fold, at least 3 fold, at least 4 fold, at least 5 fold, at least 10 fold, at least 20 fold, at least 25 fold, at least 30 fold, at least 40 fold, at least 50 fold, at least 60 fold, at least 70 fold, at least 80 fold, at least 90 fold, at least 100 fold, at least 200 fold, at least 300 fold, at least 400 fold, at least 500 fold, at least 600 fold, at least 700 fold, at least 800 fold, at least 900 fold, at least 1000 fold, at least 2000 fold, at least 3000 fold, at least 4000 fold, at least 5000 fold, at least 6000 fold, at least 7000 fold, at least 8000 fold, at least 9000 fold, or at least 10000 fold. In some embodiments, the modification abolishes expression of functional ANGPTL3 protein encoded by the ANGPTL3 gene in the cell.

[0458] In some embodiments, a splice site disruption generated by a base editor system disclosed herein can result in the inclusion of intronic sequences in messenger RNA (mRNA) encoded by the ANGPTL3 gene. In some embodiments, the splice site disruption generates a nonsense, frameshift, or an in-frame indel mutation that result in premature stop codons or in insertion/deletion of amino acids that disrupt protein activity. In some embodiments, the splice site disruption generates exclusion of exonic sequences. In some embodiments, the splice site disruption generates exclusion of exonic sequences that results in nonsense, frameshift, or in-frame indel mutations in the ANGPTL3 transcript. Canonical splice donors comprise the DNA sequence GT on the sense strand, whereas canonical splice acceptors comprise the DNA sequence AG. Alteration of the sequence disrupts normal splicing. Splice donors can be disrupted by adenine base editing of the complementary base in the second position in the antisense strand (GT to GC), and splice acceptors can be disrupted by adenine base editing of the first position in the sense strand (AG to GG).

[0459] In some embodiments, a base editor system provided herein effects an A·T to G.C alteration in a ANGPTL3 gene when contacted with the ANGPTL3 gene. In some embodiments, the A·T to G·C alteration is at a splice donor site of the ANGPTL3 gene. In some embodiments, the A·T to G·C alteration is at a splice acceptor site of the ANTPTL3 gene. In some embodiments, the A·T to G·C alteration results in an aberrant ANGPTL3 transcript encoded by the ANGPTL3 gene. In some embodiments, the A·T to G·C alteration results in a non-functional ANGPTL3 polypeptide encoded by the ANGPTL3 gene. In some embodiments, the A·T to G·C alteration is at a 5′ end of a splice donor site of an intron 6 of the ANGPLT3 gene.

[0460] The nucleotide sequence of human ANGPTL3 is provided, for example, in NG_028169.1, which is incorporated herein in its entirety. The protein sequence of human ANGPTL3 is provided, for example, AAD34156.1, which is incorporated herein in its entirety.

[0461] Mouse, rat, and monkey ANGPTL3 nucleic acid sequences have been deposited; see, e.g., Ensembl accession number ENSMUSG00000028553, ENSRNOG00000008638, and ENSMFAG00000007083 respectively., each of which sequences are incorporated herein its entirety.

[0462] The polypeptide and coding nucleic acid sequences of ANGPTL3 and of other members of the family of human origin and those of a number of animals are publicly available, e.g., from the NCBI website or ENSEMBL website. Examples include, but are not limited to the following sequences, each of which sequences are incorporated herein in their entireties;

NG_028169.1 Human angiopoietin like 3 (ANGPTL3),
RefSeqGene on chromosome 1
(SEQ ID NO: 7)
AATGACAAACTGAAAAAATCTATTGTTTGTTATATATATAACAAAGAATT
AGTATCCACAATATGTAAATAATTCCTAAAATTAGTCAGAAAGAGACAAA
CTTAAAAAGAGGGTAACAAGGAGGGGAGCAAATTATGTACATAACCAGAT
GATTCGCAAAGACGGCAACAGAGATGGCCAGCAAAACAAACTAGATATAT
ACTTGTCTATTAGATTTATCAACATTTTTTGCCTTTTTCATTAAAAGCAT
TTGTAAAAGGATATAGGAAAAGAGGAACTCTCATATACTCCTGGCAGGGA
TGTAAATTGGTACAACCCTTTTGAAGGACAATCTGACAAAAGCAATCGTA
AGTTACAAGTCAACATCTATGAATGTATATGAAAATATTTATATACATAC
ATCACCACCATAAAAGCATTTTCTATACATACTGTTTATAATTAGAAAAT
TGGAAACAAATGATTAAAAGGGGGCTGATTAAATTAAGGTTCATCTATAT
AACAGGATTATGCAGCTATTAAAAAGGACGTGGTAACTCTATAGACATTC
ATAGGAAAATAAATTTTAAAATACTAAGATCCTGAATGATATATATATCA
TGAGCTATTATACATAACAAGATCCCACTTGTGTTATAAAAAATTATGTT
TAGTCATTCAAAGGGTCTGGTATGATAGACCCAAAATGTTAATAGAGTCG
AGATTTTTATTTTTTATAGGTTTTTGAAATACCTGAATTTTCACAATAAG
TACTTTGCACATTAAAAATCTTAGCTGGGCATGGTGGCTCACGCTTGTAA
TCCCAGCACTCTGGGAGGCCAAGGTAGGCAGATCACCTGAGGTCAGGAGT
TCGAGACCAGTCTGGCCAACATGGTGAAACCCCGTCTCTACTAAAAATAC
AAAAATTAGCCAGGCTTGGTTGGGGGTGCCTGTAATTCCAGATACTCGGG
AAGCTGAGACAGGAGAATCGCTTGAACCCAGGAGGGGGAAGTTGCAGTGA
GCTGAGATCACGACGCTGCACTCCAGCCTGGGCAACAAAGAGCAAAACTC
CGTCTCAAAAATAAATAAAGAAAAAATCTTTACATGTCCAAAGATACGGC
TGTTCAACTAAAAAATATATATGTATAAAACTTAACATGTTAATAGTGAA
CACACAAAACAGTAAGATAGATAAAATTATTCCTTCAAAGCTCACTTAAC
CTCTGGATCTACACTGTCCAAAAAGACGGTCTAATGAGACAATTGAGCAC
TTGATAGGTGAGTGGTTCTAACTGAGATATGTTCTCAGTATAAAACATAC
AATAGGATCTTCCTATACAACATTAATTAAAAAACAAACTATTGTAGTTA
AAAAGGAAAAAATTAGAGATACTATGTAAAAAAGAGCCAAAATACCTTGT
ATTTTATTTGAAAGACATATCTCCATAAGATTACACAACCTCGTGTAGGA
TAAAGGACTTTGCTTTGCTTGGAATTTAAACAATTTAGGCTCTTAAATGT
CCTAAAATTCTCTGTAGCTAAGAAATTTTTATATTGGTTCCTAGGAACTA
GGAATCCTTAAATTAGGCCCTACATTTGCTTACAAGTTTATTTTCCTTGG
CATAAAATTTTTTAGTTTTTACATTACTGGTTATATTTGATCAGGGTTCT
ATTTAAATAGGCACAAGTTCAAGCAAAGATCAGATTCTGCTTTTAGCAGT
GTGTACTCAGACAGGAAGTATTAAAAGGCAGGCAGAAAATCCTTTATAAA
ATTACTACTTTCAATGCATTTTCCCACGTTGAAATGCTTCTGCAGTTTAT
AATTAGGCAAATTACTTTAATTATAATCAATAATGCTGTTCAAATTACTA
TAAGAATTATACAGATATTTATACCAAGAGACAATATACTAGAAACCAAG
ACTACGTGACCATTACCTCTACTCTGTCAGTGTTATTTGTGAGAAATTGC
ACAAATTTTGCAAAAAGTGTTAGTATCCTACTACAGTAGGATATAATATA
GAAGGAAATAATTTCATAAAGCCTGTCTTTGGTACTAGTGCTCAGTTACT
TTCATTAACTAAAAAAGGGGCTACTCTTCAAATTCCCTTCTCTAAAAAGA
ATGTACTATATCAAAAGGGGGTAAACACTACTACGTATACATTCTGCACT
TAGAAATCCCTATATGTTGATTTTATCATTCTCTTATTCAATAAATATTG
TTTCTACAATGTGTAAGGCATTACTGTACTAAAGCATTATAAGGAATATA
AGTTAAAAACACATACAAATCTTGCCAATCAACAGCTTATAGTGTAATAG
GGGAGAGAAGCTGGCCCATCTATATTCTCCCTCAACTAGCAAGTGGATGA
AATATCAGGGTCAATAGTTATAAGCCACAAAAGCTGACAGCTTAATTAAG
AGAAGTTTTGAAATATGTATTTCATGACCAATAATTACAACTGTAACTTT
TCTATTTAAAGAAGGAGAAAATTTGAATTTCTTCTCTAGCTCAACATACA
CTTCTATAATTCCATTACATGAACCAGAGTAAAGGGTAAGATGGAAATGA
AGAATATTTTCTTACCCTTTTGTGGTTCTATATTGGACACTTAAAAATCA
TACACAACCTAATCAAAAGATGTAATTCTTTAAAAAGGTACGAGACCAAA
ATTCAGAAAATCTAGACTATAACAAAATTTCTCAATTTACATTATCTTAA
TATGCAATTAATTTTCACCAGTAAAATACTATAGTATGGGTACAAATGCA
TTGATTAGTTCTAATTACAAAAATGGCTAATATATAATACTGTGTAGTGT
TTATGATACATCAGATAATGTTCTAAGTGCTCTGAAAATATAAACTTTTA
ATCTTTTATACGACCCTATAAAATAGGTGTTATTCTCACTGGAGAGATGA
GAAAACAGGGGTTCAGAGATGTGAAGTAATTTGACCAAAGGTCACAAAGC
TGAAGAATATGAAATCCGGGATTCTGATTCAGGCAGTCTTATTCCAGAAT
CATGCTCTTAACCACTATGGAATACTGCCTCTACTGTAACTATTATACCC
AAAACCCTTAATCCTAAGTCATCAAAAGGAAGAGCCTCTATTTTACACAA
TGAAGAGGCATTTCTAAGAATAGAAATTTAGGGACGAGCACAGTGGCTTA
CTCCTTTAATATCAGCACTTTGAGAGGCTGATATGGGAGGTTCACTTGAA
GTCAGGAGTTCAAGGTCAGCTTGGGCAACATAGTGAAACACAGTCTCTAC
AAAATATTTAAAAATTAGCTGGGTGTGGTGGCATGCATCTATAGTCTCAG
CTACTTGGGAGACAGAGGGAGGAGGCTTGCTCGAGCCCAGGAGTTCGTGG
CTATAGTGAGCTATGATCATGCCACTGCACTCCAGCCTGGACAACAGAGC
AAGACCCTGTCTCTAAAAAAGAAAAGAAATTTGGAAATGGTTTATTTTGT
ATTAACAATTTATAATTTACACTGAAATTTATTATGATAAAACTTTTCCC
TGTGTTAAAAAGCTATTAACTTTATGAAAAATTTCTTTTAGGTAAGGTTG
ATTATATATACCCACACACATACACAGGTTAAAAGTTAGTTTCATGTGAC
ATAATAACTAGCATTTTGAGCACTACCTGTTTGCCCAGCACTGTTCTAAG
TGCTCTACATGTATTATTGTTAAATTATCATAACACTATGAATTATGTAC
TATAATTACCCCAGCTTTACAGATGAGGAGACTAATCCATGGGGAGGTTA
AGTAACTTGTCCAAGGCCAGACAGCTAGAGCCGGCTTTTGGACCCACACC
ACAGTCTGACTCCAGCACCCATATTCTTAACAATTTCACCATATTAATAT
GTCAAGATTAAGCAGTTTTAAAGGATGCTATTTTCTCACAAATTTCTTAA
TATGAACACTCAATAAGAATAATCACTAATATAAGCATTTAGTATTTTTT
TAACACTAAGTTGGAAGCATAGTGGAACATTTATTTTTAGAAATATTATT
AATTGGCTGGGCTCACGCTTGTAATCGGCTGGGCTCATGCCTGTAAATTT
TGGGAGGCCAAGGTAAAAGAATTGCTTGAGCCCAGTATTTCCAGACCAGC
ATGGGCAATACATTAAGACATCATCTTTAAAAAAAAAATGTTATTAATCT
CCTCTTTTTGTTAAATGTATATTATCAAAATTGTTACTAAGCTAACAAAC
TTCAGAAAAACTTATGATGGGCAAGCTGCTTGTGACATTGAAGGTATTTA
AGATTCAATTCTAGTTTGGTCCTAGATGACCACATATCCATTGTTCCTTC
AACGAGCACATGGTAAAGAGCCTAGAACACAGAGACACAGAACACAGTGG
AGAAAAGGGAGTGAAATGTCTTTAATGACACTTACTATATATGGGATTTT
GTGACAATATACAAGGATGGTTAAGACATATAAGGTGATGCAAAAAAACA
TATTAACAATTATAGTGACAAAAAATGAGGAGCATATAATTATACATTGA
TTTATACAGAGTACCAGAGGAACACAGCATTGAGAGCCGTAACACCACCT
GAGGGAGTGGAGAAAGGCTTCAGAGAGAAAGTGTTTTTTGGAATGGATCA
CTGTTTCCAAAAGAACTAAAGTACAGTTTGAGAAATGCATACTTAATTCA
TTACTTTTTTCCCCTCAACTTTAATAATAAATTTACCCAACAAAAAAGTT
TATTTTTGACTTGTAAATCTCTTAAAATCATAAAAAAGTAAAATTAGCTT
TTAAAAACAGGTAGTCACCATAGCATTGAATGTGTAGTTTATAATACAGC
AAAGTTAAATACAATTTCAAATTACCTATTAAGTTAGTTGCTCATTTCTT
TGATTTCATTTAGCATTGATCTAACTCAATGTGGAAGAAGGTTACATTCG
TGCAAGTTAACACGGCTTAATGATTAACTATGTTCACCTACCAACCTTAC
CTTTTCTGGGCAAATATTGGTATATATAGAGTTAAGAAGTCTAGGTCTGC
TTCCAGAAGAAAACAGTTCCACGTTGCTTGAAATTGAAAATCAAGATAAA
AATGTTCACAATTAAGCTCCTTCTTTTTATTGTTCCTCTAGTTATTTCCT
CCAGAATTGATCAAGACAATTCATCATTTGATTCTCTATCTCCAGAGCCA
AAATCAAGATTTGCTATGTTAGACGATGTAAAAATTTTAGCCAATGGCCT
CCTTCAGTTGGGACATGGTCTTAAAGACTTTGTCCATAAGACGAAGGGCC
AAATTAATGACATATTTCAAAAACTCAACATATTTGATCAGTCTTTTTAT
GATCTATCGCTGCAAACCAGTGAAATCAAAGAAGAAGAAAAGGAACTGAG
AAGAACTACATATAAACTACAAGTCAAAAATGAAGAGGTAAAGAATATGT
CACTTGAACTCAACTCAAAACTTGAAAGCCTCCTAGAAGAAAAAATTCTA
CTTCAACAAAAAGTGAAATATTTAGAAGAGCAACTAACTAACTTAATTCA
AAATCAACCTGAAACTCCAGAACACCCAGAAGTAACTTCACTTAAAGTAA
GTAGAAAATAAAGAGGGTTCATGTTTATGTTTTCAATGTGGATCTTTTAA
AAAAAATATTTCTAAGGCATGCCATTTGAAATACTTTGTTGCATTGTTGA
AATACTTTTTTTTCCAAGAAAAATAATCTCCAGAAAATAAAATTTCCTAT
TATAATTTCAAGTTAGTTTTTTGTTTCCCTAATGTTATATATGAAAACAC
TGAAAATTTGCATTTTATATGAAAATTACAAATCGGTTAAATTATACAAT
CTAGAACACTATGTCATTACACTATTGTAAATTACTGAAGGTAAGTAAAA
AGTTAAAAAAAATTTAAAACTATTCTCCAGTGTTTAAAACAGATTAAATA
ATACAGTAAATGGAAAAGATTTATTCATATGAAAATATGCTGGGCTTTTT
CTTTTAATTGAAGTTCAGAAAATCAAATTTTAGAGATAGTACAATTTAAA
TAAAATGTTAAGGACAAAAATATGTGCTATTTGAAAGAAGCATACAAGGG
GAAGGAATTGCCAATATTCATTTTTCAAATCCATTATTAGTTTAAAAATT
TAGATTATGATAGTGTTACAGGAAATTAATAGAAAAGAAAGAGGAAAGCA
ACTTATAACCAACCTACTCTCTATATCCAGACTTTTGTAGAAAAACAAGA
TAATAGCATCAAAGACCTTCTCCAGACCGTGGAAGACCAATATAAACAAT
TAAACCAACAGCATAGTCAAATAAAAGAAATAGAAAATCAGGTAAGTCAG
TATTTTAATGGTATGTCCCATCTTTCACACAGGTCTGTAAAAACACTGAA
TCCTAAAATTATTTACAAGCTTTAACTGGATCATGAGTAAAATTATCACA
TCAGCATAACTGTTAAAATTGCAGGCTCTGAAGCTAATAAACTACCTGCA
TTTAAACCATGGCTCTAAAACTTTGTGTGACCTTGAATAAATTACTTCAC
CCCTTTATCTCTCAGTTTCCTCACATATACTACAAAGATAATAACAGAAC
TTATAGGATTATTGTAAGAAAAAAAATTAATTCATAGCAGCCAATGTCAT
CTTACTAAAATTCAAATTAGATCATGTTTCTCTTTGCTCAAAACCACACA
ATAGCTTTCCATTTCACTCATATTGGCTCTTTAGACCAAGATTACCCAAC
CCTTCGTCATCTCACTGACTTCACCTCCTCTACTCTAGTTATTCTGACCG
CTTTACCAGTATTCAAACACATCAAACATACTGCCACCTCAAAGCCTTTG
CCCTTGTTGTTTCCTCTAACTGGAACGCTCTTCTGCCCTGGTATCTACGT
GGCCCACTCTCTGATTTCCCTTAGGGTCGTTATCAAACAAAAAATTCCCA
ATGAAGACTTACAAGGTCACTTAACCAAAAATCACAACCGCCTGGTCCCA
TCCCTGAAAACTTCTACTTCCTTAGCTACTTTTCTCCTGCACACTCACCT
TTATTTAACATAACATAAATTTTAGTTATTTATCTCTTCTATTCCTGCAC
TAAAATGTAAGCTCTGTGAATACAGGGATTTTTTCCATTATCTTCATATT
TTCCATTATTTGTATATACTCCAGAATATAGAATACTGTATGGCACACAG
TAGGCATTTCTGTTGAATTAATAAATGTAATGTCATATTCACACAGAAGC
GTGTGCTATGATTATTATTACTTGGATTACTAGAAATAGTGTGCCTCATA
ATTAAAGGTCAACATTCAACAATGTAATTAATCTACAATGTAAACATCTG
GTGAAGTGACAGAGGGAAGCACTTGTTTAGAAAAAAGCTATGTCAGAATC
CATGTATTCTAATATGCAGTACAATAGTTTAAAAATATTAATAATACTCT
CAAACAGCTATTCAAGAGGATTCAAAAAACATAATATAAACTCAGAGAAA
CTGGTAAACAAAATCATTTTCAAGAGATATAAAACAAATATTATTACCAA
TTTCCACTAAACAAACATAATGTTAGTAGTGCTGCTAAAAGGTTTTTTAT
CAACTACTTTTGGTTTCCATACTTTCCTTCTTATGATGTTATTATTCTAA
ATTCTTTTCAATTATATCTTTTACTATGATTAAATGAACCTGCTCCCCAA
AGCAAAATGTTACTATAGTAATATACATTGTGTCTAAAAATAAAAATGTG
TGAAGAAACCAAAACAATGAATTTCTGAGTTGGAAGAAGAGTTAGATCAT
TTAACTTTCTCATATTTAAATTAAAAAAACAAAACTCTAAAAATTTAAGT
AACTTTAAGATCACATAGTTACTTAGTAGAAAAGAGTAATACCCAGCAAG
CAAACTTTACAATAGATCCTTTTAAATAAGGTCCTAGGAAATATCATTCA
TGCCAGCATCAAAAAACTAACACTAATAATGCAAGATATTATATATTCTG
CTTTTCTTACTGTCAATGAGAAAAACTATCATTCAATAAATTGCAAACCC
AACACACTTAAATAAAAATAAAATGTTACTGCTAAACTAACGATAAACTA
CTGAATATATAGAAAGTAAGCAAACAAACTTGCCAACCTGCCAACATCTA
CAGATATGTTTACAGGTCAAAAATTATCAAATTATCAAGAAAGCCTGGTT
CAAATTATGTATTATGTCTTTATCACAGGTCTGAAGATCAGTAAGACCTA
AAACTGAAAATTATTAAACTTAAAATCTGAACAGAATATCAAATATATTT
TATTCATATAAATAAAAGAATACATTACAATATTCTAAGCAAAGCAGTCT
CTACTTTTGGCCTTGCTCTGTTTTCCGACCAATGTCTGCTTTTTTGCCTT
GCTTTATTTTTTTATCTTATTAAATAATGTCCCTGATTAAATATTTTGAG
AACAGGTAATCTGTACAATCTGAATAACACTGTTTATCTAAATATCAAAC
ACCGTTATAACATTATGAACTGAAAGACAAACTGTACTTCTGACATCCTT
ACTCAGATTTCCCCTAATTGTATATTCAGTATCATTTTAAAAAACAGATT
TATATTCTTTTATCAGCTCAGAAGGACTAGTATTCAAGAACCCACAGAAA
TTTCTCTATCTTCCAAGCCAAGAGCACCAAGAACTACTCCCTTTCTTCAG
TTGAATGAAATAAGAAATGTAAAACATGATGGTAAGACACTTTGGTGGGT
TTCCTTCTTGAAGCTATTATTATCAAATTCCCTATTCTTAGGACTTGTTC
TAGACTAAAAGATAGTTAAGAGATATCCATCAAATACAATGTATCAACCT
AAACTGGATGCTGGGGTTCTTTTTACACCCTATAAAAGACATACCTAAGA
CAATCAGAGAAATACAAATATGGACTTGATTATTAGATAATATAGAAGGT
TTATTAATTTTCTTAGATGTGATCATGGTATTGCAGTTTTAAAGGAGAAC
AATCTCCTGTTTAAGAGATACATGCTGAAATATTTACGGAGTTAAAGGTC
ACTGGACTCCAGACTGGTGATAGAACAAGACTCTGTCTCTAAAAAATAAT
TAATTTTTTAAAAGAAAATAGTTTGGTAAGATGATTCTTACATTCTTAAA
TAACACGCCATCTAAGAAAAATGCTTTAACATAAACATTACTGAAAAAAT
GCTACATTTGCCACAACTTCATAAAATGTCAAGTGAAATCTCAAGCTCCA
AAGATATTATTCCTATTACTAAATCTGATGTAATAACATTTTATTGATTC
TAGGCATTCCTGCTGAATGTACCACCATTTATAACAGAGGTGAACATACA
AGTGGCATGTATGCCATCAGACCCAGCAACTCTCAAGTTTTTCATGTCTA
CTGTGATGTTATATCAGGTAAAACCTGTCTAAGGAGAATAGACAGTAGTT
AGTTCAACTTACTCATTACGTATTAGGAAGATTAACCTGGTTATCATTGT
TTTATACATATATATATGAAATATATATGAGTATTCGTATAAATATAATA
CTTTTACCTTGTTTATGTATTTACTCAATATTCTCCTTTTCCTCTAAAAT
AATCTGAAGTGACTATTATCAATAAGTTTACTATGCCAAAATTCATTAAT
TGCCTTTCACTTAACTTTTGGGACCATAATAAATAATAAAATGTATTGCC
ATAACATTAATAAACTACCTTACAAAACCACCAATTAAAATCAAACAAAC
AAAAAAGTGTTATTTACATCTGTCAACATAAATCTACTAAAAATACATGA
TTTCATTCATTATATTCAGGTAGTCCATGGACATTAATTCAACATCGAAT
AGATGGATCACAAAACTTCAATGAAACGTGGGAGAACTACAAATATGGTT
TTGGGAGGCTTGATGGTAAGGGGACTACATTCAATCATTCATTCACTTGC
TAATCTACAAATATTTACTGAGAACCTCTTATGGACCAGGTATTAGGAAA
AGTAGTAACGAACGAGAAGCAGTCTCAGCCTTCATATAATTTATTATCAA
ACAATTACACATTTGTTAGTAAATTACACTTATTACAACTGTTATTATTT
GAATTATATTTATCACAATTACATGTCTGTTCTTAAATATACTTATCACA
ATTTAATTCCACGGCTTACAATGATCATAACTATAATTATTAAAGACAAT
TTTGATTAAATGTTATGTCATAAGTAGTAACTGTTACAAATAAGCTGTGA
AAAGAACCACTCCTAGCATTAGTCACTCTATTCTCTCATTAACGTTTTAC
ATATCAATTAATTGGAAGTTAAAAGGACCAGGAAACTCAGACATACAGTA
TACATTTTAAAATTTCAATTATTTAAATATAATATATAGAATGTATGGCT
TATAATGAATTAGTTAACTCAATGCAAATTATTCTATTTTGATTACAAAT
AGTAAAATAAGCAAGATAAAATAACAGATGTTTAAAATCCAAAAAGCACA
TACAAAAATCCATGAATGATGTCTAAGTACTCACTTATAAAGTAGAAGAC
ATTCATTATTATATCAAATTTTTAAATGCTCAGTACTATTTGACCATTTA
AAAATTTTGTATTCAAACTACCAGTGAAAGCCCTACCTAGAAGGTATACT
CAGTGATAAGTTTTGTAGCTCCAAATCTTCTAATAGTGAGTGTAACCCCA
AAATAAAAGGCTGACAGGTAAGTCGAGAATACTCACTTAATTCTGGTAAG
AAAGCAACCCATTTGTACTTGTATTTACCAGCAATCCTTAAAATGAAGCT
TCCTACTAACTCAATAGCAATAAGACAATAGTGAATGTTTAATGAAAACA
GTATTTTATAAATACTTTAATAAAAAGGATTGTGATGAAGAACAATCTAT
TTATATTTGTTATTTGTTTTTAATTCCAATAAAAATAATTTTTAAAATTA
CAGAAAAAAGTTATTAAGAACCATGCTTTTAAATTTAAAATGATTTTTTA
AATTTATTCCTGTCTTTTTCTACAAAGAAAGCATACATTAAGCAAATACC
AAAGGCCAGGTTTACATTTGAAGAAAGTGACATTATTATTACTCAAGTCT
CTAGGAATACTTAACACATCTCTTGACTGTATATGGATGTTAATAAATAG
CTGACAGTAAAGTTTATCCATATAAAGACTTGCAAATATTCCTCTACCAA
TGACGAGACTTTAAAATATCTATAATAATGTAACACATTTCACTGGTGAA
ACATGTCTTGTCATATGCATTATAGAAAGGATAATCAGACTTTCAGTTAT
ATTAATATTTTTAACATTTTTGTGCACATAGCTATCTTCAATAAAATTGT
TTTAAAAGGTATTATTTTAAGATACACTAAAATGATCAAGGGATTCAAGA
CTAAACAACTCAATTAGTTGCACCAATAAAAAACACTTAAAAAAACTGTC
AGTGTCCAACCTGTACTTAATAACTCACAGATTTTTAAAACTTTTCTTTT
CAGGAGAATTTTGGTTGGGCCTAGAGAAGATATACTCCATAGTGAAGCAA
TCTAATTATGTTTTACGAATTGAGTTGGAAGACTGGAAAGACAACAAACA
TTATATTGAATATTCTTTTTACTTGGGAAATCACGAAACCAACTATACGC
TACATCTAGTTGCGATTACTGGCAATGTCCCCAATGCAATCCCGGAAAAC
AAAGATTTGGTGTTTTCTACTTGGGATCACAAAGCAAAAGGACACTTCAA
CTGTCCAGAGGGTTATTCAGGTATCTTTTTCTGATACCAATACTTTATTT
TCATATCTTCAAAGTATCTTCCCACATTATTAGCTATTATCTGCAATGAC
AACTTTTAAAAATCCGAATCCCAAATAAGCGTTTTCTCTCTAGACGAAAA
CCTCTTAACTATAATGAAAGTGTTCATTCTAGTTCAATCAGGTATTTTAC
CTCTAATCTTCCTCAGATTTTCTATTTTTTGGTAGTGTATAGATTATTTA
TACAGATTATTTAAAATTGGGACTTATACAGATTATTTAAAACTGGGATA
CATGCATCTAAAACACTGTAATATTTATAAGAAAGGAAGATAAACTTACG
GGGAAATACAGTAACAGTAACTACATACGAGTCTGTACCCATTAAATTGC
ATATCTATCTCCTTTAGGAGGCTGGTGGTGGCATGATGAGTGTGGAGAAA
ACAACCTAAATGGTAAATATAACAAACCAAGAGCAAAATCTAAGCCAGAG
AGGAGAAGAGGATTATCTTGGAAGTCTCAAAATGGAAGGTTATACTCTAT
AAAATCAACCAAAATGTTGATCCATCCAACAGATTCAGAAAGCTTTGAAT
GAACTGAGGCAAATTTAAAAGGCAATAATTTAAACATTAACCTCATTCCA
AGTTAATGTGGTCTAATAATCTGGTATTAAATCCTTAAGAGAAAGCTTGA
GAAATAGATTTTTTTTATCTTAAAGTCACTGTCTATTTAAGATTAAACAT
ACAATCACATAACCTTAAAGAATACCGTTTACATTTCTCAATCAAAATTC
TTATAATACTATTTGTTTTAAATTTTGTGATGTGGGAATCAATTTTAGAT
GGTCACAATCTAGATTATAATCAATAGGTGAACTTATTAAATAACTTTTC
TAAATAAAAAATTTAGAGACTTTTATTTTAAAAGGCATCATATGAGCTAA
TATCACAACTTTCCCAGTTTAAAAAACTAGTACTCTTGTTAAAACTCTAA
ACTTGACTAAATACAGAGGACTGGTAATTGTACAGTTCTTAAATGTTGTA
GTATTAATTTCAAAACTAAAAATCGTCAGCACAGAGTATGTGTAAAAATC
TGTAATACAAATTTTTAAACTGATGCTTCATTTTGCTACAAAATAATTTG
GAGTAAATGTTTGATATGATTTATTTATGAAACCTAATGAAGCAGAATTA
AATACTGTATTAAAATAAGTTCGCTGTCTTTAAACAAATGGAGATGACTA
CTAAGTCACATTGACTTTAACATGAGGTATCACTATACCTTATTTGTTAA
AATATATACTGTATACATTTTATATATTTTAACACTTAATACTATGAAAA
CAAATAATTGTAAAGGAATCTTGTCAGATTACAGTAAGAATGAACATATT
TGTGGCATCGAGTTAAAGTTTATATTTCCCCTAAATATGCTGTGATTCTA
ATACATTCGTGTAGGTTTTCAAGTAGAAATAAACCTCGTAACAAGTTACT
GAACGTTTAAACAGCCTGACAAGCATGTATATATGTTTAAAATTCAATAA
ACAAAGACCCAGTCCCTAAATTATAGAAATTTAAATTATTCTTGCATGTT
TATCGACATCACAACAGATCCCTAAATCCCTAAATCCCTAAAGATTAGAT
ACAAATTTTTTACCACAGTATCACTTGTCAGAATTTATTTTTAAATATGA
TTTTTTAAAACTGCCAGTAAGAAATTTTAAATTAAACCCATTTGTTAAAG
GATATAGTGCCCAAGTTATATGGTGACCTACCTTTGTCAATACTTAGCAT
TATGTATTTCAAATTATCCAATATACATGTCATATATATTTTTATATGTC
ACATATATAAAAGATATGTATGATCTATGTGAATCCTAAGTAAATATTTT
GTTCCAGAAAAGTACAAAATAATAAAGGTAAAAATAATCTATAATTTTCA
GGACCACAGACTAAGCTGTCGAAATTAACGCTGATTTTTTTAGGGCCAGA
ATACCAAAATGGCTCCTCTCTTCCCCCAAAATTGGACAATTTCAAATGCA
AAATAATTCATTATTTAATATATGAGTTGCTTCCTCTATTTGGTTTCCTT
AAAAAAAAAAAAAACTCTCATAGGACATGTTTCATTTTGTTCCTTTCAGG
AGTAGTAAATTAGACGTTTTCCCCATATAAAGCTTTTTTCTACCAGAAAG
ATACTTCTGGTAGAAGAAGAGAAAGGAGCTCTTTATGGTTCACACGACTG
TCTCCTGTCCTAACTACTTTGCTTAAAGTGCTCAAATTCCATCACTACTC
ACAGTTGTCTAATCTAAGTCTAATCCCCTTTGATCTCTCAGACTACCTTC
CCTTTTATCTCTCTACTACTTAATAATAAGAATATCTTTTTTTCAAACTT
GACCTTCATTTTGCTTTCACAATACTATACTCTCCATGGATTATCCCTTA
TCTGAATCCATCTTTATAACCCTATTCCTTTCTCATATTTAGTACTGTGG
GCCAATGGACAACCTTCAATCATCTTTTCTACACTGACCCTCAGACATTC
TATCTGCTCTCACGGACTCCTTTATTTACCATGAATAAAGTTCCAAAATC
TACATATTCATCCCAAGTCTCTTTCCAGTTCCCCTTCTTACATTGCCTAT
TTGCCATTTCTCCCTTCAATACCCTATACTTCACTCAAATTCAACATACC
AAAAATAAAAGGCCAGGCACGGTGGCTCACACCTGTAATCCCAGGACTTT
GGGAGGCTGAGGCAGGTGGATCACCTGAGGTCAGGAGTCTGACCAGCCTG
ACCAATATGGTGAAACCCCGTCTCTACCTAAAATACAAAAATTAGCCAGG
CGTGGTGGCATGTGCCTACAGTCCCAGCTACTCAAGAGGCTGAGACAGGA
GAATCGCTTGAACCCAGGAGGCGGAGGTTGCAGTGAGCTGAGATCACACC
AATGCACTGGGTGACAGAACAAGACTGACTCAAAAAAAAATAAATAACAA
ATTCCCCAGCCCCTTACTGCTACTGCTATCCCTTTCTACCCACCTTTCCC
TCCTTTATACTCTTTCACACCATCTTCCTCACTTCTTTATATCCATTAAT
ATGACCAGCATGTTCCCAGTCACAGAAGCCTGGAACCCGGAAGACATCTC
TGGCTTTTCACTCAACTTTGTAAACTACCTCTTTTGTATCATAAGCCACC
AAGTTCAATACAATCTTCTCTTGAAACGTCTCTTAATCTTATAAGCTTTC
TTCCCCAAAGACTGTCTTTAACTTCAGTGCTAGATTATATAAGT
AAD34156.1 human angiopoietin-related protein 3
(SEQ ID NO: 8)
MFTIKLLLFIVPLVISSRIDQDNSSFDSLSPEPKSRFAMLDDVKILANGL
LQLGHGLKDFVHKTKGQINDIFQKLNIFDQSFYDLSLQTSEIKEEEKELR
RTTYKLQVKNEEVKNMSLELNSKLESLLEEKILLQQKVKYLEEQLTNLIQ
NQPETPEHPEVTSLKTFVEKQDNSIKDLLQTVEDQYKQLNQQHSQIKEIE
NQLRRTSIQEPTEISLSSKPRAPRTTPFLQLNEIRNVKHDGIPAECTTIY
NRGEHTSGMYAIRPSNSQVFHVYCDVISGSPWTLIQHRIDGSQNFNETWE
NYKYGFGRLDGEFWLGLEKIYSIVKQSNYVLRIELEDWKDNKHYIEYSFY
LGNHETNYTLHLVAITGNVPNAIPENKDLVFSTWDHKAKGHFNCPEGYSG
GWWWHDECGENNLNGKYNKPRAKSKPERRRGLSWKSQNGRLYSIKSTKML
IHPTDSESFE

Lipoprotein (a)(LPA)

[0463] In some embodiments, the target gene for modification using the compositions and methods disclosed herein is gene encoding lipoprotein a (LPA). LPA is a low-density lipoprotein variant. Genetic and epidemiologic studies have identified LPA as a risk factor for atherosclerosis and related diseases, such as coronary heart disease and stroke. LPA concentrations vary more than one thousand times between individuals: from <0.2 to >200 mg/dL. This range of concentrations is observed in all populations studied by scientists so far. The mean and median concentrations between different world populations show distinct particularities, the main being the two to threefold higher LPA plasma concentration of populations of African descent compared to Asian, Oceanic, or European populations. High LPA in blood correlates with coronary heart disease (CHD), cardiovascular disease (CVD), atherosclerosis, thrombosis, and stroke. Individuals without LPA or with very low LPA levels seem to be healthy. Thus, plasma LPA is not vital, at least under normal environmental conditions. Since apo (a)/LPA appeared rather recently in mammalian evolution-only old world monkeys and humans have been shown to harbor LPA-its function might not be vital, but just evolutionarily advantageous under certain environmental conditions, e.g. in case of exposure to certain infectious diseases.

[0464] An exemplary LPA amino acid sequence encoded by Human reference sequence NG_016147.1 is provided below:

>sp|P08519|APOA_HUMAN Apolipoprotein(a)
(SEQ ID NO: 64)
MEHKEVVLLLLLFLKSAAPEQSHVVQDCYHGDGQSYRGTYSTTVTGRTCQ
AWSSMTPHQHNRTTENYPNAGLIMNYCRNPDAVAAPYCYTRDPGVRWEYC
NLTQCSDAEGTAVAPPTVTPVPSLEAPSEQAPTEQRPGVQECYHGNGQSY
RGTYSTTVTGRTCQAWSSMTPHSHSRTPEYYPNAGLIMNYCRNPDAVAAP
YCYTRDPGVRWEYCNLTQCSDAEGTAVAPPTVTPVPSLEAPSEQAPTEQR
PGVQECYHGNGQSYRGTYSTTVTGRTCQAWSSMTPHSHSRTPEYYPNAGL
IMNYCRNPDAVAAPYCYTRDPGVRWEYCNLTQCSDAEGTAVAPPTVTPVP
SLEAPSEQAPTEQRPGVQECYHGNGQSYRGTYSTTVTGRTCQAWSSMTPH
SHSRTPEYYPNAGLIMNYCRNPDAVAAPYCYTRDPGVRWEYCNLTQCSDA
EGTAVAPPTVTPVPSLEAPSEQAPTEQRPGVQECYHGNGQSYRGTYSTTV
TGRTCQAWSSMTPHSHSRTPEYYPNAGLIMNYCRNPDAVAAPYCYTRDPG
VRWEYCNLTQCSDAEGTAVAPPTVTPVPSLEAPSEQAPTEQRPGVQECYH
GNGQSYRGTYSTTVTGRTCQAWSSMTPHSHSRTPEYYPNAGLIMNYCRNP
DAVAAPYCYTRDPGVRWEYCNLTQCSDAEGTAVAPPTVTPVPSLEAPSEQ
APTEQRPGVQECYHGNGQSYRGTYSTTVTGRTCQAWSSMTPHSHSRTPEY
YPNAGLIMNYCRNPDAVAAPYCYTRDPGVRWEYCNLTQCSDAEGTAVAPP
TVTPVPSLEAPSEQAPTEQRPGVQECYHGNGQSYRGTYSTTVTGRTCQAW
SSMTPHSHSRTPEYYPNAGLIMNYCRNPDAVAAPYCYTRDPGVRWEYCNL
TQCSDAEGTAVAPPTVTPVPSLEAPSEQAPTEQRPGVQECYHGNGQSYRG
TYSTTVTGRTCQAWSSMTPHSHSRTPEYYPNAGLIMNYCRNPDAVAAPYC
YTRDPGVRWEYCNLTQCSDAEGTAVAPPTVTPVPSLEAPSEQAPTEQRPG
VQECYHGNGQSYRGTYSTTVTGRTCQAWSSMTPHSHSRTPEYYPNAGLIM
NYCRNPDAVAAPYCYTRDPGVRWEYCNLTQCSDAEGTAVAPPTVTPVPSL
EAPSEQAPTEQRPGVQECYHGNGQSYRGTYSTTVTGRTCQAWSSMTPHSH
SRTPEYYPNAGLIMNYCRNPDAVAAPYCYTRDPGVRWEYCNLTQCSDAEG
TAVAPPTVTPVPSLEAPSEQAPTEQRPGVQECYHGNGQSYRGTYSTTVTG
RTCQAWSSMTPHSHSRTPEYYPNAGLIMNYCRNPDAVAAPYCYTRDPGVR
WEYCNLTQCSDAEGTAVAPPTVTPVPSLEAPSEQAPTEQRPGVQECYHGN
GQSYRGTYSTTVTGRTCQAWSSMTPHSHSRTPEYYPNAGLIMNYCRNPDA
VAAPYCYTRDPGVRWEYCNLTQCSDAEGTAVAPPTVTPVPSLEAPSEQAP
TEQRPGVQECYHGNGQSYRGTYSTTVTGRTCQAWSSMTPHSHSRTPEYYP
NAGLIMNYCRNPDAVAAPYCYTRDPGVRWEYCNLTQCSDAEGTAVAPPTV
TPVPSLEAPSEQAPTEQRPGVQECYHGNGQSYRGTYSTTVTGRTCQAWSS
MTPHSHSRTPEYYPNAGLIMNYCRNPDAVAAPYCYTRDPGVRWEYCNLTQ
CSDAEGTAVAPPTVTPVPSLEAPSEQAPTEQRPGVQECYHGNGQSYRGTY
STTVTGRTCQAWSSMTPHSHSRTPEYYPNAGLIMNYCRNPDAVAAPYCYT
RDPGVRWEYCNLTQCSDAEGTAVAPPTVTPVPSLEAPSEQAPTEQRPGVQ
ECYHGNGQSYRGTYSTTVTGRTCQAWSSMTPHSHSRTPEYYPNAGLIMNY
CRNPDAVAAPYCYTRDPGVRWEYCNLTQCSDAEGTAVAPPTVTPVPSLEA
PSEQAPTEQRPGVQECYHGNGQSYRGTYSTTVTGRTCQAWSSMTPHSHSR
TPEYYPNAGLIMNYCRNPDAVAAPYCYTRDPGVRWEYCNLTQCSDAEGTA
VAPPTVTPVPSLEAPSEQAPTEQRPGVQECYHGNGQSYRGTYSTTVTGRT
CQAWSSMTPHSHSRTPEYYPNAGLIMNYCRNPDAVAAPYCYTRDPGVRWE
YCNLTQCSDAEGTAVAPPTVTPVPSLEAPSEQAPTEQRPGVQECYHGNGQ
SYRGTYSTTVTGRTCQAWSSMTPHSHSRTPEYYPNAGLIMNYCRNPDAVA
APYCYTRDPGVRWEYCNLTQCSDAEGTAVAPPTVTPVPSLEAPSEQAPTE
QRPGVQECYHGNGQSYRGTYSTTVTGRTCQAWSSMTPHSHSRTPEYYPNA
GLIMNYCRNPDAVAAPYCYTRDPGVRWEYCNLTQCSDAEGTAVAPPTVTP
VPSLEAPSEQAPTEQRPGVQECYHGNGQSYRGTYSTTVTGRTCQAWSSMT
PHSHSRTPEYYPNAGLIMNYCRNPDAVAAPYCYTRDPGVRWEYCNLTQCS
DAEGTAVAPPTVTPVPSLEAPSEQAPTEQRPGVQECYHGNGQSYRGTYST
TVTGRTCQAWSSMTPHSHSRTPEYYPNAGLIMNYCRNPDAVAAPYCYTRD
PGVRWEYCNLTQCSDAEGTAVAPPTVTPVPSLEAPSEQAPTEQRPGVQEC
YHGNGQSYRGTYSTTVTGRTCQAWSSMTPHSHSRTPEYYPNAGLIMNYCR
NPDAVAAPYCYTRDPGVRWEYCNLTQCSDAEGTAVAPPTVTPVPSLEAPS
EQAPTEQRPGVQECYHGNGQSYRGTYSTTVTGRTCQAWSSMTPHSHSRTP
EYYPNAGLIMNYCRNPDAVAAPYCYTRDPGVRWEYCNLTQCSDAEGTAVA
PPTVTPVPSLEAPSEQAPTEQRPGVQECYHGNGQSYRGTYSTTVTGRTCQ
AWSSMTPHSHSRTPEYYPNAGLIMNYCRNPDAVAAPYCYTRDPGVRWEYC
NLTQCSDAEGTAVAPPTVTPVPSLEAPSEQAPTEQRPGVQECYHGNGQSY
RGTYSTTVTGRTCQAWSSMTPHSHSRTPEYYPNAGLIMNYCRNPDAVAAP
YCYTRDPGVRWEYCNLTQCSDAEGTAVAPPTVTPVPSLEAPSEQAPTEQR
PGVQECYHGNGQSYRGTYSTTVTGRTCQAWSSMTPHSHSRTPEYYPNAGL
IMNYCRNPDAVAAPYCYTRDPGVRWEYCNLTQCSDAEGTAVAPPTVTPVP
SLEAPSEQAPTEQRPGVQECYHGNGQSYRGTYSTTVTGRTCQAWSSMTPH
SHSRTPEYYPNAGLIMNYCRNPDAVAAPYCYTRDPGVRWEYCNLTQCSDA
EGTAVAPPTVTPVPSLEAPSEQAPTEQRPGVQECYHGNGQSYRGTYSTTV
TGRTCQAWSSMTPHSHSRTPEYYPNAGLIMNYCRNPDPVAAPYCYTRDPS
VRWEYCNLTQCSDAEGTAVAPPTITPIPSLEAPSEQAPTEQRPGVQECYH
GNGQSYQGTYFITVTGRTCQAWSSMTPHSHSRTPAYYPNAGLIKNYCRNP
DPVAAPWCYTTDPSVRWEYCNLTRCSDAEWTAFVPPNVILAPSLEAFFEQ
ALTEETPGVQDCYYHYGQSYRGTYSTTVTGRTCQAWSSMTPHQHSRTPEN
YPNAGLTRNYCRNPDAEIRPWCYTMDPSVRWEYCNLTQCLVTESSVLATL
TVVPDPSTEASSEEAPTEQSPGVQDCYHGDGQSYRGSFSTTVTGRTCQSW
SSMTPHWHQRTTEYYPNGGLTRNYCRNPDAEISPWCYTMDPNVRWEYCNL
TQCPVTESSVLATSTAVSEQAPTEQSPTVQDCYHGDGQSYRGSFSTTVTG
RTCQSWSSMTPHWHQRTTEYYPNGGLTRNYCRNPDAEIRPWCYTMDPSVR
WEYCNLTQCPVMESTLLTTPTVVPVPSTELPSEEAPTENSTGVQDCYRGD
GQSYRGTLSTTITGRTCQSWSSMTPHWHRRIPLYYPNAGLTRNYCRNPDA
EIRPWCYTMDPSVRWEYCNLTRCPVTESSVLTTPTVAPVPSTEAPSEQAP
PEKSPVVQDCYHGDGRSYRGISSTTVTGRTCQSWSSMIPHWHQRTPENYP
NAGLTENYCRNPDSGKQPWCYTTDPCVRWEYCNLTQCSETESGVLETPTV
VPVPSMEAHSEAAPTEQTPVVRQCYHGNGQSYRGTFSTTVTGRTCQSWSS
MTPHRHQRTPENYPNDGLTMNYCRNPDADTGPWCFTMDPSIRWEYCNLTR
CSDTEGTVVAPPTVIQVPSLGPPSEQDCMFGNGKGYRGKKATTVTGTPCQ
EWAAQEPHRHSTFIPGTNKWAGLEKNYCRNPDGDINGPWCYTMNPRKLFD
YCDIPLCASSSFDCGKPQVEPKKCPGSIVGGCVAHPHSWPWQVSLRTRFG
KHFCGGTLISPEWVLTAAHCLKKSSRPSSYKVILGAHQEVNLESHVQEIE
VSRLFLEPTQADIALLKLSRPAVITDKVMPACLPSPDYMVTARTECYITG
WGETQGTFGTGLLKEAQLLVIENEVCNHYKYICAEHLARGTDSCQGDSGG
PLVCFEKDKYILQGVTSWGLGCARPNKPGVYARVSRFVTWIEGMMRNN
OS = Homo sapiens
OX = 9606
GN = LPA
PE = 1
SV = 1

### Base Editor Protein-gRNA Complexes

[0465] In another aspect, provided herein is a complex comprising the single guide RNA as provided herein in complex with the base editor fusion protein, e.g. the adenosine base editor fusion protein, wherein the complex comprises increased stability as compared to a complex with an unmodified single guide RNA and a base editor protein, wherein the stability is measured by half life of the complex ex vivo or in vitro.

[0466] In some embodiments, the complex comprises increased stability as compared to a complex with an unmodified single guide RNA and a Cas9 protein. In some embodiments, the complex comprises increased stability by at least 5%, at least 10%, at least 20%, at least 30%, at least 40%, at least 50%, at least 60%, at least 70%, at least 80%, at least 90%, at least 100%, at least 200%, at least 300%, at least 400%, at least 500%, at least 600%, at least 700%, at least 800%, at least 900%, at least 1000%, at least 2000%, at least 3000%, at least 4000%, at least 5000%, at least 6000%, at least 7000%, at least 8000%, at least 9000%, at least 10000%, at least 20000%, at least 30000%, at least 40000%, at least 50000%, at least 60000%, at least 70000%, at least 80000%, at least 90000%, or at least 100000% as compared to a complex with an unmodified single guide RNA and a Cas9 protein. In some embodiments, the complex comprises increased stability by at least 2 fold, at least 3 fold, at least 4 fold, at least 5 fold, at least 10 fold, at least 20 fold, at least 25 fold, at least 30 fold, at least 40 fold, at least 50 fold, at least 60 fold, at least 70 fold, at least 80 fold, at least 90 fold, at least 100 fold, at least 200 fold, at least 300 fold, at least 400 fold, at least 500 fold, at least 600 fold, at least 700 fold, at least 800 fold, at least 900 fold, at least 1000 fold, at least 2000 fold, at least 3000 fold, at least 4000 fold, at least 5000 fold, at least 6000 fold, at least 7000 fold, at least 8000 fold, at least 9000 fold, or at least 10000 fold as compared to a complex with an unmodified single guide RNA and a Cas9 protein.

[0467] In some embodiments, wherein the stability of the complex is measured by half life of the complex. In some embodiments, wherein the stability of the complex is measured by half life of the complex ex vivo. In some embodiments, wherein the stability of the complex is measured by half life of the complex in vitro.

[0468] In some embodiments, the complex comprises increased half life by at least 5%, at least 10%, at least 20%, at least 30%, at least 40%, at least 50%, at least 60%, at least 70%, at least 80%, at least 90%, at least 100%, at least 200%, at least 300%, at least 400%, at least 500%, at least 600%, at least 700%, at least 800%, at least 900%, at least 1000%, at least 2000%, at least 3000%, at least 4000%, at least 5000%, at least 6000%, at least 7000%, at least 8000%, at least 9000%, at least 10000%, at least 20000%, at least 30000%, at least 40000%, at least 50000%, at least 60000%, at least 70000%, at least 80000%, at least 90000%, or at least 100000% as compared to a complex with an unmodified single guide RNA and a Cas9 protein wherein half life of the complex is measured ex vivo. In some embodiments, the single guide RNA exhibits increased half life of the complex by at least 2 fold, at least 3 fold, at least 4 fold, at least 5 fold, at least 10 fold, at least 20 fold, at least 25 fold, at least 30 fold, at least 40 fold, at least 50 fold, at least 60 fold, at least 70 fold, at least 80 fold, at least 90 fold, at least 100 fold, at least 200 fold, at least 300 fold, at least 400 fold, at least 500 fold, at least 600 fold, at least 700 fold, at least 800 fold, at least 900 fold, at least 1000 fold, at least 2000 fold, at least 3000 fold, at least 4000 fold, at least 5000 fold, at least 6000 fold, at least 7000 fold, at least 8000 fold, at least 9000 fold, or at least 10000 fold as compared to a complex with an unmodified single guide RNA and a Cas9 protein, wherein half life of the complex is measured ex vivo.

[0469] In some embodiments, the complex comprises increased half life when measured in vitro by at least 5%, at least 10%, at least 20%, at least 30%, at least 40%, at least 50%, at least 60%, at least 70%, at least 80%, at least 90%, at least 100%, at least 200%, at least 300%, at least 400%, at least 500%, at least 600%, at least 700%, at least 800%, at least 900%, at least 1000%, at least 2000%, at least 3000%, at least 4000%, at least 5000%, at least 6000%, at least 7000%, at least 8000%, at least 9000%, at least 10000%, at least 20000%, at least 30000%, at least 40000%, at least 50000%, at least 60000%, at least 70000%, at least 80000%, at least 90000%, or at least 100000% as compared to a complex with an unmodified single guide RNA and a Cas9 protein, wherein half life of the complex is measured in vitro. In some embodiments, the single guide RNA exhibits increased half life of the complex by at least 2 fold, at least 3 fold, at least 4 fold, at least 5 fold, at least 10 fold, at least 20 fold, at least 25 fold, at least 30 fold, at least 40 fold, at least 50 fold, at least 60 fold, at least 70 fold, at least 80 fold, at least 90 fold, at least 100 fold, at least 200 fold, at least 300 fold, at least 400 fold, at least 500 fold, at least 600 fold, at least 700 fold, at least 800 fold, at least 900 fold, at least 1000 fold, at least 2000 fold, at least 3000 fold, at least 4000 fold, at least 5000 fold, at least 6000 fold, at least 7000 fold, at least 8000 fold, at least 9000 fold, or at least 10000 fold as compared to a complex with an unmodified single guide RNA and a Cas9 protein, wherein half life of the complex is measured in vitro.

[0470] In another aspect, provided herein is a cell comprising the complex as provided herein. In some embodiments, the cell may be an in vitro cell. In some embodiments, the cell may be an ex vivo cell. In some embodiments, the cell may be an in vivo cell. In some embodiments, the cell may be an isolated cell.

### Gene Modification Compositions

[0471] In another aspect, provided herein is a composition for gene modification comprising the single guide RNA as provided herein and a base editor protein or a nucleic acid sequence encoding the base editor protein. In some embodiments, the composition further comprises a vector that comprises the nucleic acid sequence encoding the base editor protein.

[0472] In some embodiments, the nucleic acid sequence may be a DNA, an RNA or mRNA, or a modified nucleic acid sequence. In some embodiments, the vector may be an expression vector. In some embodiments, the nucleic acid is operatively linked to a promoter of the vector. In some embodiments, the vector is a plasmid or a viral vector.

### Therapeutics and Methods of Treatment

[0473] In some aspects, provided herein is a method for treating or preventing a condition in a subject in need thereof, the method comprising administering to the subject a therapeutically effective amount of (i) a guide polynucleotide or a nucleic acid encoding same, and (ii) a base editor fusion protein comprising a programmable DNA binding domain and a deaminase, or a nucleic acid encoding same. In some embodiments, the base editor system comprises a guide polynucleotide. In some embodiments, the base editor system comprises a nucleic acid encoding a guide polynucleotide. In some embodiments, the base editor system comprises a base editor fusion protein comprising a programmable DNA binding domain and a deaminase. In some embodiments, the base editor system comprises a nucleic acid encoding a base editor fusion protein comprising a programmable DNA binding domain and a deaminase.

[0474] In some embodiments, the guide polynucleotide directs the base editor system to effect a nucleobase alteration in a ANGPTL3 gene in the subject. In some embodiments, the guide polynucleotide directs the base editor system to effect a nucleobase alteration in a PCSK9gene in the subject.

[0475] In some embodiments, the base alteration occurs in at least 35% of whole liver cells in the subject as measured by next generation sequencing or Sanger sequencing, thereby treating or preventing the condition in the subject.

[0476] In some aspects, provided herein is a method for treating or preventing a condition in a subject in need thereof, the method comprising administering to the subject a therapeutically effective amount of a first composition, comprising (i) a guide polynucleotide or a nucleic acid encoding same, and (ii) a base editor fusion protein comprising a programmable DNA binding domain and a deaminase, or a nucleic acid encoding same, wherein the guide polynucleotide directs the base editor system to effect a nucleobase alteration in a PCSK9 gene in the subject, wherein the base alteration occurs in at least 35% of whole liver cells in the subject as measured by next generation sequencing or Sanger sequencing; and a second composition, comprising (i) a guide polynucleotide or a nucleic acid encoding same, and (ii) a base editor fusion protein comprising a programmable DNA binding domain and a deaminase, or a nucleic acid encoding same, wherein the guide polynucleotide directs the base editor system to effect a nucleobase alteration in a ANGPTL3 gene in the subject, wherein the base alteration occurs in at least 35% of whole liver cells in the subject as measured by next generation sequencing or Sanger sequencing.

[0477] In some embodiments, the first composition and the second composition are administered sequentially. In some embodiment, the first composition is administered for one or more doses, then the second composition is administered for one or more doses. In some embodiments, the first composition and the second composition interspersed. In some embodiments, the first composition and the second composition are administered concurrently. In some embodiments, the first composition and the second composition are administered for one or more doses. In some embodiments, the first composition and the second composition are administered over and interval of over an interval of 1, 2, 3, 4, 5, 6, 7, 8, 9, 10, 11, 12, 13, 14, 15, 16, 17, 18, 19, 20, 21, 22, 23, 24, 25, 26, 27, 28, 29, or 30 hours. In some embodiments, the first composition and the second composition are administered over and interval of over an interval of 1, 2, 3, 4, 5, 6, 7, 8, 9, 10, 11, 12, 13, 14, 15, 16, 17, 18, 19, 20, 21, 22, 23, 24, 25, 26, 27, 28, 29, or 30 days. In some embodiments, the first composition and the second composition are administered over and interval of over an interval of 1, 2, 3, 4, 5, 6, 7, 8, 9, 10, 11, 12, 13, 14, 15, 16, 17, 18, 19, 20, 21, 22, 23, 24, 25, 26, 27, 28, 29, or 30 weeks.

[0478] In some embodiments, the base alteration occurs in at least 1%, 2%, 3%, 4%, 5%, 6%, 7%, 8%, 9%, 10%, 15%, 20%, 25%, 30%, 35%, 40%, 45%, 50%, 55%, 60%, 65%, 70%, 75%, 80%, 85%, 90%, 95%, 97%, 98%, 99%, 99.3%, 99.5%, 99.7%, 99.8%, or 99.9% of whole liver cells in the subject as measured by next generation sequencing or Sanger sequencing. In some embodiments, the base alteration occurs in at most 1%, 2%, 3%, 4%, 5%, 6%, 7%, 8%, 9%, 10%, 15%, 20%, 25%, 30%, 35%, 40%, 45%, 50%, 55%, 60%, 65%, 70%, 75%, 80%, 85%, 90%, 95%, 97%, 98%, 99%, 99.3%, 99.5%, 99.7%, 99.8%, or 99.9% of whole liver cells in the subject as measured by next generation sequencing or Sanger sequencing. In some embodiments, the base alteration occurs in 1%-99.9%, 2%-99.9%, 3%-99.9%, 4%-99.9%, 5%-99.9%, 6%-99.9%, 7%-99.9%, 8%-99.9%, 9%-99.9%, 10%-99.9%, 15%-99.9%, 20%-99.9%, 25%-99.9%, 30%-99.9%, 35%-99.9%, 40%-99.9%, 45%-99.9%, 50%-99.9%, 55%-99.9%, 60%-99.9%, 65%-99.9%, 70%-99.9%, 75%-99.9%, 80%-99.9%, 85%-99.9%, 90%-99.9%, or 95-99.9% of whole liver cells in the subject as measured by next generation sequencing or Sanger sequencing. In some embodiments, the base alteration occurs in 1%-99.5%, 1%-99%, 1%-98%, 1%-97%, 1%-96%, 1%-95%, 1%-90%, 1%-85%, 1%-80%, 1%-75%, 1%-70%, 1%-65%, 1%-60%, 1%-55%, 1%-50%, 1%-45%, 1%-40%, 1%-35%, 1%-30%, 1%-25%, 1%-20%, 1%-15%, 1%-10%, 1%-9%, 1%-8%, 1%-7%, 1%-6%, 1%-5%, 1%-4%, 1%-3%, or 1%-2% of whole liver cells in the subject as measured by next generation sequencing or Sanger sequencing. In some embodiments, the base alteration occurs in 1%-90%, 5%-85%, 10%-80%, 15%-75%, 20%-70%, 25%-65%, 30%-60%, 35%-55%, or 40%-50% of whole liver cells in the subject as measured by next generation sequencing or Sanger sequencing. In some embodiments, the base alteration occurs in 100% of whole liver cells in the subject as measured by next generation sequencing or Sanger sequencing.

[0479] In some embodiments, the base alteration occurs in hepatocytes in the subject. In some embodiments, the base alteration occurs in at least 30% of hepatocytes in the subject as measured by next generation sequencing or Sanger sequencing. In some embodiments, the base alteration occurs in hepatocytes in the subject. In some embodiments, the base alteration occurs in at least 35% of hepatocytes in the subject as measured by next generation sequencing or Sanger sequencing. In some embodiments, the base alteration occurs in at least 1%, 2%, 3%, 4%, 5%, 6%, 7%, 8%, 9%, 10%, 15%, 20%, 25%, 30%, 35%, 40%, 45%, 50%, 55%, 60%, 65%, 70%, 75%, 80%, 85%, 90%, 95%, 97%, 98%, 99%, 99.3%, 99.5%, 99.7%, 99.8%, or 99.9% of hepatocytes in the subject as measured by next generation sequencing or Sanger sequencing. In some embodiments, the base alteration occurs in at most 1%, 2%, 3%, 4%, 5%, 10%, 15%, 20%, 25%, 30%, 35%, 40%, 45%, 50%, 55%, 60%, 65%, 70%, 75%, 80%, 85%, 90%, 95%, 97%, 98%, 99%, 99.3%, 99.5%, 99.7%, 99.8%, or 99.9% of hepatocytes in the subject as measured by next generation sequencing or Sanger sequencing. In some embodiments, the base alteration occurs in 1%-99.9%, 2%-99.9%, 3%-99.9%, 4%-99.9%, 5%-99.9%, 6%-99.9%, 7%-99.9%, 8%-99.9%, 9%-99.9%, 10%-99.9%, 15%-99.9%, 20%-99.9%, 25%-99.9%, 30%-99.9%, 35%-99.9%, 40%-99.9%, 45%-99.9%, 50%-99.9%, 55%-99.9%, 60%-99.9%, 65%-99.9%, 70%-99.9%, 75%-99.9%, 80%-99.9%, 85%-99.9%, 90%-99.9%, or 95-99.9% of hepatocytes in the subject as measured by next generation sequencing or Sanger sequencing. In some embodiments, the base alteration occurs in 1%-99.5%, 1%-99%, 1%-98%, 1%-97%, 1%-96%, 1%-95%, 1%-90%, 1%-85%, 1%-80%, 1%-75%, 1%-70%, 1%-65%, 1%-60%, 1%-55%, 1%-50%, 1%-45%, 1%-40%, 1%-35%, 1%-30%, 1%-25%, 1%-20%, 1%-15%, 1%-10%, 1%-9%, 1%-8%, 1%-7%, 1%-6%, 1%-5%, 1%-4%, 1%-3%, or 1%-2% hepatocytes in the subject as measured by next generation sequencing or Sanger sequencing. In some embodiments, the base alteration occurs in 1%-90%, 5%-85%, 10%-80%, 15%-75%, 20%-70%, 25%-65%, 30%-60%, 35%-55%, or 40%-50% of hepatocytes in the subject as measured by next generation sequencing or Sanger sequencing. In some embodiments, the base alteration occurs in 100% of hepatocytes in the subject as measured by next generation sequencing or Sanger sequencing.

[0480] In some embodiments, the base alteration occurred in whole liver cells in the subject is measured by next generation sequencing. In some embodiments, the base alteration occurred in whole liver cells in the subject is measured by Sanger sequencing. In some embodiments, the base alteration occurred in hepatocytes in the subject is measured by next generation sequencing. In some embodiments, the base alteration occurred in hepatocytes in the subject is measured by Sanger sequencing.

[0481] In some embodiments, the method for treating or preventing a condition in a subject in need thereof as described herein comprises administering (i) the guide polynucleotide and (ii) the nucleic acid encoding the base editor fusion protein to the subject. In some embodiments, the base editor system comprises a guide polynucleotide. In some embodiments, the base editor system comprises a nucleic acid encoding a guide polynucleotide.

[0482] In some embodiments, the nucleic acid encoding the base editor fusion protein is a mRNA. In some embodiments, the mRNA generates the base editor fusion protein upon translation in the subject after the administration. In some embodiments, the base editor fusion protein forms a RNP complex in the subject.

[0483] In some embodiments, the method for treating or preventing a condition in a subject in need thereof as described herein further comprises administering a lipid nanoparticle (LNP) enclosing a guide polynucleotide or a nucleic acid encoding the guide polynucleotide (i). In some embodiments, the method for treating or preventing a condition in a subject in need thereof as described herein further comprises administering a second LNP enclosing a base editor fusion protein comprising a programmable DNA binding domain and a deaminase, or a nucleic acid encoding same (ii). In some embodiments, the method for treating or preventing a condition in a subject in need thereof as described herein further comprises administering a LNP enclosing a guide polynucleotide or a nucleic acid encoding the guide polynucleotide (i) and a base editor fusion protein comprising a programmable DNA binding domain and a deaminase, or a nucleic acid encoding same (ii). In some embodiments, the RNP complex is formed upon uptake of the LNP or the second LNP by a liver cell in the subject.

[0484] In some embodiments, the ratio of a guide polynucleotide or a nucleic acid encoding the guide polynucleotide (i) and a base editor fusion protein comprising a programmable DNA binding domain and a deaminase, or a nucleic acid encoding same (ii) is about 1:10 to about 10:1 by weight. In some embodiments, the ratio of the guide polynucleotide and the nucleic acid encoding the base editor fusion protein is about 1:1, 1.5:1, 2:1, 3:1, 4:1, 1:1.5, 1:2, 1:3, or 1:4 by weight. In some embodiments, the molar ratio of the guide polynucleotide and the nucleic acid encoding the base editor fusion protein is about 500:1 to about 1:500.

[0485] In some embodiments, the ratio of the guide polynucleotide and the nucleic acid encoding the base editor fusion protein is about 1000:1 to about 1:1000 by weight. In some embodiments, the ratio of the guide polynucleotide and the nucleic acid encoding the base editor fusion protein is about 1000:1, 950:1, 900:1, 850:1, 800:1, 750:1, 700:1, 650:1, 600:1, 550:1, 500:1, 450:1, 400:1, 350:1, 300:1, 250:1, 200:1, 100:1, 95:1, 90:1, 85:1, 80:1, 75:1, 70:1, 65:1, 60:1, 55:1, 50:1, 45:1, 40:1, 35:1, 30:1, 25:1, 20:1, 19:1, 18:1, 17:1, 17:1, 15:1, 14:1, 13:1, 12:1, 11:1, 10:1, 9:1, 8:1, 7:1, 6:1, 5:1, 4:1, 3:1, 2;1, 1.9:1, 1.8:1, 1.7:1, 1.6:1, 1.5:1, 1.4:1, 1.3:1, 1.2:1, 1.1:1, 1.0:1, 0.9:1, 0.8:1, 0.7:1, 0.6:1, 0.5:1, 0.4:1, 0.3:1, 0.2:1, or 0.1 by weight. In some embodiments, the ratio of the guide polynucleotide and the nucleic acid encoding the base editor fusion protein is about 1:0.1, 1:0.2, 1:0.3, 1:0.4, 1:0.5, 1:0.6, 1:0.7, 1:0.8, 1:0.9, 1:1.0, 1:1.1, 1:1.2, 1:1.3, 1:1.4, 1:1.5, 1:1.6, 1:1.7, 1:1.8, 1:1.9, 1:2, 1:3, 1:4, 1:5, 1:6, 1:7, 1:8, 1:9, 1:10, 1:11, 1:12, 1:13, 1:14, 1:15, 1:16, 1:17, 1:18, 1:19, 1:20, 1:25, 1:30, 1:35, 1:40, 1:45, 1:50, 1:55, 1:60, 1:65, 1:70, 1:75, 1:80, 1:85, 1:90, 1:95, 1:100, 1:150, 1:200, 1:250, 1:300, 1:350, 1:400, 1:450, 1:500, 1:550, 1:600, 1:650, 1:700, 1:750, 1:800, 1:850, 1:900, 1:950, or 1:1000 by weight. In some embodiments, the ratio of the guide polynucleotide and the nucleic acid encoding the base editor fusion protein is at least about 1000:1, 950:1, 900:1, 850:1, 800:1, 750:1, 700:1, 650:1, 600:1, 550:1, 500:1, 450:1, 400:1, 350:1, 300:1, 250:1, 200:1, 100:1, 95:1, 90:1, 85:1, 80:1, 75:1, 70:1, 65:1, 60:1, 55:1, 50:1, 45:1, 40:1, 35:1, 30:1, 25:1, 20:1, 19:1, 18:1, 17:1, 17:1, 15:1, 14:1, 13:1, 12:1, 11:1, 10:1, 9:1, 8:1, 7:1, 6:1, 5:1, 4:1, 3:1, 2;1, 1.9:1, 1.8:1, 1.7:1, 1.6:1, 1.5:1, 1.4:1, 1.3:1, 1.2:1, 1.1:1, 1.0:1, 0.9:1, 0.8:1, 0.7:1, 0.6:1, 0.5:1, 0.4:1, 0.3:1, 0.2:1, or 0.1 by weight. In some embodiments, the ratio of the guide polynucleotide and the nucleic acid encoding the base editor fusion protein is at least about 1:0.1, 1:0.2, 1:0.3, 1:0.4, 1:0.5, 1:0.6, 1:0.7, 1:0.8, 1:0.9, 1:1.0, 1:1.1, 1:1.2, 1:1.3, 1:1.4, 1:1.5, 1:1.6, 1:1.7, 1:1.8, 1:1.9, 1:2, 1:3, 1:4, 1:5, 1:6, 1:7, 1:8, 1:9, 1:10, 1:11, 1:12, 1:13, 1:14, 1:15, 1:16, 1:17, 1:18, 1:19, 1:20, 1:25, 1:30, 1:35, 1:40, 1:45, 1:50, 1:55, 1:60, 1:65, 1:70, 1:75, 1:80, 1:85, 1:90, 1:95, 1:100, 1:150, 1:200, 1:250, 1:300, 1:350, 1:400, 1:450, 1:500, 1:550, 1:600, 1:650, 1:700, 1:750, 1:800, 1:850, 1:900, 1:950, or 1:1000 by weight. In some embodiments, the ratio of the guide polynucleotide and the nucleic acid encoding the base editor fusion protein is at most about 1000:1, 950:1, 900:1, 850:1, 800:1, 750:1, 700:1, 650:1, 600:1, 550:1, 500:1, 450:1, 400:1, 350:1, 300:1, 250:1, 200:1, 100:1, 95:1, 90:1, 85:1, 80:1, 75:1, 70:1, 65:1, 60:1, 55:1, 50:1, 45:1, 40:1, 35:1, 30:1, 25:1, 20:1, 19:1, 18:1, 17:1, 17:1, 15:1, 14:1, 13:1, 12:1, 11:1, 10:1, 9:1, 8:1, 7:1, 6:1, 5:1, 4:1, 3:1, 2;1, 1.9:1, 1.8:1, 1.7:1, 1.6:1, 1.5:1, 1.4:1, 1.3:1, 1.2:1, 1.1:1, 1.0:1, 0.9:1, 0.8:1, 0.7:1, 0.6:1, 0.5:1, 0.4:1, 0.3:1, 0.2:1, or 0.1 by weight. In some embodiments, the ratio of the guide polynucleotide and the nucleic acid encoding the base editor fusion protein is at most about 1:0.1, 1:0.2, 1:0.3, 1:0.4, 1:0.5, 1:0.6, 1:0.7, 1:0.8, 1:0.9, 1:1.0, 1:1.1, 1:1.2, 1:1.3, 1:1.4, 1:1.5, 1:1.6, 1:1.7, 1:1.8, 1:1.9, 1:2, 1:3, 1:4, 1:5, 1:6, 1:7, 1:8, 1:9, 1:10, 1:11, 1:12, 1:13, 1:14, 1:15, 1:16, 1:17, 1:18, 1:19, 1:20, 1:25, 1:30, 1:35, 1:40, 1:45, 1:50, 1:55, 1:60, 1:65, 1:70, 1:75, 1:80, 1:85, 1:90, 1:95, 1:100, 1:150, 1:200, 1:250, 1:300, 1:350, 1:400, 1:450, 1:500, 1:550, 1:600, 1:650, 1:700, 1:750, 1:800, 1:850, 1:900, 1:950, or 1:1000 by weight.

[0486] In some embodiments, the molar ratio of the guide polynucleotide and the nucleic acid encoding the base editor fusion protein is about 10000:1 to about 1:10000. In some embodiments, the molar ratio of the guide polynucleotide and the nucleic acid encoding the base editor fusion protein is about 10000:1, 9500:1, 9000:1, 8500:1, 8000:1, 7500:1, 7000:1, 6500:1, 6000:1, 5500:1, 5000:1, 4500:1, 4000:1, 3500:1, 3000:1, 2500:1, 2000:1, 1500:1, 1000:1, 950:1, 900:1, 850:1, 800:1, 750:1, 700:1, 650:1, 600:1, 550:1, 500:1, 450:1, 400:1, 350:1, 300:1, 250:1, 200:1, 190:1, 180:1, 170:1, 160:1, 150:1, 140:1, 130:1, 120:1, 110:1, 100:1, 95:1, 90:1, 85:1, 80:1, 75:1, 70:1, 69:1, 68:1, 67:1, 66:1, 65:1, 64:1, 63:1, 62:1, 61:1, 60:1, 59:1, 58:1, 57:1, 56:1, 55:1, 54:1, 53:1, 52:1, 51:1, 50:1, 49:1, 48:1, 47:1, 46:1, 45:1, 44:1, 43:1, 42:1, 41:1, 40:1, 39:1, 38:1, 37:1, 36:1, 35:1, 34:1, 33:1, 32:1, 31:1, 30:1, 29:1, 28:1, 27:1, 26:1, 25:1, 24:1, 23:1, 22:1, 21:1, 20:1, 19:1, 18:1, 17:1, 16:1, 15:1, 14:1, 13:1, 12:1, 11:1, 10:1, 9:1, 8:1, 7:1, 6:1, 5:1, 4:1, 3:1, 2:1, 1:1, 0.9:1, 0.8:1, 0.7:1, 0.6:1, 0.5:1, 0.4:1, 0.3:1, 0.2:1, or 0.1:1. In some embodiments, the molar ratio of the guide polynucleotide and the nucleic acid encoding the base editor fusion protein is at least about 1:10000, 1:9500, 1:9000, 1:8500, 1:8000, 1:7500, 1:7000, 1:6500, 1:6000, 1:5500, 1:5000, 1:4500, 1:4000, 1:3500, 1:3000, 1:2500, 1:2000, 1:1500, 1:1000, 1:950, 1:900, 1:850, 1:800, 1:750, 1:700, 1:650, 1:600, 1:550, 1:500, 1:450, 1:400, 1:350, 1:300, 1:250, 1:200, 1:190, 1:180, 1:170, 1:160, 1:150, 1:140, 1:130, 1:120, 1:110, 1:100, 1:95, 1:90, 1:85, 1:80, 1:75, 1:70, 1:69, 1:68, 1:67, 1:66, 1:65, 1:64, 1:63, 1:62, 1:61, 1:60, 1:59, 1:58, 1:57, 1:56, 1:55, 1:54, 1:53, 1:52, 1:51, 1:50, 1:49, 1:48, 1:47, 1:46, 1:45, 1:44, 1:43, 1:42, 1:41, 1:40, 1:39, 1:38, 1:37, 1:36, 1:35, 1:34, 1:33, 1:32, 1:31, 1:30, 1:29, 1:28, 1:27, 1:26, 1:25, 1:24, 1:23, 1:22, 1:21, 1:20, 1:19, 1:18, 1:17, 1:16, 1:15, 1:14, 1:13, 1:12, 1:11, 1:10, 1:9, 1:8, 1:7, 1:6, 1:5, 1:4, 1:3, 1:2, 1:1, 1:0.9, 1:0.8, 1:0.7, 1:0.6, 1:0.5, 1:0.4, 1:0.3, 1:0.2, or 1:0.1. In some embodiments, the molar ratio of the guide polynucleotide and the nucleic acid encoding the base editor fusion protein is at least about 10000:1, 9500:1, 9000:1, 8500:1, 8000:1, 7500:1, 7000:1, 6500:1, 6000:1, 5500:1, 5000:1, 4500:1, 4000:1, 3500:1, 3000:1, 2500:1, 2000:1, 1500:1, 1000:1, 950:1, 900:1, 850:1, 800:1, 750:1, 700:1, 650:1, 600:1, 550:1, 500:1, 450:1, 400:1, 350:1, 300:1, 250:1, 200:1, 190:1, 180:1, 170:1, 160:1, 150:1, 140:1, 130:1, 120:1, 110:1, 100:1, 95:1, 90:1, 85:1, 80:1, 75:1, 70:1, 69:1, 68:1, 67:1, 66:1, 65:1, 64:1, 63:1, 62:1, 61:1, 60:1, 59:1, 58:1, 57:1, 56:1, 55:1, 54:1, 53:1, 52:1, 51:1, 50:1, 49:1, 48:1, 47:1, 46:1, 45:1, 44:1, 43:1, 42:1, 41:1, 40:1, 39:1, 38:1, 37:1, 36:1, 35:1, 34:1, 33:1, 32:1, 31:1, 30:1, 29:1, 28:1, 27:1, 26:1, 25:1, 24:1, 23:1, 22:1, 21:1, 20:1, 19:1, 18:1, 17:1, 16:1, 15:1, 14:1, 13:1, 12:1, 11:1, 10:1, 9:1, 8:1, 7:1, 6:1, 5:1, 4:1, 3:1, 2:1, 1:1, 0.9:1, 0.8:1, 0.7:1, 0.6:1, 0.5:1, 0.4:1, 0.3:1, 0.2:1, or 0.1:1. In some embodiments, the molar ratio of the guide polynucleotide and the nucleic acid encoding the base editor fusion protein is at least about 1:10000, 1:9500, 1:9000, 1:8500, 1:8000, 1:7500, 1:7000, 1:6500, 1:6000, 1:5500, 1:5000, 1:4500, 1:4000, 1:3500, 1:3000, 1:2500, 1:2000, 1:1500, 1:1000, 1:950, 1:900, 1:850, 1:800, 1:750, 1:700, 1:650, 1:600, 1:550, 1:500, 1:450, 1:400, 1:350, 1:300, 1:250, 1:200, 1:190, 1:180, 1:170, 1:160, 1:150, 1:140, 1:130, 1:120, 1:110, 1:100, 1:95, 1:90, 1:85, 1:80, 1:75, 1:70, 1:69, 1:68, 1:67, 1:66, 1:65, 1:64, 1:63, 1:62, 1:61, 1:60, 1:59, 1:58, 1:57, 1:56, 1:55, 1:54, 1:53, 1:52, 1:51, 1:50, 1:49, 1:48, 1:47, 1:46, 1:45, 1:44, 1:43, 1:42, 1:41, 1:40, 1:39, 1:38, 1:37, 1:36, 1:35, 1:34, 1:33, 1:32, 1:31, 1:30, 1:29, 1:28, 1:27, 1:26, 1:25, 1:24, 1:23, 1:22, 1:21, 1:20, 1:19, 1:18, 1:17, 1:16, 1:15, 1:14, 1:13, 1:12, 1:11, 1:10, 1:9, 1:8, 1:7, 1:6, 1:5, 1:4, 1:3, 1:2, 1:1, 1:0.9, 1:0.8, 1:0.7, 1:0.6, 1:0.5, 1:0.4, 1:0.3, 1:0.2, or 1:0.1. In some embodiments, the molar ratio of the guide polynucleotide and the nucleic acid encoding the base editor fusion protein is at most about 10000:1, 9500:1, 9000:1, 8500:1, 8000:1, 7500:1, 7000:1, 6500:1, 6000:1, 5500:1, 5000:1, 4500:1, 4000:1, 3500:1, 3000:1, 2500:1, 2000:1, 1500:1, 1000:1, 950:1, 900:1, 850:1, 800:1, 750:1, 700:1, 650:1, 600:1, 550:1, 500:1, 450:1, 400:1, 350:1, 300:1, 250:1, 200:1, 190:1, 180:1, 170:1, 160:1, 150:1, 140:1, 130:1, 120:1, 110:1, 100:1, 95:1, 90:1, 85:1, 80:1, 75:1, 70:1, 69:1, 68:1, 67:1, 66:1, 65:1, 64:1, 63:1, 62:1, 61:1, 60:1, 59:1, 58:1, 57:1, 56:1, 55:1, 54:1, 53:1, 52:1, 51:1, 50:1, 49:1, 48:1, 47:1, 46:1, 45:1, 44:1, 43:1, 42:1, 41:1, 40:1, 39:1, 38:1, 37:1, 36:1, 35:1, 34:1, 33:1, 32:1, 31:1, 30:1, 29:1, 28:1, 27:1, 26:1, 25:1, 24:1, 23:1, 22:1, 21:1, 20:1, 19:1, 18:1, 17:1, 16:1, 15:1, 14:1, 13:1, 12:1, 11:1, 10:1, 9:1, 8:1, 7:1, 6:1, 5:1, 4:1, 3:1, 2:1, 1:1, 0.9:1, 0.8:1, 0.7:1, 0.6:1, 0.5:1, 0.4:1, 0.3:1, 0.2:1, or 0.1:1. In some embodiments, the molar ratio of the guide polynucleotide and the nucleic acid encoding the base editor fusion protein is at most about 1:10000, 1:9500, 1:9000, 1:8500, 1:8000, 1:7500, 1:7000, 1:6500, 1:6000, 1:5500, 1:5000, 1:4500, 1:4000, 1:3500, 1:3000, 1:2500, 1:2000, 1:1500, 1:1000, 1:950, 1:900, 1:850, 1:800, 1:750, 1:700, 1:650, 1:600, 1:550, 1:500, 1:450, 1:400, 1:350, 1:300, 1:250, 1:200, 1:190, 1:180, 1:170, 1:160, 1:150, 1:140, 1:130, 1:120, 1:110, 1:100, 1:95, 1:90, 1:85, 1:80, 1:75, 1:70, 1:69, 1:68, 1:67, 1:66, 1:65, 1:64, 1:63, 1:62, 1:61, 1:60, 1:59, 1:58, 1:57, 1:56, 1:55, 1:54, 1:53, 1:52, 1:51, 1:50, 1:49, 1:48, 1:47, 1:46, 1:45, 1:44, 1:43, 1:42, 1:41, 1:40, 1:39, 1:38, 1:37, 1:36, 1:35, 1:34, 1:33, 1:32, 1:31, 1:30, 1:29, 1:28, 1:27, 1:26, 1:25, 1:24, 1:23, 1:22, 1:21, 1:20, 1:19, 1:18, 1:17, 1:16, 1:15, 1:14, 1:13, 1:12, 1:11, 1:10, 1:9, 1:8, 1:7, 1:6, 1:5, 1:4, 1:3, 1:2, 1:1, 1:0.9, 1:0.8, 1:0.7, 1:0.6, 1:0.5, 1:0.4, 1:0.3, 1:0.2, or 1:0.1.

[0487] In some embodiments, the ratio of a nucleic acid encoding the guide polynucleotide and the nucleic acid encoding the base editor fusion protein is about 10:1 to about 1:10 by weight. In some embodiments, the ratio of a nucleic acid encoding the guide polynucleotide and the nucleic acid encoding the base editor fusion protein is about 4:1, 3;1, 2:1, 1.5:1, 1:1, 1:1.5, 1:2, 1:3, or 1:4 by weight. In some embodiments, the molar ratio of a nucleic acid encoding the guide polynucleotide and the nucleic acid encoding the base editor fusion protein is about 500:1 to about 1:500.

[0488] In some embodiments, the ratio of a nucleic acid encoding the guide polynucleotide and the nucleic acid encoding the base editor fusion protein is about 1000:1 to about 1:1000 by weight. In some embodiments, the ratio of a nucleic acid encoding the guide polynucleotide and the nucleic acid encoding the base editor fusion protein is about 1000:1, 950:1, 900:1, 850:1, 800:1, 750:1, 700:1, 650:1, 600:1, 550:1, 500:1, 450:1, 400:1, 350:1, 300:1, 250:1, 200:1, 100:1, 95:1, 90:1, 85:1, 80:1, 75:1, 70:1, 65:1, 60:1, 55:1, 50:1, 45:1, 40:1, 35:1, 30:1, 25:1, 20:1, 19:1, 18:1, 17:1, 17:1, 15:1, 14:1, 13:1, 12:1, 11:1, 10:1, 9:1, 8:1, 7:1, 6:1, 5:1, 4:1, 3:1, 2;1, 1.9:1, 1.8:1, 1.7:1, 1.6:1, 1.5:1, 1.4:1, 1.3:1, 1.2:1, 1.1:1, 1.0:1, 0.9:1, 0.8:1, 0.7:1, 0.6:1, 0.5:1, 0.4:1, 0.3:1, 0.2:1, or 0.1 by weight. In some embodiments, the ratio of a nucleic acid encoding the guide polynucleotide and the nucleic acid encoding the base editor fusion protein is about 1:0.1, 1:0.2, 1:0.3, 1:0.4, 1:0.5, 1:0.6, 1:0.7, 1:0.8, 1:0.9, 1:1.0, 1:1.1, 1:1.2, 1:1.3, 1:1.4, 1:1.5, 1:1.6, 1:1.7, 1:1.8, 1:1.9, 1:2, 1:3, 1:4, 1:5, 1:6, 1:7, 1:8, 1:9, 1:10, 1:11, 1:12, 1:13, 1:14, 1:15, 1:16, 1:17, 1:18, 1:19, 1:20, 1:25, 1:30, 1:35, 1:40, 1:45, 1:50, 1:55, 1:60, 1:65, 1:70, 1:75, 1:80, 1:85, 1:90, 1:95, 1:100, 1:150, 1:200, 1:250, 1:300, 1:350, 1:400, 1:450, 1:500, 1:550, 1:600, 1:650, 1:700, 1:750, 1:800, 1:850, 1:900, 1:950, or 1:1000 by weight. In some embodiments, the ratio of a nucleic acid encoding the guide polynucleotide and the nucleic acid encoding the base editor fusion protein is at least about 1000:1, 950:1, 900:1, 850:1, 800:1, 750:1, 700:1, 650:1, 600:1, 550:1, 500:1, 450:1, 400:1, 350:1, 300:1, 250:1, 200:1, 100:1, 95:1, 90:1, 85:1, 80:1, 75:1, 70:1, 65:1, 60:1, 55:1, 50:1, 45:1, 40:1, 35:1, 30:1, 25:1, 20:1, 19:1, 18:1, 17:1, 17:1, 15:1, 14:1, 13:1, 12:1, 11:1, 10:1, 9:1, 8:1, 7:1, 6:1, 5:1, 4:1, 3:1, 2;1, 1.9:1, 1.8:1, 1.7:1, 1.6:1, 1.5:1, 1.4:1, 1.3:1, 1.2:1, 1.1:1, 1.0:1, 0.9:1, 0.8:1, 0.7:1, 0.6:1, 0.5:1, 0.4:1, 0.3:1, 0.2:1, or 0.1 by weight. In some embodiments, the ratio of a nucleic acid encoding the guide polynucleotide and the nucleic acid encoding the base editor fusion protein is at least about 1:0.1, 1:0.2, 1:0.3, 1:0.4, 1:0.5, 1:0.6, 1:0.7, 1:0.8, 1:0.9, 1:1.0, 1:1.1, 1:1.2, 1:1.3, 1:1.4, 1:1.5, 1:1.6, 1:1.7, 1:1.8, 1:1.9, 1:2, 1:3, 1:4, 1:5, 1:6, 1:7, 1:8, 1:9, 1:10, 1:11, 1:12, 1:13, 1:14, 1:15, 1:16, 1:17, 1:18, 1:19, 1:20, 1:25, 1:30, 1:35, 1:40, 1:45, 1:50, 1:55, 1:60, 1:65, 1:70, 1:75, 1:80, 1:85, 1:90, 1:95, 1:100, 1:150, 1:200, 1:250, 1:300, 1:350, 1:400, 1:450, 1:500, 1:550, 1:600, 1:650, 1:700, 1:750, 1:800, 1:850, 1:900, 1:950, or 1:1000 by weight. In some embodiments, the ratio of a nucleic acid encoding the guide polynucleotide and the nucleic acid encoding the base editor fusion protein is at most about 1000:1, 950:1, 900:1, 850:1, 800:1, 750:1, 700:1, 650:1, 600:1, 550:1, 500:1, 450:1, 400:1, 350:1, 300:1, 250:1, 200:1, 100:1, 95:1, 90:1, 85:1, 80:1, 75:1, 70:1, 65:1, 60:1, 55:1, 50:1, 45:1, 40:1, 35:1, 30:1, 25:1, 20:1, 19:1, 18:1, 17:1, 17:1, 15:1, 14:1, 13:1, 12:1, 11:1, 10:1, 9:1, 8:1, 7:1, 6:1, 5:1, 4:1, 3:1, 2;1, 1.9:1, 1.8:1, 1.7:1, 1.6:1, 1.5:1, 1.4:1, 1.3:1, 1.2:1, 1.1:1, 1.0:1, 0.9:1, 0.8:1, 0.7:1, 0.6:1, 0.5:1, 0.4:1, 0.3:1, 0.2:1, or 0.1 by weight. In some embodiments, the ratio of a nucleic acid encoding the guide polynucleotide and the nucleic acid encoding the base editor fusion protein is at most about 1:0.1, 1:0.2, 1:0.3, 1:0.4, 1:0.5, 1:0.6, 1:0.7, 1:0.8, 1:0.9, 1:1.0, 1:1.1, 1:1.2, 1:1.3, 1:1.4, 1:1.5, 1:1.6, 1:1.7, 1:1.8, 1:1.9, 1:2, 1:3, 1:4, 1:5, 1:6, 1:7, 1:8, 1:9, 1:10, 1:11, 1:12, 1:13, 1:14, 1:15, 1:16, 1:17, 1:18, 1:19, 1:20, 1:25, 1:30, 1:35, 1:40, 1:45, 1:50, 1:55, 1:60, 1:65, 1:70, 1:75, 1:80, 1:85, 1:90, 1:95, 1:100, 1:150, 1:200, 1:250, 1:300, 1:350, 1:400, 1:450, 1:500, 1:550, 1:600, 1:650, 1:700, 1:750, 1:800, 1:850, 1:900, 1:950, or 1:1000 by weight.

[0489] In some embodiments, the molar ratio of a nucleic acid encoding the guide polynucleotide and the nucleic acid encoding the base editor fusion protein is about 10000:1 to about 1:10000. In some embodiments, the molar ratio of a nucleic acid encoding the guide polynucleotide and the nucleic acid encoding the base editor fusion protein is about 10000:1, 9500:1, 9000:1, 8500:1, 8000:1, 7500:1, 7000:1, 6500:1, 6000:1, 5500:1, 5000:1, 4500:1, 4000:1, 3500:1, 3000:1, 2500:1, 2000:1, 1500:1, 1000:1, 950:1, 900:1, 850:1, 800:1, 750:1, 700:1, 650:1, 600:1, 550:1, 500:1, 450:1, 400:1, 350:1, 300:1, 250:1, 200:1, 190:1, 180:1, 170:1, 160:1, 150:1, 140:1, 130:1, 120:1, 110:1, 100:1, 95:1, 90:1, 85:1, 80:1, 75:1, 70:1, 69:1, 68:1, 67:1, 66:1, 65:1, 64:1, 63:1, 62:1, 61:1, 60:1, 59:1, 58:1, 57:1, 56:1, 55:1, 54:1, 53:1, 52:1, 51:1, 50:1, 49:1, 48:1, 47:1, 46:1, 45:1, 44:1, 43:1, 42:1, 41:1, 40:1, 39:1, 38:1, 37:1, 36:1, 35:1, 34:1, 33:1, 32:1, 31:1, 30:1, 29:1, 28:1, 27:1, 26:1, 25:1, 24:1, 23:1, 22:1, 21:1, 20:1, 19:1, 18:1, 17:1, 16:1, 15:1, 14:1, 13:1, 12:1, 11:1, 10:1, 9:1, 8:1, 7:1, 6:1, 5:1, 4:1, 3:1, 2:1, 1:1, 0.9:1, 0.8:1, 0.7:1, 0.6:1, 0.5:1, 0.4:1, 0.3:1, 0.2:1, or 0.1:1. In some embodiments, the molar ratio of a nucleic acid encoding the guide polynucleotide and the nucleic acid encoding the base editor fusion protein is at least about 1:10000, 1:9500, 1:9000, 1:8500, 1:8000, 1:7500, 1:7000, 1:6500, 1:6000, 1:5500, 1:5000, 1:4500, 1:4000, 1:3500, 1:3000, 1:2500, 1:2000, 1:1500, 1:1000, 1:950, 1:900, 1:850, 1:800, 1:750, 1:700, 1:650, 1:600, 1:550, 1:500, 1:450, 1:400, 1:350, 1:300, 1:250, 1:200, 1:190, 1:180, 1:170, 1:160, 1:150, 1:140, 1:130, 1:120, 1:110, 1:100, 1:95, 1:90, 1:85, 1:80, 1:75, 1:70, 1:69, 1:68, 1:67, 1:66, 1:65, 1:64, 1:63, 1:62, 1:61, 1:60, 1:59, 1:58, 1:57, 1:56, 1:55, 1:54, 1:53, 1:52, 1:51, 1:50, 1:49, 1:48, 1:47, 1:46, 1:45, 1:44, 1:43, 1:42, 1:41, 1:40, 1:39, 1:38, 1:37, 1:36, 1:35, 1:34, 1:33, 1:32, 1:31, 1:30, 1:29, 1:28, 1:27, 1:26, 1:25, 1:24, 1:23, 1:22, 1:21, 1:20, 1:19, 1:18, 1:17, 1:16, 1:15, 1:14, 1:13, 1:12, 1:11, 1:10, 1:9, 1:8, 1:7, 1:6, 1:5, 1:4, 1:3, 1:2, 1:1, 1:0.9, 1:0.8, 1:0.7, 1:0.6, 1:0.5, 1:0.4, 1:0.3, 1:0.2, or 1:0.1. In some embodiments, the molar ratio of a nucleic acid encoding the guide polynucleotide and the nucleic acid encoding the base editor fusion protein is at least about 10000:1, 9500:1, 9000:1, 8500:1, 8000:1, 7500:1, 7000:1, 6500:1, 6000:1, 5500:1, 5000:1, 4500:1, 4000:1, 3500:1, 3000:1, 2500:1, 2000:1, 1500:1, 1000:1, 950:1, 900:1, 850:1, 800:1, 750:1, 700:1, 650:1, 600:1, 550:1, 500:1, 450:1, 400:1, 350:1, 300:1, 250:1, 200:1, 190:1, 180:1, 170:1, 160:1, 150:1, 140:1, 130:1, 120:1, 110:1, 100:1, 95:1, 90:1, 85:1, 80:1, 75:1, 70:1, 69:1, 68:1, 67:1, 66:1, 65:1, 64:1, 63:1, 62:1, 61:1, 60:1, 59:1, 58:1, 57:1, 56:1, 55:1, 54:1, 53:1, 52:1, 51:1, 50:1, 49:1, 48:1, 47:1, 46:1, 45:1, 44:1, 43:1, 42:1, 41:1, 40:1, 39:1, 38:1, 37:1, 36:1, 35:1, 34:1, 33:1, 32:1, 31:1, 30:1, 29:1, 28:1, 27:1, 26:1, 25:1, 24:1, 23:1, 22:1, 21:1, 20:1, 19:1, 18:1, 17:1, 16:1, 15:1, 14:1, 13:1, 12:1, 11:1, 10:1, 9:1, 8:1, 7:1, 6:1, 5:1, 4:1, 3:1, 2:1, 1:1, 0.9:1, 0.8:1, 0.7:1, 0.6:1, 0.5:1, 0.4:1, 0.3:1, 0.2:1, or 0.1:1. In some embodiments, the molar ratio of a nucleic acid encoding the guide polynucleotide and the nucleic acid encoding the base editor fusion protein is at least about 1:10000, 1:9500, 1:9000, 1:8500, 1:8000, 1:7500, 1:7000, 1:6500, 1:6000, 1:5500, 1:5000, 1:4500, 1:4000, 1:3500, 1:3000, 1:2500, 1:2000, 1:1500, 1:1000, 1:950, 1:900, 1:850, 1:800, 1:750, 1:700, 1:650, 1:600, 1:550, 1:500, 1:450, 1:400, 1:350, 1:300, 1:250, 1:200, 1:190, 1:180, 1:170, 1:160, 1:150, 1:140, 1:130, 1:120, 1:110, 1:100, 1:95, 1:90, 1:85, 1:80, 1:75, 1:70, 1:69, 1:68, 1:67, 1:66, 1:65, 1:64, 1:63, 1:62, 1:61, 1:60, 1:59, 1:58, 1:57, 1:56, 1:55, 1:54, 1:53, 1:52, 1:51, 1:50, 1:49, 1:48, 1:47, 1:46, 1:45, 1:44, 1:43, 1:42, 1:41, 1:40, 1:39, 1:38, 1:37, 1:36, 1:35, 1:34, 1:33, 1:32, 1:31, 1:30, 1:29, 1:28, 1:27, 1:26, 1:25, 1:24, 1:23, 1:22, 1:21, 1:20, 1:19, 1:18, 1:17, 1:16, 1:15, 1:14, 1:13, 1:12, 1:11, 1:10, 1:9, 1:8, 1:7, 1:6, 1:5, 1:4, 1:3, 1:2, 1:1, 1:0.9, 1:0.8, 1:0.7, 1:0.6, 1:0.5, 1:0.4, 1:0.3, 1:0.2, or 1:0.1. In some embodiments, the molar ratio of a nucleic acid encoding the guide polynucleotide and the nucleic acid encoding the base editor fusion protein is at most about 10000:1, 9500:1, 9000:1, 8500:1, 8000:1, 7500:1, 7000:1, 6500:1, 6000:1, 5500:1, 5000:1, 4500:1, 4000:1, 3500:1, 3000:1, 2500:1, 2000:1, 1500:1, 1000:1, 950:1, 900:1, 850:1, 800:1, 750:1, 700:1, 650:1, 600:1, 550:1, 500:1, 450:1, 400:1, 350:1, 300:1, 250:1, 200:1, 190:1, 180:1, 170:1, 160:1, 150:1, 140:1, 130:1, 120:1, 110:1, 100:1, 95:1, 90:1, 85:1, 80:1, 75:1, 70:1, 69:1, 68:1, 67:1, 66:1, 65:1, 64:1, 63:1, 62:1, 61:1, 60:1, 59:1, 58:1, 57:1, 56:1, 55:1, 54:1, 53:1, 52:1, 51:1, 50:1, 49:1, 48:1, 47:1, 46:1, 45:1, 44:1, 43:1, 42:1, 41:1, 40:1, 39:1, 38:1, 37:1, 36:1, 35:1, 34:1, 33:1, 32:1, 31:1, 30:1, 29:1, 28:1, 27:1, 26:1, 25:1, 24:1, 23:1, 22:1, 21:1, 20:1, 19:1, 18:1, 17:1, 16:1, 15:1, 14:1, 13:1, 12:1, 11:1, 10:1, 9:1, 8:1, 7:1, 6:1, 5:1, 4:1, 3:1, 2:1, 1:1, 0.9:1, 0.8:1, 0.7:1, 0.6:1, 0.5:1, 0.4:1, 0.3:1, 0.2:1, or 0.1:1. In some embodiments, the molar ratio of a nucleic acid encoding the guide polynucleotide and the nucleic acid encoding the base editor fusion protein is at most about 1:10000, 1:9500, 1:9000, 1:8500, 1:8000, 1:7500, 1:7000, 1:6500, 1:6000, 1:5500, 1:5000, 1:4500, 1:4000, 1:3500, 1:3000, 1:2500, 1:2000, 1:1500, 1:1000, 1:950, 1:900, 1:850, 1:800, 1:750, 1:700, 1:650, 1:600, 1:550, 1:500, 1:450, 1:400, 1:350, 1:300, 1:250, 1:200, 1:190, 1:180, 1:170, 1:160, 1:150, 1:140, 1:130, 1:120, 1:110, 1:100, 1:95, 1:90, 1:85, 1:80, 1:75, 1:70, 1:69, 1:68, 1:67, 1:66, 1:65, 1:64, 1:63, 1:62, 1:61, 1:60, 1:59, 1:58, 1:57, 1:56, 1:55, 1:54, 1:53, 1:52, 1:51, 1:50, 1:49, 1:48, 1:47, 1:46, 1:45, 1:44, 1:43, 1:42, 1:41, 1:40, 1:39, 1:38, 1:37, 1:36, 1:35, 1:34, 1:33, 1:32, 1:31, 1:30, 1:29, 1:28, 1:27, 1:26, 1:25, 1:24, 1:23, 1:22, 1:21, 1:20, 1:19, 1:18, 1:17, 1:16, 1:15, 1:14, 1:13, 1:12, 1:11, 1:10, 1:9, 1:8, 1:7, 1:6, 1:5, 1:4, 1:3, 1:2, 1:1, 1:0.9, 1:0.8, 1:0.7, 1:0.6, 1:0.5, 1:0.4, 1:0.3, 1:0.2, or 1:0.1.

[0490] In some embodiments, the nucleobase alteration results in a reduction of at least 35% in blood PCSK9 protein level in the subject as compared to prior to the administration as measured by ELISA, Western blots, or LC-MS/MS.

[0491] In some embodiments, the nucleobase alteration results in a reduction of at least 30%, 35%, 40%, 45%, 50%, 55%, 60%, 65%, 70%, 75%, 80%, 85%, 90%, 95%, 97%, 98%, or 99% in blood PCSK9 protein level in the subject as compared to prior to the administration as measured by ELISA, Western blots, or LC-MS/MS.

[0492] In some embodiments, the nucleobase alteration results in a reduction of at least 1%, 2%, 3%, 4%, 5%, 6%, 7%, 8%, 9%, 10%, 15%, 20%, 25%, 30%, 31%, 32%, 33%, 34%, 35%, 36%, 37%, 38%, 39%, 40%, 45%, 50%, 55%, 60%, 65%, 70%, 71%, 72%, 73%, 74%, 75%, 76%, 77%, 78%, 79%, 80%, 85%, 90%, 95%, 97%, 98%, 90%, 95%, 97%, 98%, 99%, 99.3%, 99.5%, 99.7%, 99.8%, or 99.9% in blood PCSK9 protein level in the subject as compared to prior to the administration as measured by ELISA, Western blots, or LC-MS/MS. In some embodiments, the nucleobase alteration results in a reduction of at most 1%, 2%, 3%, 4%, 5%, 6%, 7%, 8%, 9%, 10%, 15%, 20%, 25%, 30%, 31%, 32%, 33%, 34%, 35%, 36%, 37%, 38%, 39%, 40%, 45%, 50%, 55%, 60%, 65%, 70%, 71%, 72%, 73%, 74%, 75%, 76%, 77%, 78%, 79%, 80%, 85%, 90%, 95%, 97%, 98%, 90%, 95%, 97%, 98%, 99%, 99.3%, 99.5%, 99.7%, 99.8%, or 99.9% in blood PCSK9 protein level in the subject as compared to prior to the administration as measured by ELISA, Western blots, or LC-MS/MS. In some embodiments, the nucleobase alteration results in a reduction of 1%-99.9%, 2%-99.9%, 3%-99.9%, 4%-99.9%, 5%-99.9%, 6%-99.9%, 7%-99.9%, 8%-99.9%, 9%-99.9%, 10%-99.9%, 15%-99.9%, 20%-99.9%, 25%-99.9%, 30%-99.9%, 31%-99.9%, 32%-99.9%, 33%-99.9%, 34%-99.9%, 35%-99.9%, 36%-99.9%, 37%-99.9%, 38%-99.9%, 39%-99.9%, 40%-99.9%, 45%-99.9%, 50%-99.9%, 55%-99.9%, 60%-99.9%, 65%-99.9%, 70%-99.9%, 75%-99.9%, 80%-99.9%, 85%-99.9%, 90%-99.9%, or 95-99.9% in blood PCSK9 protein level in the subject as compared to prior to the administration as measured by ELISA, Western blots, or LC-MS/MS. In some embodiments, the nucleobase alteration results in a reduction of 1%-99.5%, 1%-99%, 1%-98%, 1%-97%, 1%-96%, 1%-95%, 1%-90%, 1%-85%, 1%-80%, 1%-79%, 1%-78%, 1%-77%, 1%-76%, 1%-75%, 1%-74%, 1%-73%, 1%-72%, 1%-71%, 1%-70%, 1%-65%, 1%-60%, 1%-55%, 1%-50%, 1%-45%, 1%-40%, 1%-39%, 1%-38%, 1%-37%, 1%-36%, 1%-35%, 1%-34%, 1%-33%, 1%-32%, 1%-31%, 1%-30%, 1%-25%, 1%-20%, 1%-15%, 1%-10%, 1%-9%, 1%-8%, 1%-7%, 1%-6%, 1%-5%, 1%-4%, 1%-3%, or 1%-2% in blood PCSK9 protein level in the subject as compared to prior to the administration as measured by ELISA, Western blots, or LC-MS/MS. In some embodiments, the nucleobase alteration results in a reduction of 1%-99.9%, 5%-99.5%, 10%-99%, 15%-97%, 20%-95%, 25%-90%, 30%-85%, 31%-80%, 32%-79%, 33%-78%, 34%-77%, 35%-76%, 36%-76%, 37%-75%, 38%-74%, 39%-73%, 40%-72%, 45%-71%, 50%-70%, or 55%-65% in blood PCSK9 protein level in the subject as compared to prior to the administration as measured by ELISA, Western blots, or LC-MS/MS. In some embodiments, the nucleobase alteration results in a reduction of 100% in blood PCSK9 protein level in the subject as compared to prior to the administration as measured by ELISA, Western blots, or LC-MS/MS.

[0493] In some embodiments, the nucleobase alteration results in at least 1%, 2%, 3%, 4%, 5%, 6%, 7%, 8%, 9%, 10%, 11%, 12%, 13%, 14%, 15%, 20%, 25%, 30%, 35%, 40%, 50%, 75%, 90%, 100%, 110%, 120%, 130%, 140%, 150%, 160%, 170%, 180%, 190%, 200%, 210%, 220%, 230%, 240%, 250%, 260%, 270%, 280%, 290%, 300%, 400% 500%, 600%, 700%, 800%, 900%, 1000% less blood PCSK9 protein level in the subject as compared to prior to the administration as measured by ELISA, Western blots, or LC-MS/MS. In some embodiments, the nucleobase alteration results in at least 1.1-fold, 1.2-fold, 1.3-fold, 1.4-fold, 1.5-fold, 1.6-fold, 1.7-fold, 1.8-fold, 1.9-fold, 2-fold, 2.5-fold, 3-fold, 3.5-fold, 4-fold, 4.5-fold, 5-fold, 6-fold, 7-fold, 8-fold, 9-fold, 10-fold, or more than 10-fold less blood PCSK9 protein level in the subject as compared to prior to the administration as measured by ELISA, Western blots, or LC-MS/MS.

[0494] In some embodiments, the reduction of blood PCSK9 protein level or the blood PCSK9 protein level in the subject as compared to prior to the administration is measured by ELISA (enzyme-linked immunosorbent assay). In some embodiments, the reduction of blood PCSK9 protein level or the blood PCSK9 protein level in the subject as compared to prior to the administration is measured by Western blot analysis. In some embodiments, the reduction of blood PCSK9 protein level or the blood PCSK9 protein level in the subject as compared to prior to the administration is measured by LC-MS/MS (liquid chromatography-tandem mass spectrometry).

[0495] In some embodiments, the nucleobase alteration results in a reduction of at least 35% in blood ANGPTL3 protein level in the subject as compared to prior to the administration as measured by ELISA, Western blots, or LC-MS/MS.

[0496] In some embodiments, the nucleobase alteration results in a reduction of at least 30%, 35%, 40%, 45%, 50%, 55%, 60%, 65%, 70%, 75%, 80%, 85%, 90%, 95%, 97%, 98%, or 99% in blood ANGPTL3 protein level in the subject as compared to prior to the administration as measured by ELISA, Western blots, or LC-MS/MS.

[0497] In some embodiments, the nucleobase alteration results in a reduction of at least 1%, 2%, 3%, 4%, 5%, 6%, 7%, 8%, 9%, 10%, 15%, 20%, 25%, 30%, 31%, 32%, 33%, 34%, 35%, 36%, 37%, 38%, 39%, 40%, 45%, 50%, 55%, 60%, 65%, 70%, 71%, 72%, 73%, 74%, 75%, 76%, 77%, 78%, 79%, 80%, 85%, 90%, 95%, 97%, 98%, 90%, 95%, 97%, 98%, 99%, 99.3%, 99.5%, 99.7%, 99.8%, or 99.9% in blood ANGPTL3 protein level in the subject as compared to prior to the administration as measured by ELISA, Western blots, or LC-MS/MS. In some embodiments, the nucleobase alteration results in a reduction of at most 1%, 2%, 3%, 4%, 5%, 6%, 7%, 8%, 9%, 10%, 15%, 20%, 25%, 30%, 31%, 32%, 33%, 34%, 35%, 36%, 37%, 38%, 39%, 40%, 45%, 50%, 55%, 60%, 65%, 70%, 71%, 72%, 73%, 74%, 75%, 76%, 77%, 78%, 79%, 80%, 85%, 90%, 95%, 97%, 98%, 90%, 95%, 97%, 98%, 99%, 99.3%, 99.5%, 99.7%, 99.8%, or 99.9% in blood ANGPTL3 protein level in the subject as compared to prior to the administration as measured by ELISA, Western blots, or LC-MS/MS. In some embodiments, the nucleobase alteration results in a reduction of 1%-99.9%, 2%-99.9%, 3%-99.9%, 4%-99.9%, 5%-99.9%, 6%-99.9%, 7%-99.9%, 8%-99.9%, 9%-99.9%, 10%-99.9%, 15%-99.9%, 20%-99.9%, 25%-99.9%, 30%-99.9%, 31%-99.9%, 32%-99.9%, 33%-99.9%, 34%-99.9%, 35%-99.9%, 36%-99.9%, 37%-99.9%, 38%-99.9%, 39%-99.9%, 40%-99.9%, 45%-99.9%, 50%-99.9%, 55%-99.9%, 60%-99.9%, 65%-99.9%, 70%-99.9%, 75%-99.9%, 80%-99.9%, 85%-99.9%, 90%-99.9%, or 95-99.9% in blood ANGPTL3 protein level in the subject as compared to prior to the administration as measured by ELISA, Western blots, or LC-MS/MS. In some embodiments, the nucleobase alteration results in a reduction of 1%-99.5%, 1%-99%, 1%-98%, 1%-97%, 1%-96%, 1%-95%, 1%-90%, 1%-85%, 1%-80%, 1%-79%, 1%-78%, 1%-77%, 1%-76%, 1%-75%, 1%-74%, 1%-73%, 1%-72%, 1%-71%, 1%-70%, 1%-65%, 1%-60%, 1%-55%, 1%-50%, 1%-45%, 1%-40%, 1%-39%, 1%-38%, 1%-37%, 1%-36%, 1%-35%, 1%-34%, 1%-33%, 1%-32%, 1%-31%, 1%-30%, 1%-25%, 1%-20%, 1%-15%, 1%-10%, 1%-9%, 1%-8%, 1%-7%, 1%-6%, 1%-5%, 1%-4%, 1%-3%, or 1%-2% in blood ANGPTL3 protein level in the subject as compared to prior to the administration as measured by ELISA, Western blots, or LC-MS/MS. In some embodiments, the nucleobase alteration results in a reduction of 1%-99.9%, 5%-99.5%, 10%-99%, 15%-97%, 20%-95%, 25%-90%, 30%-85%, 31%-80%, 32%-79%, 33%-78%, 34%-77%, 35%-76%, 36%-76%, 37%-75%, 38%-74%, 39%-73%, 40%-72%, 45%-71%, 50%-70%, or 55%-65% in blood ANGPTL3 protein level in the subject as compared to prior to the administration as measured by ELISA, Western blots, or LC-MS/MS. In some embodiments, the nucleobase alteration results in a reduction of 100% in blood ANGPTL3 protein level in the subject as compared to prior to the administration as measured by ELISA, Western blots, or LC-MS/MS.

[0498] In some embodiments, the nucleobase alteration results in at least 1%, 2%, 3%, 4%, 5%, 6%, 7%, 8%, 9%, 10%, 11%, 12%, 13%, 14%, 15%, 20%, 25%, 30%, 35%, 40%, 50%, 75%, 90%, 100%, 110%, 120%, 130%, 140%, 150%, 160%, 170%, 180%, 190%, 200%, 210%, 220%, 230%, 240%, 250%, 260%, 270%, 280%, 290%, 300%, 400% 500%, 600%, 700%, 800%, 900%, 1000% less blood ANGPTL3 protein level in the subject as compared to prior to the administration as measured by ELISA, Western blots, or LC-MS/MS. In some embodiments, the nucleobase alteration results in at least 1.1-fold, 1.2-fold, 1.3-fold, 1.4-fold, 1.5-fold, 1.6-fold, 1.7-fold, 1.8-fold, 1.9-fold, 2-fold, 2.5-fold, 3-fold, 3.5-fold, 4-fold, 4.5-fold, 5-fold, 6-fold, 7-fold, 8-fold, 9-fold, 10-fold, or more than 10-fold less blood ANGPTL3 protein level in the subject as compared to prior to the administration as measured by ELISA, Western blots, or LC-MS/MS.

[0499] In some embodiments, the reduction of blood ANGPTL3 protein level or the blood ANGPTL3 protein level in the subject as compared to prior to the administration is measured by ELISA (enzyme-linked immunosorbent assay). In some embodiments, the reduction of blood ANGPTL3 protein level or the blood ANGPTL3 protein level in the subject as compared to prior to the administration is measured by Western blot analysis. In some embodiments, the reduction of blood ANGPTL3 protein level or the blood ANGPTL3 protein level in the subject as compared to prior to the administration is measured by LC-MS/MS (liquid chromatography-tandem mass spectrometry).

[0500] In some embodiments, the nucleobase alteration results in a reduction of at least 35% in blood low-density lipoprotein cholesterol (LDL-C) level in the subject as compared to prior to the administration.

[0501] In some embodiments, the nucleobase alteration results in a reduction of at least 30%, 35%, 40%, 45%, 46%, 47%, 48%, 49%, 50%, 51%, 52%, 53%, 54%, 55%, 56%, 57%, 58%, 59%, 60%, 61%, 62%, 63%, 64%, 65%, 70%, 75%, 80%, 85%, 90%, 95%, 97%, 98%, or 99% in blood low-density lipoprotein cholesterol (LDL-C) level in the subject as compared to prior to the administration. In some embodiments, the nucleobase alteration results in a reduction of at least 1%, 2%, 3%, 4%, 5%, 6%, 7%, 8%, 9%, 10%, 15%, 20%, 25%, 30%, 35%, 40%, 45%, 46%, 47%, 48%, 49%, 50%, 51%, 52%, 53%, 54%, 55%, 56%, 57%, 58%, 59%, 60%, 61%, 62%, 63%, 64%, 65%, 70%, 75%, 80%, 85%, 90%, 95%, 97%, 98%, 99%, 99.3%, 99.5%, 99.7%, 99.8%, or 99.9% in blood low-density lipoprotein cholesterol (LDL-C) level in the subject as compared to prior to the administration. In some embodiments, the nucleobase alteration results in a reduction of at most 1%, 2%, 3%, 4%, 5%, 6%, 7%, 8%, 9%, 10%, 15%, 20%, 25%, 30%, 35%, 40%, 45%, 50%, 55%, 60%, 65%, 70%, 75%, 80%, 85%, 90%, 95%, 97%, 98%, 99%, 99.3%, 99.5%, 99.7%, 99.8%, or 99.9% in blood low-density lipoprotein cholesterol (LDL-C) level in the subject as compared to prior to the administration. In some embodiments, the nucleobase alteration results in a reduction of 1%-99.9%, 2%-99.9%, 3%-99.9%, 4%-99.9%, 5%-99.9%, 6%-99.9%, 7%-99.9%, 8%-99.9%, 9%-99.9%, 10%-99.9%, 15%-99.9%, 20%-99.9%, 25%-99.9%, 30%-99.9%, 35%-99.9%, 40%-99.9%, 45%-99.9%, 50%-99.9%, 55%-99.9%, 60%-99.9%, 65%-99.9%, 70%-99.9%, 75%-99.9%, 80%-99.9%, 85%-99.9%, 90%-99.9%, or 95-99.9% in blood low-density lipoprotein cholesterol (LDL-C) level in the subject as compared to prior to the administration. In some embodiments, the nucleobase alteration results in a reduction of 1%-99.5%, 1%-99%, 1%-98%, 1%-97%, 1%-96%, 1%-95%, 1%-90%, 1%-85%, 1%-80%, 1%-75%, 1%-70%, 1%-65%, 1%-60%, 1%-55%, 1%-50%, 1%-45%, 1%-40%, 1%-35%, 1%-30%, 1%-25%, 1%-20%, 1%-15%, 1%-10%, 1%-9%, 1%-8%, 1%-7%, 1%-6%, 1%-5%, 1%-4%, 1%-3%, or 1%-2% in blood low-density lipoprotein cholesterol (LDL-C) level in the subject as compared to prior to the administration. In some embodiments, the nucleobase alteration results in a reduction of 1%-99.9%, 5%-99.5%, 10%-99%, 15%-97%, 20%-95%, 25%-90%, 30%-85%, 35%-80%, 40%-75%, 45%-70%, 50%-65%, or 55%-60% in blood low-density lipoprotein cholesterol (LDL-C) level in the subject as compared to prior to the administration. In some embodiments, the nucleobase alteration results in a reduction of 100% in blood low-density lipoprotein cholesterol (LDL-C) level in the subject as compared to prior to the administration. In some embodiments, the nucleobase alteration results in at least 1%, 2%, 3%, 4%, 5%, 6%, 7%, 8%, 9%, 10%, 11%, 12%, 13%, 14%, 15%, 20%, 25%, 30%, 35%, 40%, 50%, 75%, 90%, 100%, 110%, 120%, 130%, 140%, 150%, 160%, 170%, 180%, 190%, 200%, 210%, 220%, 230%, 240%, 250%, 260%, 270%, 280%, 290%, 300%, 400% 500%, 600%, 700%, 800%, 900%, 1000% less blood low-density lipoprotein cholesterol (LDL-C) level in the subject as compared to prior to the administration. In some embodiments, the nucleobase alteration results in at least 1.1-fold, 1.2-fold, 1.3-fold, 1.4-fold, 1.5-fold, 1.6-fold, 1.7-fold, 1.8-fold, 1.9-fold, 2-fold, 2.5-fold, 3-fold, 3.5-fold, 4-fold, 4.5-fold, 5-fold, 6-fold, 7-fold, 8-fold, 9-fold, 10-fold, or more than 10-fold less blood low-density lipoprotein cholesterol (LDL-C) level in the subject as compared to prior to the administration.

[0502] In some embodiments, the nucleobase alteration results in a reduction of at least 35% in blood triglyceride level in the subject as compared to prior to the administration.

[0503] In some embodiments, the nucleobase alteration results in a reduction of at least 30%, 35%, 40%, 45%, 46%, 47%, 48%, 49%, 50%, 51%, 52%, 53%, 54%, 55%, 56%, 57%, 58%, 59%, 60%, 61%, 62%, 63%, 64%, 65%, 70%, 75%, 80%, 85%, 90%, 95%, 97%, 98%, or 99% in blood triglyceride level in the subject as compared to prior to the administration. In some embodiments, the nucleobase alteration results in a reduction of at least 1%, 2%, 3%, 4%, 5%, 6%, 7%, 8%, 9%, 10%, 15%, 20%, 25%, 30%, 35%, 40%, 45%, 46%, 47%, 48%, 49%, 50%, 51%, 52%, 53%, 54%, 55%, 56%, 57%, 58%, 59%, 60%, 61%, 62%, 63%, 64%, 65%, 70%, 75%, 80%, 85%, 90%, 95%, 97%, 98%, 99%, 99.3%, 99.5%, 99.7%, 99.8%, or 99.9% in blood triglyceride level in the subject as compared to prior to the administration. In some embodiments, the nucleobase alteration results in a reduction of at most 1%, 2%, 3%, 4%, 5%, 6%, 7%, 8%, 9%, 10%, 15%, 20%, 25%, 30%, 35%, 40%, 45%, 50%, 55%, 60%, 65%, 70%, 75%, 80%, 85%, 90%, 95%, 97%, 98%, 99%, 99.3%, 99.5%, 99.7%, 99.8%, or 99.9% in blood triglyceride level in the subject as compared to prior to the administration. In some embodiments, the nucleobase alteration results in a reduction of 1%-99.9%, 2%-99.9%, 3%-99.9%, 4%-99.9%, 5%-99.9%, 6%-99.9%, 7%-99.9%, 8%-99.9%, 9%-99.9%, 10%-99.9%, 15%-99.9%, 20%-99.9%, 25%-99.9%, 30%-99.9%, 35%-99.9%, 40%-99.9%, 45%-99.9%, 50%-99.9%, 55%-99.9%, 60%-99.9%, 65%-99.9%, 70%-99.9%, 75%-99.9%, 80%-99.9%, 85%-99.9%, 90%-99.9%, or 95-99.9% in blood triglyceride level in the subject as compared to prior to the administration. In some embodiments, the nucleobase alteration results in a reduction of 1%-99.5%, 1%-99%, 1%-98%, 1%-97%, 1%-96%, 1%-95%, 1%-90%, 1%-85%, 1%-80%, 1%-75%, 1%-70%, 1%-65%, 1%-60%, 1%-55%, 1%-50%, 1%-45%, 1%-40%, 1%-35%, 1%-30%, 1%-25%, 1%-20%, 1%-15%, 1%-10%, 1%-9%, 1%-8%, 1%-7%, 1%-6%, 1%-5%, 1%-4%, 1%-3%, or 1%-2% in blood triglyceride level in the subject as compared to prior to the administration. In some embodiments, the nucleobase alteration results in a reduction of 1%-99.9%, 5%-99.5%, 10%-99%, 15%-97%, 20%-95%, 25%-90%, 30%-85%, 35%-80%, 40%-75%, 45%-70%, 50%-65%, or 55%-60% in blood triglyceride level in the subject as compared to prior to the administration. In some embodiments, the nucleobase alteration results in a reduction of 100% in blood triglyceride level in the subject as compared to prior to the administration. In some embodiments, the nucleobase alteration results in at least 1%, 2%, 3%, 4%, 5%, 6%, 7%, 8%, 9%, 10%, 11%, 12%, 13%, 14%, 15%, 20%, 25%, 30%, 35%, 40%, 50%, 75%, 90%, 100%, 110%, 120%, 130%, 140%, 150%, 160%, 170%, 180%, 190%, 200%, 210%, 220%, 230%, 240%, 250%, 260%, 270%, 280%, 290%, 300%, 400% 500%, 600%, 700%, 800%, 900%, 1000% less blood triglyceride level in the subject as compared to prior to the administration. In some embodiments, the nucleobase alteration results in at least 1.1-fold, 1.2-fold, 1.3-fold, 1.4-fold, 1.5-fold, 1.6-fold, 1.7-fold, 1.8-fold, 1.9-fold, 2-fold, 2.5-fold, 3-fold, 3.5-fold, 4-fold, 4.5-fold, 5-fold, 6-fold, 7-fold, 8-fold, 9-fold, 10-fold, or more than 10-fold less blood triglyceride level in the subject as compared to prior to the administration.

[0504] In some embodiments, the blood triglyceride level or the reduction of blood triglyceride level in the subject as compared to prior to the administration is measured by any standard technique. In some embodiments, the blood low-density lipoprotein cholesterol (LDL-C) level or the reduction of blood low-density lipoprotein cholesterol (LDL-C) level in the subject as compared to prior to the administration is measured by any standard technique. For example, a clinical analyzer instrument may be used to measure a ‘lipid panel’ in serum samples which entails the direct measurement of cholesterol (total C), triglycerides (TG) and high-density lipoprotein cholesterol (HDL-C) enzymatically. Reagent kits specific for each analyte contain buffers, calibrators, blanks and controls. As used in the present disclosure, cholesterol, triglycerides and HDL-C may be quantified using absorbance measurements of specific enzymatic reaction products. LDL-C may be determined indirectly. In some instances, most of circulating cholesterol can be found in three major lipoprotein fractions: very low-density lipoproteins (VLDL), LDL and HDL. In some embodiments, total circulating cholesterol may be estimated with the formula [Total C]=[VLDL-C]+[LDL-C]+[HDL-C]. Thus the LDL-C can be calculated from measured values of total cholesterol, triglycerides and HDL-C according to the relationship: [LDL-C]=[total C]−[HDL-C]−[TG]/5, where [TG]/5 is an estimate of VLDL-cholesterol. A reagent kit specific for triglycerides containing buffers, calibrators, blanks and controls. As used herein, serum samples from the study may be analyzed and triglycerides may be measured using a series of coupled enzymatic reactions. In some embodiments, H₂O₂ may be used to quantify the analyte.as the end product of the last one and its absorbance at 500 nm, and the color intensity is proportional to triglyceride concentrations.

[0505] In some embodiments, the guide polynucleotide is a guide RNA. In some embodiments, the guide RNA comprises a spacer sequence that binds to the complementary strand of a protospacer sequence of the ANGPTL3 gene with 0, 1, or 2 mismatches. In some embodiments, the guide RNA comprises a spacer sequence that binds to the complementary strand of a protospacer sequence of the ANGPTL3 gene with no mismatches. In some embodiments, the guide RNA comprises a spacer sequence that binds to the complementary strand of a protospacer sequence of the ANGPTL3 gene with 1 mismatch. In some embodiments, the guide RNA comprises a spacer sequence that binds to the complementary strand of a protospacer sequence of the ANGPTL3 gene with 2 mismatches. In some embodiments, the guide RNA comprises a spacer sequence that binds to the complementary strand of a protospacer sequence of the ANGPTL3 gene with 3 mismatches. In some embodiments, the guide RNA comprises a spacer sequence that binds to the complementary strand of a protospacer sequence of the ANGPTL3 gene with 4 mismatches. In some embodiments, the guide RNA comprises a spacer sequence that binds to the complementary strand of a protospacer sequence of the ANGPTL3 gene with 5 mismatches.

[0506] In some embodiments, the guide polynucleotide is a guide RNA. In some embodiments, the guide RNA comprises a spacer sequence that binds to the complementary strand of a protospacer sequence of the PCSK9 gene with 0, 1, or 2 mismatches. In some embodiments, the guide RNA comprises a spacer sequence that binds to the complementary strand of a protospacer sequence of the PCSK9 gene with no mismatches. In some embodiments, the guide RNA comprises a spacer sequence that binds to the complementary strand of a protospacer sequence of the PCSK9 gene with 1 mismatch. In some embodiments, the guide RNA comprises a spacer sequence that binds to the complementary strand of a protospacer sequence of the PCSK9 gene with 2 mismatches. In some embodiments, the guide RNA comprises a spacer sequence that binds to the complementary strand of a protospacer sequence of the PCSK9 gene with 3 mismatches. In some embodiments, the guide RNA comprises a spacer sequence that binds to the complementary strand of a protospacer sequence of the PCSK9 gene with 4 mismatches. In some embodiments, the guide RNA comprises a spacer sequence that binds to the complementary strand of a protospacer sequence of the PCSK9 gene with 5 mismatches.

[0507] In some embodiments, the nucleobase alteration is outside of the protospacer sequence in less than 1% of whole liver cells in the subject as measured by net nucleobase editing. In some embodiments, the nucleobase alteration is outside of the protospacer sequence in less than 1% of hepatocytes in the subject as measured by net nucleobase editing. In some embodiments, the nucleobase alteration is only within the protospacer sequence as measured by net nucleobase editing.

[0508] In some embodiments, the nucleobase alteration is outside of the protospacer sequence in less than 0.01%. 0.02%, 0.03% 0.04%, 0.05%, 0.06%, 0.07%, 0.08%, 0.09%, 0.1%, 0.2%, 0.3%, 0.4%, 0.5%, 0.6%, 0.7%, 0.8%, 0.9%, 1.0%, 2.0%, 3.0% 4.0%, 5.0%, 6.0%, 7.0%, 8.0%, 9.0%, 10%, 15%, 20%, 25%, 30%, 35%, 40%, 45%, 50%, 55%, 60%, 65%, 70%, 65%, 80%, 85%, 90% of whole liver cells in the subject as measured by net nucleobase editing. In some embodiments, the nucleobase alteration is outside of the protospacer sequence in less than 0.01%. 0.02%, 0.03% 0.04%, 0.05%, 0.06%, 0.07%, 0.08%, 0.09%, 0.1%, 0.2%, 0.3%, 0.4%, 0.5%, 0.6%, 0.7%, 0.8%, 0.9%, 1.0%, 2.0%, 3.0% 4.0%, 5.0%, 6.0%, 7.0%, 8.0%, 9.0%, 10%, 15%, 20%, 25%, 30%, 35%, 40%, 45%, 50%, 55%, 60%, 65%, 70%, 65%, 80%, 85%, 90% of hepatocytes in the subject as measured by net nucleobase editing. In some embodiments, the nucleobase alteration is outside of the protospacer sequence in less than 0.01%. 0.02%, 0.03% 0.04%, 0.05%, 0.06%, 0.07%, 0.08%, 0.09%, 0.1%, 0.2%, 0.3%, 0.4%, 0.5%, 0.6%, 0.7%, 0.8%, 0.9%, 1.0%, 2.0%, 3.0% 4.0%, 5.0%, 6.0%, 7.0%, 8.0%, 9.0%, 10%, 15%, 20%, 25%, 30%, 35%, 40%, 45%, 50%, 55%, 60%, 65%, 70%, 65%, 80%, 85%, 90% of cells in the subject as measured by net nucleobase editing.

[0509] In some embodiments, the administration is via intravenous infusion. In some embodiments, the method for treating or preventing a condition in a subject in need thereof as described herein comprises sequential administration of the LNP enclosing (i) a guide polynucleotide or a nucleic acid encoding the guide polynucleotide and the second LNP enclosing (ii) a base editor fusion protein comprising a programmable DNA binding domain and a deaminase, or a nucleic acid encoding same. In some embodiments, the method for treating or preventing a condition in a subject in need thereof as described herein comprises concurrent administration of the LNP enclosing (i) a guide polynucleotide or a nucleic acid encoding the guide polynucleotide and the second LNP enclosing (ii) a base editor fusion protein comprising a programmable DNA binding domain and a deaminase, or a nucleic acid encoding same. In some embodiments, the method for treating or preventing a condition in a subject in need thereof as described herein comprises administering a single dose of the LNP enclosing (ii) a base editor fusion protein comprising a programmable DNA binding domain and a deaminase, or a nucleic acid encoding same followed by staggered doses of the LNP enclosing (i) a guide polynucleotide or a nucleic acid encoding the guide polynucleotide over an interval of 1, 2, 3, 4, 5, 6, or 7 days.

[0510] In some embodiments, the method for treating or preventing a condition in a subject in need thereof as described herein comprises administering a single dose of the LNP enclosing (ii) a base editor fusion protein comprising a programmable DNA binding domain and a deaminase, or a nucleic acid encoding same followed by staggered doses of the LNP enclosing (i) a guide polynucleotide or a nucleic acid encoding the guide polynucleotide over an interval of 1, 2, 3, 4, 5, 6, 7, 8, 9, 10, 11, 12, 13, 14, 15, 16, 17, 18, 19, 20, 21, 22, 23, 24, 25, 26, 27, 28, 29, or 30 hours. In some embodiments, the method for treating or preventing a condition in a subject in need thereof as described herein comprises administering a single dose of the LNP enclosing (ii) a base editor fusion protein comprising a programmable DNA binding domain and a deaminase, or a nucleic acid encoding same followed by staggered doses of the LNP enclosing (i) a guide polynucleotide or a nucleic acid encoding the guide polynucleotide over an interval of 1, 2, 3, 4, 5, 6, 7, 8, 9, 10, 11, 12, 13, 14, 15, 16, 17, 18, 19, 20, 21, 22, 23, 24, 25, 26, 27, 28, 29, or 30 days. In some embodiments, the method for treating or preventing a condition in a subject in need thereof as described herein comprises administering a single dose of the LNP enclosing (ii) a base editor fusion protein comprising a programmable DNA binding domain and a deaminase, or a nucleic acid encoding same followed by staggered doses of the LNP enclosing (i) a guide polynucleotide or a nucleic acid encoding the guide polynucleotide over an interval of 1, 2, 3, 4, 5, 6, 7, 8, 9, 10, 11, 12, 13, 14, 15, 16, 17, 18, 19, 20, 21, 22, 23, 24, 25, 26, 27, 28, 29, 30, 31, 32, 33, 34, 35, or 36 months.

[0511] The method as described herein may be used for treating or preventing a condition in a subject in need thereof. In some embodiments, the method comprises administering a single dose of a LNP enclosing (i) a guide polynucleotide, e.g., a guide RNA, or a nucleic acid encoding the guide polynucleotide and (ii) a base editor fusion protein or a nucleic acid encoding the base editor fusion protein, e.g., an mRNA encoding the base editor fusion protein. For example, the method may comprise administering an LNP enclosing (i) a guide RNA and (i) an mRNA encoding the base editor fusion protein. The LNP may be administered at a single dose or multiple doses. In other embodiments, the method comprises administering a LNP enclosing (i) a guide polynucleotide or a nucleic acid encoding the guide polynucleotide, and a second LNP enclosing (ii) the base editor fusion protein or a nucleic acid encoding the base editor fusion protein. The LNP may be administered at a single dose or multiple doses.

[0512] In some embodiments, the method for treating or preventing a condition in a subject in need thereof as described herein comprises administering a single dose of the LNP enclosing (i) a guide polynucleotide or a nucleic acid encoding same and administering multiple doses of the LNP enclosing (ii) a base editor fusion protein comprising a programmable DNA binding domain and a deaminase, or a nucleic acid encoding same after 1 day, and the multiple doses are given at 1 day intervals. In some embodiments, the method for treating or preventing a condition in a subject in need thereof as described herein comprises administering a single dose of the LNP enclosing (i) a guide polynucleotide or a nucleic acid encoding same and administering multiple doses of the LNP enclosing (ii) a base editor fusion protein comprising a programmable DNA binding domain and a deaminase, or a nucleic acid encoding same after 1 day, and the multiple doses are given at 2 day intervals. In some embodiments, the method for treating or preventing a condition in a subject in need thereof as described herein comprises administering a single dose of the LNP enclosing (i) a guide polynucleotide or a nucleic acid encoding same and administering multiple doses of the LNP enclosing (ii) a base editor fusion protein comprising a programmable DNA binding domain and a deaminase, or a nucleic acid encoding same after 1 day, and the multiple doses are given at 3 day intervals. In some embodiments, the method for treating or preventing a condition in a subject in need thereof as described herein comprises administering a single dose of the LNP enclosing (i) a guide polynucleotide or a nucleic acid encoding same and administering multiple doses of the LNP enclosing (ii) a base editor fusion protein comprising a programmable DNA binding domain and a deaminase, or a nucleic acid encoding same after 1 day, and the multiple doses are given at 4 day intervals. In some embodiments, the method for treating or preventing a condition in a subject in need thereof as described herein comprises administering a single dose of the LNP enclosing (i) a guide polynucleotide or a nucleic acid encoding same and administering multiple doses of the LNP enclosing (ii) a base editor fusion protein comprising a programmable DNA binding domain and a deaminase, or a nucleic acid encoding same after 1 day, and the multiple doses are given at 5 day intervals. In some embodiments, the method for treating or preventing a condition in a subject in need thereof as described herein comprises administering a single dose of the LNP enclosing (i) a guide polynucleotide or a nucleic acid encoding same and administering multiple doses of the LNP enclosing (ii) a base editor fusion protein comprising a programmable DNA binding domain and a deaminase, or a nucleic acid encoding same after 1 day, and the multiple doses are given at 6 day intervals. In some embodiments, the method for treating or preventing a condition in a subject in need thereof as described herein comprises administering a single dose of the LNP enclosing (i) a guide polynucleotide or a nucleic acid encoding same and administering multiple doses of the LNP enclosing (ii) a base editor fusion protein comprising a programmable DNA binding domain and a deaminase, or a nucleic acid encoding same after 1 day, and the multiple doses are given at 7 day intervals.

[0513] In some embodiments, the method for treating or preventing a condition in a subject in need thereof as described herein comprises administering a single dose of the LNP enclosing (i) a guide polynucleotide or a nucleic acid encoding same and administering multiple doses of the LNP enclosing (ii) a base editor fusion protein comprising a programmable DNA binding domain and a deaminase, or a nucleic acid encoding same after 2 days, and the multiple doses are given at 1 day intervals. In some embodiments, the method for treating or preventing a condition in a subject in need thereof as described herein comprises administering a single dose of the LNP enclosing (i) a guide polynucleotide or a nucleic acid encoding same and administering multiple doses of the LNP enclosing (ii) a base editor fusion protein comprising a programmable DNA binding domain and a deaminase, or a nucleic acid encoding same after 2 days, and the multiple doses are given at 2 day intervals. In some embodiments, the method for treating or preventing a condition in a subject in need thereof as described herein comprises administering a single dose of the LNP enclosing (i) a guide polynucleotide or a nucleic acid encoding same and administering multiple doses of the LNP enclosing (ii) a base editor fusion protein comprising a programmable DNA binding domain and a deaminase, or a nucleic acid encoding same after 2 days, and the multiple doses are given at 3 day intervals. In some embodiments, the method for treating or preventing a condition in a subject in need thereof as described herein comprises administering a single dose of the LNP enclosing (i) a guide polynucleotide or a nucleic acid encoding same and administering multiple doses of the LNP enclosing (ii) a base editor fusion protein comprising a programmable DNA binding domain and a deaminase, or a nucleic acid encoding same after 2 days, and the multiple doses are given at 4 day intervals. In some embodiments, the method for treating or preventing a condition in a subject in need thereof as described herein comprises administering a single dose of the LNP enclosing (i) a guide polynucleotide or a nucleic acid encoding same and administering multiple doses of the LNP enclosing (ii) a base editor fusion protein comprising a programmable DNA binding domain and a deaminase, or a nucleic acid encoding same after 2 days, and the multiple doses are given at 5 day intervals. In some embodiments, the method for treating or preventing a condition in a subject in need thereof as described herein comprises administering a single dose of the LNP enclosing (i) a guide polynucleotide or a nucleic acid encoding same and administering multiple doses of the LNP enclosing (ii) a base editor fusion protein comprising a programmable DNA binding domain and a deaminase, or a nucleic acid encoding same after 2 days, and the multiple doses are given at 6 day intervals. In some embodiments, the method for treating or preventing a condition in a subject in need thereof as described herein comprises administering a single dose of the LNP enclosing (i) a guide polynucleotide or a nucleic acid encoding same and administering multiple doses of the LNP enclosing (ii) a base editor fusion protein comprising a programmable DNA binding domain and a deaminase, or a nucleic acid encoding same after 2 days, and the multiple doses are given at 7 day intervals.

[0514] In some embodiments, the method for treating or preventing a condition in a subject in need thereof as described herein comprises administering a single dose of the LNP enclosing (i) a guide polynucleotide or a nucleic acid encoding same and administering multiple doses of the LNP enclosing (ii) a base editor fusion protein comprising a programmable DNA binding domain and a deaminase, or a nucleic acid encoding same after 3 days, and the multiple doses are given at 1 day intervals. In some embodiments, the method for treating or preventing a condition in a subject in need thereof as described herein comprises administering a single dose of the LNP enclosing (i) a guide polynucleotide or a nucleic acid encoding same and administering multiple doses of the LNP enclosing (ii) a base editor fusion protein comprising a programmable DNA binding domain and a deaminase, or a nucleic acid encoding same after 3 days, and the multiple doses are given at 2 day intervals. In some embodiments, the method for treating or preventing a condition in a subject in need thereof as described herein comprises administering a single dose of the LNP enclosing (i) a guide polynucleotide or a nucleic acid encoding same and administering multiple doses of the LNP enclosing (ii) a base editor fusion protein comprising a programmable DNA binding domain and a deaminase, or a nucleic acid encoding same after 3 days, and the multiple doses are given at 3 day intervals. In some embodiments, the method for treating or preventing a condition in a subject in need thereof as described herein comprises administering a single dose of the LNP enclosing (i) a guide polynucleotide or a nucleic acid encoding same and administering multiple doses of the LNP enclosing (ii) a base editor fusion protein comprising a programmable DNA binding domain and a deaminase, or a nucleic acid encoding same after 3 days, and the multiple doses are given at 4 day intervals. In some embodiments, the method for treating or preventing a condition in a subject in need thereof as described herein comprises administering a single dose of the LNP enclosing (i) a guide polynucleotide or a nucleic acid encoding same and administering multiple doses of the LNP enclosing (ii) a base editor fusion protein comprising a programmable DNA binding domain and a deaminase, or a nucleic acid encoding same after 3 days, and the multiple doses are given at 5 day intervals. In some embodiments, the method for treating or preventing a condition in a subject in need thereof as described herein comprises administering a single dose of the LNP enclosing (i) a guide polynucleotide or a nucleic acid encoding same and administering multiple doses of the LNP enclosing (ii) a base editor fusion protein comprising a programmable DNA binding domain and a deaminase, or a nucleic acid encoding same after 3 days, and the multiple doses are given at 6 day intervals. In some embodiments, the method for treating or preventing a condition in a subject in need thereof as described herein comprises administering a single dose of the LNP enclosing (i) a guide polynucleotide or a nucleic acid encoding same and administering multiple doses of the LNP enclosing (ii) a base editor fusion protein comprising a programmable DNA binding domain and a deaminase, or a nucleic acid encoding same after 3 days, and the multiple doses are given at 7 day intervals.

[0515] In some embodiments, the method for treating or preventing a condition in a subject in need thereof as described herein comprises administering a single dose of the LNP enclosing (i) a guide polynucleotide or a nucleic acid encoding same and administering multiple doses of the LNP enclosing (ii) a base editor fusion protein comprising a programmable DNA binding domain and a deaminase, or a nucleic acid encoding same after 4 days, and the multiple doses are given at 1 day intervals. In some embodiments, the method for treating or preventing a condition in a subject in need thereof as described herein comprises administering a single dose of the LNP enclosing (i) a guide polynucleotide or a nucleic acid encoding same and administering multiple doses of the LNP enclosing (ii) a base editor fusion protein comprising a programmable DNA binding domain and a deaminase, or a nucleic acid encoding same after 4 days, and the multiple doses are given at 2 day intervals. In some embodiments, the method for treating or preventing a condition in a subject in need thereof as described herein comprises administering a single dose of the LNP enclosing (i) a guide polynucleotide or a nucleic acid encoding same and administering multiple doses of the LNP enclosing (ii) a base editor fusion protein comprising a programmable DNA binding domain and a deaminase, or a nucleic acid encoding same after 4 days, and the multiple doses are given at 3 day intervals. In some embodiments, the method for treating or preventing a condition in a subject in need thereof as described herein comprises administering a single dose of the LNP enclosing (i) a guide polynucleotide or a nucleic acid encoding same and administering multiple doses of the LNP enclosing (ii) a base editor fusion protein comprising a programmable DNA binding domain and a deaminase, or a nucleic acid encoding same after 4 days, and the multiple doses are given at 4 day intervals. In some embodiments, the method for treating or preventing a condition in a subject in need thereof as described herein comprises administering a single dose of the LNP enclosing (i) a guide polynucleotide or a nucleic acid encoding same and administering multiple doses of the LNP enclosing (ii) a base editor fusion protein comprising a programmable DNA binding domain and a deaminase, or a nucleic acid encoding same after 4 days, and the multiple doses are given at 5 day intervals. In some embodiments, the method for treating or preventing a condition in a subject in need thereof as described herein comprises administering a single dose of the LNP enclosing (i) a guide polynucleotide or a nucleic acid encoding same and administering multiple doses of the LNP enclosing (ii) a base editor fusion protein comprising a programmable DNA binding domain and a deaminase, or a nucleic acid encoding same after 4 days, and the multiple doses are given at 6 day intervals. In some embodiments, the method for treating or preventing a condition in a subject in need thereof as described herein comprises administering a single dose of the LNP enclosing (i) a guide polynucleotide or a nucleic acid encoding same and administering multiple doses of the LNP enclosing (ii) a base editor fusion protein comprising a programmable DNA binding domain and a deaminase, or a nucleic acid encoding same after 4 days, and the multiple doses are given at 7 day intervals.

[0516] In some embodiments, the method for treating or preventing a condition in a subject in need thereof as described herein comprises administering a single dose of the LNP enclosing (i) a guide polynucleotide or a nucleic acid encoding same and administering multiple doses of the LNP enclosing (ii) a base editor fusion protein comprising a programmable DNA binding domain and a deaminase, or a nucleic acid encoding same after 5 days, and the multiple doses are given at 1 day intervals. In some embodiments, the method for treating or preventing a condition in a subject in need thereof as described herein comprises administering a single dose of the LNP enclosing (i) a guide polynucleotide or a nucleic acid encoding same and administering multiple doses of the LNP enclosing (ii) a base editor fusion protein comprising a programmable DNA binding domain and a deaminase, or a nucleic acid encoding same after 5 days, and the multiple doses are given at 2 day intervals. In some embodiments, the method for treating or preventing a condition in a subject in need thereof as described herein comprises administering a single dose of the LNP enclosing (i) a guide polynucleotide or a nucleic acid encoding same and administering multiple doses of the LNP enclosing (ii) a base editor fusion protein comprising a programmable DNA binding domain and a deaminase, or a nucleic acid encoding same after 5 days, and the multiple doses are given at 3 day intervals. In some embodiments, the method for treating or preventing a condition in a subject in need thereof as described herein comprises administering a single dose of the LNP enclosing (i) a guide polynucleotide or a nucleic acid encoding same and administering multiple doses of the LNP enclosing (ii) a base editor fusion protein comprising a programmable DNA binding domain and a deaminase, or a nucleic acid encoding same after 5 days, and the multiple doses are given at 4 day intervals. In some embodiments, the method for treating or preventing a condition in a subject in need thereof as described herein comprises administering a single dose of the LNP enclosing (i) a guide polynucleotide or a nucleic acid encoding same and administering multiple doses of the LNP enclosing (ii) a base editor fusion protein comprising a programmable DNA binding domain and a deaminase, or a nucleic acid encoding same after 5 days, and the multiple doses are given at 5 day intervals. In some embodiments, the method for treating or preventing a condition in a subject in need thereof as described herein comprises administering a single dose of the LNP enclosing (i) a guide polynucleotide or a nucleic acid encoding same and administering multiple doses of the LNP enclosing (ii) a base editor fusion protein comprising a programmable DNA binding domain and a deaminase, or a nucleic acid encoding same after 5 days, and the multiple doses are given at 6 day intervals. In some embodiments, the method for treating or preventing a condition in a subject in need thereof as described herein comprises administering a single dose of the LNP enclosing (i) a guide polynucleotide or a nucleic acid encoding same and administering multiple doses of the LNP enclosing (ii) a base editor fusion protein comprising a programmable DNA binding domain and a deaminase, or a nucleic acid encoding same after 5 days, and the multiple doses are given at 7 day intervals.

[0517] In some embodiments, the method for treating or preventing a condition in a subject in need thereof as described herein comprises administering a single dose of the LNP enclosing (i) a guide polynucleotide or a nucleic acid encoding same and administering multiple doses of the LNP enclosing (ii) a base editor fusion protein comprising a programmable DNA binding domain and a deaminase, or a nucleic acid encoding same after 6 days, and the multiple doses are given at 1 day intervals. In some embodiments, the method for treating or preventing a condition in a subject in need thereof as described herein comprises administering a single dose of the LNP enclosing (i) a guide polynucleotide or a nucleic acid encoding same and administering multiple doses of the LNP enclosing (ii) a base editor fusion protein comprising a programmable DNA binding domain and a deaminase, or a nucleic acid encoding same after 6 days, and the multiple doses are given at 2 day intervals. In some embodiments, the method for treating or preventing a condition in a subject in need thereof as described herein comprises administering a single dose of the LNP enclosing (i) a guide polynucleotide or a nucleic acid encoding same and administering multiple doses of the LNP enclosing (ii) a base editor fusion protein comprising a programmable DNA binding domain and a deaminase, or a nucleic acid encoding same after 6 days, and the multiple doses are given at 3 day intervals. In some embodiments, the method for treating or preventing a condition in a subject in need thereof as described herein comprises administering a single dose of the LNP enclosing (i) a guide polynucleotide or a nucleic acid encoding same and administering multiple doses of the LNP enclosing (ii) a base editor fusion protein comprising a programmable DNA binding domain and a deaminase, or a nucleic acid encoding same after 6 days, and the multiple doses are given at 4 day intervals. In some embodiments, the method for treating or preventing a condition in a subject in need thereof as described herein comprises administering a single dose of the LNP enclosing (i) a guide polynucleotide or a nucleic acid encoding same and administering multiple doses of the LNP enclosing (ii) a base editor fusion protein comprising a programmable DNA binding domain and a deaminase, or a nucleic acid encoding same after 6 days, and the multiple doses are given at 5 day intervals. In some embodiments, the method for treating or preventing a condition in a subject in need thereof as described herein comprises administering a single dose of the LNP enclosing (i) a guide polynucleotide or a nucleic acid encoding same and administering multiple doses of the LNP enclosing (ii) a base editor fusion protein comprising a programmable DNA binding domain and a deaminase, or a nucleic acid encoding same after 6 days, and the multiple doses are given at 6 day intervals. In some embodiments, the method for treating or preventing a condition in a subject in need thereof as described herein comprises administering a single dose of the LNP enclosing (i) a guide polynucleotide or a nucleic acid encoding same and administering multiple doses of the LNP enclosing (ii) a base editor fusion protein comprising a programmable DNA binding domain and a deaminase, or a nucleic acid encoding same after 6 days, and the multiple doses are given at 7 day intervals.

[0518] In some embodiments, the method for treating or preventing a condition in a subject in need thereof as described herein comprises administering a single dose of the LNP enclosing (i) a guide polynucleotide or a nucleic acid encoding same and administering multiple doses of the LNP enclosing (ii) a base editor fusion protein comprising a programmable DNA binding domain and a deaminase, or a nucleic acid encoding same after 7 days, and the multiple doses are given at 1 day intervals. In some embodiments, the method for treating or preventing a condition in a subject in need thereof as described herein comprises administering a single dose of the LNP enclosing (i) a guide polynucleotide or a nucleic acid encoding same and administering multiple doses of the LNP enclosing (ii) a base editor fusion protein comprising a programmable DNA binding domain and a deaminase, or a nucleic acid encoding same after 7 days, and the multiple doses are given at 2 day intervals. In some embodiments, the method for treating or preventing a condition in a subject in need thereof as described herein comprises administering a single dose of the LNP enclosing (i) a guide polynucleotide or a nucleic acid encoding same and administering multiple doses of the LNP enclosing (ii) a base editor fusion protein comprising a programmable DNA binding domain and a deaminase, or a nucleic acid encoding same after 7 days, and the multiple doses are given at 3 day intervals. In some embodiments, the method for treating or preventing a condition in a subject in need thereof as described herein comprises administering a single dose of the LNP enclosing (i) a guide polynucleotide or a nucleic acid encoding same and administering multiple doses of the LNP enclosing (ii) a base editor fusion protein comprising a programmable DNA binding domain and a deaminase, or a nucleic acid encoding same after 7 days, and the multiple doses are given at 4 day intervals. In some embodiments, the method for treating or preventing a condition in a subject in need thereof as described herein comprises administering a single dose of the LNP enclosing (i) a guide polynucleotide or a nucleic acid encoding same and administering multiple doses of the LNP enclosing (ii) a base editor fusion protein comprising a programmable DNA binding domain and a deaminase, or a nucleic acid encoding same after 7 days, and the multiple doses are given at 5 day intervals. In some embodiments, the method for treating or preventing a condition in a subject in need thereof as described herein comprises administering a single dose of the LNP enclosing (i) a guide polynucleotide or a nucleic acid encoding same and administering multiple doses of the LNP enclosing (ii) a base editor fusion protein comprising a programmable DNA binding domain and a deaminase, or a nucleic acid encoding same after 7 days, and the multiple doses are given at 6 day intervals. In some embodiments, the method for treating or preventing a condition in a subject in need thereof as described herein comprises administering a single dose of the LNP enclosing (i) a guide polynucleotide or a nucleic acid encoding same and administering multiple doses of the LNP enclosing (ii) a base editor fusion protein comprising a programmable DNA binding domain and a deaminase, or a nucleic acid encoding same after 7 days, and the multiple doses are given at 7 day intervals.

[0519] In some embodiments, the method for treating or preventing a condition in a subject in need thereof as described herein comprises administering a single dose of the LNP enclosing (ii) a base editor fusion protein comprising a programmable DNA binding domain and a deaminase, or a nucleic acid encoding same and administering multiple doses of the LNP enclosing (i) a guide polynucleotide or a nucleic acid encoding same after 1 day, and the multiple doses are given at 1 day intervals. In some embodiments, the method for treating or preventing a condition in a subject in need thereof as described herein comprises administering a single dose of the LNP enclosing (ii) a base editor fusion protein comprising a programmable DNA binding domain and a deaminase, or a nucleic acid encoding same and administering multiple doses of the LNP enclosing (i) a guide polynucleotide or a nucleic acid encoding same after 1 day, and the multiple doses are given at 2 day intervals. In some embodiments, the method for treating or preventing a condition in a subject in need thereof as described herein comprises administering a single dose of the LNP enclosing (ii) a base editor fusion protein comprising a programmable DNA binding domain and a deaminase, or a nucleic acid encoding same and administering multiple doses of the LNP enclosing (i) a guide polynucleotide or a nucleic acid encoding same after 1 day, and the multiple doses are given at 3 day intervals. In some embodiments, the method for treating or preventing a condition in a subject in need thereof as described herein comprises administering a single dose of the LNP enclosing (ii) a base editor fusion protein comprising a programmable DNA binding domain and a deaminase, or a nucleic acid encoding same and administering multiple doses of the LNP enclosing (i) a guide polynucleotide or a nucleic acid encoding same after 1 day, and the multiple doses are given at 4 day intervals. In some embodiments, the method for treating or preventing a condition in a subject in need thereof as described herein comprises administering a single dose of the LNP enclosing (ii) a base editor fusion protein comprising a programmable DNA binding domain and a deaminase, or a nucleic acid encoding same and administering multiple doses of the LNP enclosing (i) a guide polynucleotide or a nucleic acid encoding same after 1 day, and the multiple doses are given at 5 day intervals. In some embodiments, the method for treating or preventing a condition in a subject in need thereof as described herein comprises administering a single dose of the LNP enclosing (ii) a base editor fusion protein comprising a programmable DNA binding domain and a deaminase, or a nucleic acid encoding same and administering multiple doses of the LNP enclosing (i) a guide polynucleotide or a nucleic acid encoding same after 1 day, and the multiple doses are given at 6 day intervals. In some embodiments, the method for treating or preventing a condition in a subject in need thereof as described herein comprises administering a single dose of the LNP enclosing (ii) a base editor fusion protein comprising a programmable DNA binding domain and a deaminase, or a nucleic acid encoding same and administering multiple doses of the LNP enclosing (i) a guide polynucleotide or a nucleic acid encoding same after 1 day, and the multiple doses are given at 7 day intervals.

[0520] In some embodiments, the method for treating or preventing a condition in a subject in need thereof as described herein comprises administering a single dose of the LNP enclosing (ii) a base editor fusion protein comprising a programmable DNA binding domain and a deaminase, or a nucleic acid encoding same and administering multiple doses of the LNP enclosing (i) a guide polynucleotide or a nucleic acid encoding same after 2 days, and the multiple doses are given at 1 day intervals. In some embodiments, the method for treating or preventing a condition in a subject in need thereof as described herein comprises administering a single dose of the LNP enclosing (ii) a base editor fusion protein comprising a programmable DNA binding domain and a deaminase, or a nucleic acid encoding same and administering multiple doses of the LNP enclosing (i) a guide polynucleotide or a nucleic acid encoding same after 2 days, and the multiple doses are given at 2 day intervals. In some embodiments, the method for treating or preventing a condition in a subject in need thereof as described herein comprises administering a single dose of the LNP enclosing (ii) a base editor fusion protein comprising a programmable DNA binding domain and a deaminase, or a nucleic acid encoding same and administering multiple doses of the LNP enclosing (i) a guide polynucleotide or a nucleic acid encoding same after 2 days, and the multiple doses are given at 3 day intervals. In some embodiments, the method for treating or preventing a condition in a subject in need thereof as described herein comprises administering a single dose of the LNP enclosing (ii) a base editor fusion protein comprising a programmable DNA binding domain and a deaminase, or a nucleic acid encoding same and administering multiple doses of the LNP enclosing (i) a guide polynucleotide or a nucleic acid encoding same after 2 days, and the multiple doses are given at 4 day intervals. In some embodiments, the method for treating or preventing a condition in a subject in need thereof as described herein comprises administering a single dose of the LNP enclosing (ii) a base editor fusion protein comprising a programmable DNA binding domain and a deaminase, or a nucleic acid encoding same and administering multiple doses of the LNP enclosing (i) a guide polynucleotide or a nucleic acid encoding same after 2 days, and the multiple doses are given at 5 day intervals. In some embodiments, the method for treating or preventing a condition in a subject in need thereof as described herein comprises administering a single dose of the LNP enclosing (ii) a base editor fusion protein comprising a programmable DNA binding domain and a deaminase, or a nucleic acid encoding same and administering multiple doses of the LNP enclosing (i) a guide polynucleotide or a nucleic acid encoding same after 2 days, and the multiple doses are given at 6 day intervals. In some embodiments, the method for treating or preventing a condition in a subject in need thereof as described herein comprises administering a single dose of the LNP enclosing (ii) a base editor fusion protein comprising a programmable DNA binding domain and a deaminase, or a nucleic acid encoding same and administering multiple doses of the LNP enclosing (i) a guide polynucleotide or a nucleic acid encoding same after 2 days, and the multiple doses are given at 7 day intervals.

[0521] In some embodiments, the method for treating or preventing a condition in a subject in need thereof as described herein comprises administering a single dose of the LNP enclosing (ii) a base editor fusion protein comprising a programmable DNA binding domain and a deaminase, or a nucleic acid encoding same and administering multiple doses of the LNP enclosing (i) a guide polynucleotide or a nucleic acid encoding same after 3 days, and the multiple doses are given at 1 day intervals. In some embodiments, the method for treating or preventing a condition in a subject in need thereof as described herein comprises administering a single dose of the LNP enclosing (ii) a base editor fusion protein comprising a programmable DNA binding domain and a deaminase, or a nucleic acid encoding same and administering multiple doses of the LNP enclosing (i) a guide polynucleotide or a nucleic acid encoding same after 3 days, and the multiple doses are given at 2 day intervals. In some embodiments, the method for treating or preventing a condition in a subject in need thereof as described herein comprises administering a single dose of the LNP enclosing (ii) a base editor fusion protein comprising a programmable DNA binding domain and a deaminase, or a nucleic acid encoding same and administering multiple doses of the LNP enclosing (i) a guide polynucleotide or a nucleic acid encoding same after 3 days, and the multiple doses are given at 3 day intervals. In some embodiments, the method for treating or preventing a condition in a subject in need thereof as described herein comprises administering a single dose of the LNP enclosing (ii) a base editor fusion protein comprising a programmable DNA binding domain and a deaminase, or a nucleic acid encoding same and administering multiple doses of the LNP enclosing (i) a guide polynucleotide or a nucleic acid encoding same after 3 days, and the multiple doses are given at 4 day intervals. In some embodiments, the method for treating or preventing a condition in a subject in need thereof as described herein comprises administering a single dose of the LNP enclosing (ii) a base editor fusion protein comprising a programmable DNA binding domain and a deaminase, or a nucleic acid encoding same and administering multiple doses of the LNP enclosing (i) a guide polynucleotide or a nucleic acid encoding same after 3 days, and the multiple doses are given at 5 day intervals. In some embodiments, the method for treating or preventing a condition in a subject in need thereof as described herein comprises administering a single dose of the LNP enclosing (ii) a base editor fusion protein comprising a programmable DNA binding domain and a deaminase, or a nucleic acid encoding same and administering multiple doses of the LNP enclosing (i) a guide polynucleotide or a nucleic acid encoding same after 3 days, and the multiple doses are given at 6 day intervals. In some embodiments, the method for treating or preventing a condition in a subject in need thereof as described herein comprises administering a single dose of the LNP enclosing (ii) a base editor fusion protein comprising a programmable DNA binding domain and a deaminase, or a nucleic acid encoding same and administering multiple doses of the LNP enclosing (i) a guide polynucleotide or a nucleic acid encoding same after 3 days, and the multiple doses are given at 7 day intervals.

[0522] In some embodiments, the method for treating or preventing a condition in a subject in need thereof as described herein comprises administering a single dose of the LNP enclosing (ii) a base editor fusion protein comprising a programmable DNA binding domain and a deaminase, or a nucleic acid encoding same and administering multiple doses of the LNP enclosing (i) a guide polynucleotide or a nucleic acid encoding same after 4 days, and the multiple doses are given at 1 day intervals. In some embodiments, the method for treating or preventing a condition in a subject in need thereof as described herein comprises administering a single dose of the LNP enclosing (ii) a base editor fusion protein comprising a programmable DNA binding domain and a deaminase, or a nucleic acid encoding same and administering multiple doses of the LNP enclosing (i) a guide polynucleotide or a nucleic acid encoding same after 4 days, and the multiple doses are given at 2 day intervals. In some embodiments, the method for treating or preventing a condition in a subject in need thereof as described herein comprises administering a single dose of the LNP enclosing (ii) a base editor fusion protein comprising a programmable DNA binding domain and a deaminase, or a nucleic acid encoding same and administering multiple doses of the LNP enclosing (i) a guide polynucleotide or a nucleic acid encoding same after 4 days, and the multiple doses are given at 3 day intervals. In some embodiments, the method for treating or preventing a condition in a subject in need thereof as described herein comprises administering a single dose of the LNP enclosing (ii) a base editor fusion protein comprising a programmable DNA binding domain and a deaminase, or a nucleic acid encoding same and administering multiple doses of the LNP enclosing (i) a guide polynucleotide or a nucleic acid encoding same after 4 days, and the multiple doses are given at 4 day intervals. In some embodiments, the method for treating or preventing a condition in a subject in need thereof as described herein comprises administering a single dose of the LNP enclosing (ii) a base editor fusion protein comprising a programmable DNA binding domain and a deaminase, or a nucleic acid encoding same and administering multiple doses of the LNP enclosing (i) a guide polynucleotide or a nucleic acid encoding same after 4 days, and the multiple doses are given at 5 day intervals. In some embodiments, the method for treating or preventing a condition in a subject in need thereof as described herein comprises administering a single dose of the LNP enclosing (ii) a base editor fusion protein comprising a programmable DNA binding domain and a deaminase, or a nucleic acid encoding same and administering multiple doses of the LNP enclosing (i) a guide polynucleotide or a nucleic acid encoding same after 4 days, and the multiple doses are given at 6 day intervals. In some embodiments, the method for treating or preventing a condition in a subject in need thereof as described herein comprises administering a single dose of the LNP enclosing (ii) a base editor fusion protein comprising a programmable DNA binding domain and a deaminase, or a nucleic acid encoding same and administering multiple doses of the LNP enclosing (i) a guide polynucleotide or a nucleic acid encoding same after 4 days, and the multiple doses are given at 7 day intervals.

[0523] In some embodiments, the method for treating or preventing a condition in a subject in need thereof as described herein comprises administering a single dose of the LNP enclosing (ii) a base editor fusion protein comprising a programmable DNA binding domain and a deaminase, or a nucleic acid encoding same and administering multiple doses of the LNP enclosing (i) a guide polynucleotide or a nucleic acid encoding same after 5 days, and the multiple doses are given at 1 day intervals. In some embodiments, the method for treating or preventing a condition in a subject in need thereof as described herein comprises administering a single dose of the LNP enclosing (ii) a base editor fusion protein comprising a programmable DNA binding domain and a deaminase, or a nucleic acid encoding same and administering multiple doses of the LNP enclosing (i) a guide polynucleotide or a nucleic acid encoding same after 5 days, and the multiple doses are given at 2 day intervals. In some embodiments, the method for treating or preventing a condition in a subject in need thereof as described herein comprises administering a single dose of the LNP enclosing (ii) a base editor fusion protein comprising a programmable DNA binding domain and a deaminase, or a nucleic acid encoding same and administering multiple doses of the LNP enclosing (i) a guide polynucleotide or a nucleic acid encoding same after 5 days, and the multiple doses are given at 3 day intervals. In some embodiments, the method for treating or preventing a condition in a subject in need thereof as described herein comprises administering a single dose of the LNP enclosing (ii) a base editor fusion protein comprising a programmable DNA binding domain and a deaminase, or a nucleic acid encoding same and administering multiple doses of the LNP enclosing (i) a guide polynucleotide or a nucleic acid encoding same after 5 days, and the multiple doses are given at 4 day intervals. In some embodiments, the method for treating or preventing a condition in a subject in need thereof as described herein comprises administering a single dose of the LNP enclosing (ii) a base editor fusion protein comprising a programmable DNA binding domain and a deaminase, or a nucleic acid encoding same and administering multiple doses of the LNP enclosing (i) a guide polynucleotide or a nucleic acid encoding same after 5 days, and the multiple doses are given at 5 day intervals. In some embodiments, the method for treating or preventing a condition in a subject in need thereof as described herein comprises administering a single dose of the LNP enclosing (ii) a base editor fusion protein comprising a programmable DNA binding domain and a deaminase, or a nucleic acid encoding same and administering multiple doses of the LNP enclosing (i) a guide polynucleotide or a nucleic acid encoding same after 5 days, and the multiple doses are given at 6 day intervals. In some embodiments, the method for treating or preventing a condition in a subject in need thereof as described herein comprises administering a single dose of the LNP enclosing (ii) a base editor fusion protein comprising a programmable DNA binding domain and a deaminase, or a nucleic acid encoding same and administering multiple doses of the LNP enclosing (i) a guide polynucleotide or a nucleic acid encoding same after 5 days, and the multiple doses are given at 7 day intervals.

[0524] In some embodiments, the method for treating or preventing a condition in a subject in need thereof as described herein comprises administering a single dose of the LNP enclosing (ii) a base editor fusion protein comprising a programmable DNA binding domain and a deaminase, or a nucleic acid encoding same and administering multiple doses of the LNP enclosing (i) a guide polynucleotide or a nucleic acid encoding same after 6 days, and the multiple doses are given at 1 day intervals. In some embodiments, the method for treating or preventing a condition in a subject in need thereof as described herein comprises administering a single dose of the LNP enclosing (ii) a base editor fusion protein comprising a programmable DNA binding domain and a deaminase, or a nucleic acid encoding same and administering multiple doses of the LNP enclosing (i) a guide polynucleotide or a nucleic acid encoding same after 6 days, and the multiple doses are given at 2 day intervals. In some embodiments, the method for treating or preventing a condition in a subject in need thereof as described herein comprises administering a single dose of the LNP enclosing (ii) a base editor fusion protein comprising a programmable DNA binding domain and a deaminase, or a nucleic acid encoding same and administering multiple doses of the LNP enclosing (i) a guide polynucleotide or a nucleic acid encoding same after 6 days, and the multiple doses are given at 3 day intervals. In some embodiments, the method for treating or preventing a condition in a subject in need thereof as described herein comprises administering a single dose of the LNP enclosing (ii) a base editor fusion protein comprising a programmable DNA binding domain and a deaminase, or a nucleic acid encoding same and administering multiple doses of the LNP enclosing (i) a guide polynucleotide or a nucleic acid encoding same after 6 days, and the multiple doses are given at 4 day intervals. In some embodiments, the method for treating or preventing a condition in a subject in need thereof as described herein comprises administering a single dose of the LNP enclosing (ii) a base editor fusion protein comprising a programmable DNA binding domain and a deaminase, or a nucleic acid encoding same and administering multiple doses of the LNP enclosing (i) a guide polynucleotide or a nucleic acid encoding same after 6 days, and the multiple doses are given at 5 day intervals. In some embodiments, the method for treating or preventing a condition in a subject in need thereof as described herein comprises administering a single dose of the LNP enclosing (ii) a base editor fusion protein comprising a programmable DNA binding domain and a deaminase, or a nucleic acid encoding same and administering multiple doses of the LNP enclosing (i) a guide polynucleotide or a nucleic acid encoding same after 6 days, and the multiple doses are given at 6 day intervals. In some embodiments, the method for treating or preventing a condition in a subject in need thereof as described herein comprises administering a single dose of the LNP enclosing (ii) a base editor fusion protein comprising a programmable DNA binding domain and a deaminase, or a nucleic acid encoding same and administering multiple doses of the LNP enclosing (i) a guide polynucleotide or a nucleic acid encoding same after 6 days, and the multiple doses are given at 7 day intervals.

[0525] In some embodiments, the method for treating or preventing a condition in a subject in need thereof as described herein comprises administering a single dose of the LNP enclosing (ii) a base editor fusion protein comprising a programmable DNA binding domain and a deaminase, or a nucleic acid encoding same and administering multiple doses of the LNP enclosing (i) a guide polynucleotide or a nucleic acid encoding same after 7 days, and the multiple doses are given at 1 day intervals. In some embodiments, the method for treating or preventing a condition in a subject in need thereof as described herein comprises administering a single dose of the LNP enclosing (ii) a base editor fusion protein comprising a programmable DNA binding domain and a deaminase, or a nucleic acid encoding same and administering multiple doses of the LNP enclosing (i) a guide polynucleotide or a nucleic acid encoding same after 7 days, and the multiple doses are given at 2 day intervals. In some embodiments, the method for treating or preventing a condition in a subject in need thereof as described herein comprises administering a single dose of the LNP enclosing (ii) a base editor fusion protein comprising a programmable DNA binding domain and a deaminase, or a nucleic acid encoding same and administering multiple doses of the LNP enclosing (i) a guide polynucleotide or a nucleic acid encoding same after 7 days, and the multiple doses are given at 3 day intervals. In some embodiments, the method for treating or preventing a condition in a subject in need thereof as described herein comprises administering a single dose of the LNP enclosing (ii) a base editor fusion protein comprising a programmable DNA binding domain and a deaminase, or a nucleic acid encoding same and administering multiple doses of the LNP enclosing (i) a guide polynucleotide or a nucleic acid encoding same after 7 days, and the multiple doses are given at 4 day intervals. In some embodiments, the method for treating or preventing a condition in a subject in need thereof as described herein comprises administering a single dose of the LNP enclosing (ii) a base editor fusion protein comprising a programmable DNA binding domain and a deaminase, or a nucleic acid encoding same and administering multiple doses of the LNP enclosing (i) a guide polynucleotide or a nucleic acid encoding same after 7 days, and the multiple doses are given at 5 day intervals. In some embodiments, the method for treating or preventing a condition in a subject in need thereof as described herein comprises administering a single dose of the LNP enclosing (ii) a base editor fusion protein comprising a programmable DNA binding domain and a deaminase, or a nucleic acid encoding same and administering multiple doses of the LNP enclosing (i) a guide polynucleotide or a nucleic acid encoding same after 7 days, and the multiple doses are given at 6 day intervals. In some embodiments, the method for treating or preventing a condition in a subject in need thereof as described herein comprises administering a single dose of the LNP enclosing (ii) a base editor fusion protein comprising a programmable DNA binding domain and a deaminase, or a nucleic acid encoding same and administering multiple doses of the LNP enclosing (i) a guide polynucleotide or a nucleic acid encoding same after 7 days, and the multiple doses are given at 7 day intervals.

[0526] In some embodiments, the method for treating or preventing a condition in a subject in need thereof as described herein comprises administering a single dose of the LNP enclosing (i) a guide polynucleotide or a nucleic acid encoding the guide polynucleotide and (ii) a base editor fusion protein comprising a programmable DNA binding domain and a deaminase, or a nucleic acid encoding same. In some embodiments, the single dose of the LNP is at 0.3 mg/kg. In some embodiments, the single dose of the LNP is at 0.5 mg/kg. In some embodiments, the single dose of the LNP is at 1 mg/kg. In some embodiments, the single dose of the LNP is at 1 mg/kg. In some embodiments, the single dose of the LNP is at about 0.3 to about 3 mg/kg.

[0527] Methods for treatment of a condition as provided herein may comprise a treatment course of one or more treatments, with each treatment comprising a single dose or multiple doses of a base editor system, or a LNP enclosing one or more components of the base editor system. For example, a subject in need thereof may be administered a single dose of a LNP enclosing a mRNA encoding a base editor fusion protein and a guide RNA for a treatment. In some embodiments, a subject may be administered a treatment course of one or more treatments, wherein each treatment comprises one or more of the single doses of the LNP, for example, a subject may also be administered 2, 3, 4, 5, 6, 7, 8, 9, 10, 11, 12, 13, 14, 15, 16, 17, 18, 19, 20, 21, 22, 23, 24, 25, 26, 27, 28, 29, 30, 31, 32, 33, 34, 35, 36, 37, 38, 39, 40, 41, 42, 43, 44, 45, 46, 47, 48, 49, 50, or more doses of a LNP enclosing a mRNA encoding a base editor fusion protein and a guide RNA for a treatment. The subject may receive a treatment course of 1, 2, 3, 4, 5, 6, 7, 8, 9, 10, 11, 12, 13, 14, 15, 16, 17, 18, 19, 20, 21, 22, 23, 24, 25, 26, 27, 28, 29, 30, 31, 32, 33, 34, 35, 36, 37, 38, 39, 40, 41, 42, 43, 44, 45, 46, 47, 48, 49, 50, or more treatments, where each dose may be administered 1 day, 2 days, 3 days, 4 days, 5 days, 6 days, 1 week, 2 weeks, 3 weeks, 1 month, 2 months, 3 months, 6 months, 9 months, 12 months, 24 months, 48 months or apart. A single dose for the treatment as described herein may comprise a LNP enclosing a guide RNA or a mRNA encoding the base editor fusion protein, or both.

[0528] In some embodiments, the single dose of the LNP comprises 0.1 mg/kg, 0.2 mg/kg, 0.3 mg/kg, 0.4 mg/kg, 0.5 mg/kg, 0.6 mg/kg, 0.7 mg/kg, 0.8 mg/kg, 0.9 mg/kg, 1.0 mg/kg, 1.1 mg/kg, 1.2 mg/kg, 1.3 mg/kg, 1.4 mg/kg, 1.5 mg/kg, 1.6 mg/kg, 1.7 mg/kg, 1.8 mg/kg, 1.9 mg/kg, 2.0 mg/kg, 2.1 mg/kg, 2.2 mg/kg, 2.3 mg/kg, 2.4 mg/kg, 2.5 mg/kg, 2.6 mg/kg, 2.7 mg/kg, 2.8 mg/kg, 2.9 mg/kg, 3.0 mg/kg, 3.1 mg/kg, 3.2 mg/kg, 3.3 mg/kg, 3.4 mg/kg, 3.5 mg/kg, 3.6 mg/kg, 3.7 mg/kg, 3.8 mg/kg, 3.9 mg/kg, 4.0 mg/kg, 4.1 mg/kg, 4.2 mg/kg, 4.3 mg/kg, 4.4 mg/kg, 4.5 mg/kg, 4.6 mg/kg, 4.7 mg/kg, 4.8 mg/kg, 4.9 mg/kg, 5.0 mg/kg, 5.1 mg/kg, 5.2 mg/kg, 5.3 mg/kg, 5.4 mg/kg, 5.5 mg/kg, 5.6 mg/kg, 5.7 mg/kg, 5.8 mg/kg, 5.9 mg/kg, 6.0 mg/kg, 6.1 mg/kg, 6.2 mg/kg, 6.3 mg/kg, 6.4 mg/kg, 6.5 mg/kg, 6.6 mg/kg, 6.7 mg/kg, 6.8 mg/kg, 6.9 mg/kg, 7.0 mg/kg, 7.1 mg/kg, 7.2 mg/kg, 7.3 mg/kg, 7.4 mg/kg, 7.5 mg/kg, 7.6 mg/kg, 7.7 mg/kg, 7.8 mg/kg, 7.9 mg/kg, 8.0 mg/kg, 8.1 mg/kg, 8.2 mg/kg, 8.3 mg/kg, 8.4 mg/kg, 8.5 mg/kg, 8.6 mg/kg, 8.7 mg/kg, 8.8 mg/kg, 8.9 mg/kg, 9.0 mg/kg, 9.1 mg/kg, 9.2 mg/kg, 9.3 mg/kg, 9.4 mg/kg, 9.5 mg/kg, 9.6 mg/kg, 9.7 mg/kg, 9.8 mg/kg, 9.9 mg/kg, 10 mg/kg, 11 mg/kg, 12 mg/kg, 13 mg/kg, 14 mg/kg, 15 mg/kg, 16 mg/kg, 17 mg/kg, 18 mg/kg, 19 mg/kg, 20 mg/kg, 25 mg/kg, 30 mg/kg, 35 mg/kg, 40 mg/kg, 45 mg/kg, 50 mg/kg, 55 mg/kg, 60 mg/kg, 65 mg/kg, 70 mg/kg, 75 mg/kg, 80 mg/kg, 85 mg/kg, 90 mg/kg, 95 mg/kg, 100 mg/kg, 105 mg/kg, 110 mg/kg, 115 mg/kg, 120 mg/kg, 125 mg/kg, 130 mg/kg, 135 mg/kg, 140 mg/kg, 145 mg/kg, 150 mg/kg, 155 mg/kg, 160 mg/kg, 165 mg/kg, 170 mg/kg, 175 mg/kg, 180 mg/kg, 185 mg/kg, 190 mg/kg, 195 mg/kg, 200 mg/kg, 250 mg/kg, 300 mg/kg, 350 mg/kg, 400 mg/kg, 450 mg/kg, or 500 mg/kg.

[0529] In some embodiments, the condition is a atherosclerotic cardiovascular disease. In some embodiments, the condition is a cardiovascular disease, or diabetes. In some embodiments, the condition is a atherosclerotic vascular disease.

[0530] In some embodiments, the subject is a non-human primate. In some embodiments, the subject is a monkey. In some embodiments, the subject is a human. In some embodiments, the deaminase is an adenine deaminase. In some embodiments, the nucleobase alteration is a A·T to G·C alteration. In some embodiments, the deaminase is an adenine deaminase and the nucleobase alteration is a A·T to G·C alteration. In some embodiments, the programmable DNA binding domain comprises a nuclease inactive Cas9. In some embodiments, the programmable DNA binding domain comprises a Cas9 nickase. In some embodiments, the programmable DNA binding domain comprises a Cas9.

[0531] In some embodiments, the nucleobase alteration is at a splice site of the PCSK9 gene. In some embodiments, the nucleobase alteration is at a splice donor site of the PCSK9 gene. In some embodiments, the splice donor site is at 5′ end of PCSK9 intron 1 as referenced in SEQ ID NO: 5. In some embodiments, the nucleobase alteration is at a splice acceptor site of the PCSK9 gene. In some embodiments, the nucleobase alteration results in a frame shift, a premature stop codon, a insertion or deletion in a transcript encoded by the PCSK9 gene. In some embodiments, the nucleobase alteration results in an aberrant transcript encoded by the PCSK9 gene. In some embodiments, the guide polynucleotide is a guide RNA. In some embodiments, the guide RNA is chemically modified. In some embodiments, the guide RNA comprises a tracrRNA sequence. In some embodiments, the guide RNA comprises a chemical modification as set forth in Table 1 or Table 24.

[0532] In some embodiments, the nucleobase alteration is at a splice site of the ANGPTL3 gene. In some embodiments, the nucleobase alteration is at a splice donor site of the ANGPTL3 gene. In some embodiments, the splice donor site is at 5′ end of ANGPTL3 intron 6 as referenced in SEQ ID NO: 7. In some embodiments, the nucleobase alteration is at a splice acceptor site of the ANGPTL3 gene. In some embodiments, the nucleobase alteration results in a frame shift, a premature stop codon, a insertion or deletion in a transcript encoded by the ANGPTL3 gene. In some embodiments, the nucleobase alteration results in an aberrant transcript encoded by the ANGPTL3 gene. In some embodiments, the guide polynucleotide is a guide RNA. In some embodiments, the guide RNA is chemically modified. In some embodiments, the guide RNA comprises a tracrRNA sequence. In some embodiments, the guide RNA comprises a chemical modification as set forth in Table 1 or Table 24.

[0533] In some embodiments, the guide RNA comprises a guide RNA sequence set forth in Table 1 or Table 24. In some embodiments, the guide RNA comprises the sequence

(SEQ ID NO: 9)
5′-5′-cscscsGCACCUUGGCGCAGCGGgUUUUAGagcuaGaaauagca
aGUUaAaAuAaggCUaGUCcGUUAucAAcuuGaaaaaguGgcaccgAgUC
ggugcusususu-3′,
(SEQ ID NO: 2240)
5′-cscscsGCACCUUGGCGCAGCGGgUUUUAGagcuagaaauagcaaGU
UaAaAuAaggcuaGUccGUUAucAAcuugaaaaagugGcaccgagucggu
gcusususu-3′,
(GA346)
(SEQ ID NO: 2256)
5′-cscscsGCACCUUGGCGCAGCGGgUUUUAGagcuaGaaauagcaaGU
UaAaAuAaggcuaGUccGUUAucAAcuuGaaaaagugGcaccgagucggu
gcusususu-3′,
(GA374)
(SEQ ID NO: 65)
5′-cscscsGCACCUUGGCGCAGCGGgUUUUAGagcuagaaauagcaaGU
UaAaAuAaggcuaGUccGUUAacAAcuugaaaaagugGcaccgagucggu
gcusususu-3′,
(GA385)
(SEQ ID NO: 11)
5′-cscscsGCACCUUGGCGCAGCGGgUUUUAGagcuagaaauagcaaGU
UaAaAuAaggcuaGUccGUUAucAAcuugaaaaagugGcaccgagucggu
gcusususuuuu-3′,
(GA386)
(SEQ ID NO: 2260)
5′-cscscsGCACCUUGGCGCAGCGGgUUUUAGagcuagaaauagcaaGU
UaAaAuAaggcuaGUccGUUAucAAcuugaaaaagugGcaccgagucggu
gcusususuuUu-3′
or
(GA387)
(SEQ ID NO: 12)
5′-cscscsGCACCUUGGCGCAGCGgUUUUAGagcuaGaaauagcaaGUU
aAaAuAaggcuaGUccGUUAucAAcuuGaaaaagugGcaccgagucggug
cuususuuuu-3′.

[0534] In some embodiments, the protospacer sequence comprises a protospacer sequence set forth in Table 1 or Table 24. In some embodiments, the protospacer comprises the sequence

(SEQ ID NO: 13)
5′-CCCGCACCTTGGCGCAGCGG-3′,
(SEQ ID NO: 14)
AAGATACCTGAATAACTCTC-3′
or
(SEQ ID NO: 15)
5′-AAGATACCTGAATAACCCTC-3′.

[0535] In some embodiments, the base editor fusion protein comprises the sequence of SEQ ID NO: 3. In some embodiments, the adenosine deaminase comprises an amino acid sequence that is at least 60%, at least 65%, at least 70%, at least 75%, at least 80%, at least 85%, at least 90%, at least 95%, at least 96%, at least 97%, at least 98%, at least 99%, or at least 99.5% identical to the amino acid sequence set forth in SEQ ID NO: 3 or to any of the adenosine deaminases provided herein. It should be appreciated that adenosine deaminases provided herein may include one or more mutations (e.g., any of the mutations provided herein). The disclosure provides any deaminase domains with a certain percent identity plus any of the mutations or combinations thereof described herein. In some embodiments, the adenosine deaminase comprises an amino acid sequence that has 1, 2, 3, 4, 5, 6, 7, 8, 9, 10, 11, 12, 13, 14, 15, 16, 17, 18, 19, 20, 21, 22, 21, 24, 25, 26, 27, 28, 29, 30, 31, 32, 33, 34, 35, 36, 37, 38, 39, 40, 41, 42, 43, 44, 45, 46, 47, 48, 49, 50, or more mutations compared to the amino acid sequence set forth in SEQ ID NO: 3 or any of the adenosine deaminases provided herein. In some embodiments, the adenosine deaminase comprises an amino acid sequence that has at least 5, at least 10, at least 15, at least 20, at least 25, at least 30, at least 35, at least 40, at least 45, at least 50, at least 60, at least 70, at least 80, at least 90, at least 100, at least 110, at least 120, at least 130, at least 140, at least 150, at least 160, or at least 170 identical contiguous amino acid residues as compared to any one of the amino acid sequences set forth in SEQ ID NO: 3 or any of the adenosine deaminases provided herein.

[0536] In some embodiments, the mRNA comprises a cap analog.

[0537] In some embodiments, the mRNA comprises at least 1, 2, or 3 nucleotides at the 5′ end that comprises 2′-hydroxyl group, 2′-O-methyl group, or additional 2′ chemical modification or a combination thereof. In some embodiments, the mRNA comprises at least 1, 2, or 3 nucleotides at the 5′ end that comprises 2′-hydroxyl group, 2′-O-methyl group, or additional 2′ chemical modification or a combination thereof. In some embodiments, the mRNA comprises at least 1 nucleotide at the 5′ end that comprises 2′-hydroxyl group, 2′-O-methyl group, or additional 2′ chemical modification or a combination thereof. In some embodiments, the mRNA comprises at least 2 nucleotides at the 5′ end that comprises 2′-hydroxyl group, 2′-O-methyl group, or additional 2′ chemical modification or a combination thereof. In some embodiments, the mRNA comprises at least 3 nucleotides at the 5′ end that comprises 2′-hydroxyl group, 2′-O-methyl group, or additional 2′ chemical modification or a combination thereof. In some embodiments, the mRNA comprises at least 4 nucleotides at the 5′ end that comprises 2′-hydroxyl group, 2′-O-methyl group, or additional 2′ chemical modification or a combination thereof. In some embodiments, the mRNA comprises at least 5 nucleotides at the 5′ end that comprises 2′-hydroxyl group, 2′-O-methyl group, or additional 2′ chemical modification or a combination thereof. In some embodiments, the mRNA comprises at least 6 nucleotides at the 5′ end that comprises 2′-hydroxyl group, 2′-O-methyl group, or additional 2′ chemical modification or a combination thereof. In some embodiments, the mRNA comprises at least 7 nucleotides at the 5′ end that comprises 2′-hydroxyl group, 2′-O-methyl group, or additional 2′ chemical modification or a combination thereof. In some embodiments, the mRNA comprises at least 8 nucleotides at the 5′ end that comprises 2′-hydroxyl group, 2′-O-methyl group, or additional 2′ chemical modification or a combination thereof. In some embodiments, the mRNA comprises at least 9 nucleotides at the 5′ end that comprises 2′-hydroxyl group, 2′-O-methyl group, or additional 2′ chemical modification or a combination thereof. In some embodiments, the mRNA comprises at least 10 nucleotides at the 5′ end that comprises 2′-hydroxyl group, 2′-O-methyl group, or additional 2′ chemical modification or a combination thereof.

[0538] In some embodiments, the mRNA comprises a poly A tail.

[0539] The compositions described herein, may be administered to a subject in need thereof, in a therapeutically effective amount, to treat conditions related to high circulating cholesterol levels. Conditions related to high circulating cholesterol level that may be treated using the compositions and methods described herein include, without limitation: hypercholesterolemia, elevated total cholesterol levels, elevated low-density lipoprotein (LDL) levels, elevated blood LDL-cholesterol levels, reduced blood high-density lipoprotein cholesterol level, liver steatosis, coronary heart disease, vascular disease, ischemia, stroke, peripheral vascular disease, thrombosis, type 2 diabetes, hypertriglyceridemia, high elevated blood pressure, atherosclerosis, obesity, Alzheimer's disease, neurodegeneration, and combinations thereof. The compositions and methods disclosed herein are effective in reducing the circulating cholesterol level in the subject, thus treating the conditions. The compositions and methods disclosed herein are effective in reducing blood LDL cholesterol level and/or a reducing blood triglycerides level as compared to before the administration.

[0540] In another aspect, provided herein is a method for treating or preventing a condition in a subject in need thereof, the method comprising administering to the subject the complex as provided herein, the composition as provided herein, or the lipid nanoparticle as provided herein, wherein the sgRNA directs the adenosine base editor protein to effect a modification in a target polynucleotide sequence in a cell of the subject, thereby treating or preventing the condition.

[0541] In some embodiments, the target polynucleotide sequence is in a PCSK9 gene. In some embodiments, the modification reduces expression of functional PCSK9 protein encoded by the PCSK9 gene in the subject. In some embodiments, the condition is atherosclerotic vascular disease. In some embodiments, the target polynucleotide sequence is in an ANGPTL3 gene. In some embodiments, the modification reduces expression of functional ANGPTL3 protein encoded by the ANGPTL3 gene in the subject. In some embodiments, the condition is an atherosclerotic vascular disease, hypertriglyceridemia, or diabetes.

[0542] A patient who is being treated for a condition, a disease or a disorder is one who a medical practitioner has diagnosed as having such a condition. Diagnosis may be by any suitable means. Diagnosis and monitoring may involve, for example, detecting the presence of diseased, dying or dead cells in a biological sample (e.g., tissue biopsy, blood test, or urine test), detecting the presence of plaques, detecting the level of a surrogate marker in a biological sample, or detecting symptoms associated with a condition. A patient in whom the development of a condition is being prevented may or may not have received such a diagnosis. One in the art will understand that these patients may have been subjected to the same standard tests as described above or may have been identified, without examination, as one at high risk due to the presence of one or more risk factors (e.g., family history or genetic predisposition).

[0543] The therapeutic methods of the disclosure may be carried out on subjects displaying pathology resulting from a disease or a condition, subjects suspected of displaying pathology resulting from a disease or a condition, and subjects at risk of displaying pathology resulting from a disease or a condition. For example, subjects that have a genetic predisposition to a disease or a condition can be treated prophylactically. Subjects exhibiting symptoms associated with a condition, a disease or a disorder may be treated to decrease the symptoms or to slow down or prevent further progression of the symptoms. The physical changes associated with the increasing severity of a disease or a condition are shown herein to be progressive. Thus, in embodiments of the disclosure, subjects exhibiting mild signs of the pathology associated with a condition or a disease may be treated to improve the symptoms and/or prevent further progression of the symptoms.

[0544] In some embodiments, the subject exhibits a reduced blood LDL cholesterol level and/or a reduced blood triglycerides level as compared to before the administration.

[0545] In some embodiments, after the administration, the subject exhibits a reduced blood low-density lipoprotein (LDL) cholesterol level by at least 5%, at least 10%, at least 15%, at least 20%, at least 25%, at least 30%, at least 35%, at least 40%, at least 45%, at least 50%, at least 55%, at least 60%, at least 65%, at least 70%, at least 75%, at least 80%, at least 85%, at least 90%, at least 95%, at least 97%, at least 98%, at least 99%, at least 99.5%, at least 99.9%, or 100% as compared to before the administration. In some embodiments, after the administration, the subject exhibits a reduced blood low-density lipoprotein (LDL) cholesterol level by at least 2 fold, at least 3 fold, at least 4 fold, at least 5 fold, at least 10 fold, at least 20 fold, at least 25 fold, at least 30 fold, at least 40 fold, at least 50 fold, at least 60 fold, at least 70 fold, at least 80 fold, at least 90 fold, at least 100 fold, at least 200 fold, at least 300 fold, at least 400 fold, at least 500 fold, at least 600 fold, at least 700 fold, at least 800 fold, at least 900 fold, at least 1000 fold, at least 2000 fold, at least 3000 fold, at least 4000 fold, at least 5000 fold, at least 6000 fold, at least 7000 fold, at least 8000 fold, at least 9000 fold, or at least 10000 fold as compared to before the administration.

[0546] In some embodiments, after the administration, the subject exhibits a reduced blood triglycerides level by at least 5%, at least 10%, at least 15%, at least 20%, at least 25%, at least 30%, at least 35%, at least 40%, at least 45%, at least 50%, at least 55%, at least 60%, at least 65%, at least 70%, at least 75%, at least 80%, at least 85%, at least 90%, at least 95%, at least 97%, at least 98%, at least 99%, at least 99.5%, at least 99.9%, or 100% as compared to before the administration.

[0547] In some embodiments, after the administration, the subject exhibits a reduced blood triglycerides level by at least 5%, at least 10%, at least 15%, at least 20%, at least 25%, at least 30%, at least 35%, at least 40%, at least 45%, at least 50%, at least 55%, at least 60%, at least 65%, at least 70%, at least 75%, at least 80%, at least 85%, at least 90%, at least 95%, at least 97%, at least 98%, at least 99%, at least 99.5%, at least 99.9%, or 100% as compared to before the administration. In some embodiments, after the administration, the subject exhibits a reduced blood triglycerides level by at least 2 fold, at least 3 fold, at least 4 fold, at least 5 fold, at least 10 fold, at least 20 fold, at least 25 fold, at least 30 fold, at least 40 fold, at least 50 fold, at least 60 fold, at least 70 fold, at least 80 fold, at least 90 fold, at least 100 fold, at least 200 fold, at least 300 fold, at least 400 fold, at least 500 fold, at least 600 fold, at least 700 fold, at least 800 fold, at least 900 fold, at least 1000 fold, at least 2000 fold, at least 3000 fold, at least 4000 fold, at least 5000 fold, at least 6000 fold, at least 7000 fold, at least 8000 fold, at least 9000 fold, or at least 10000 fold as compared to before the administration.

[0548] The dosage and frequency (single or multiple doses) administered to a mammal can vary depending upon a variety of factors, for example, whether the mammal suffers from another disease, and its route of administration; size, age, sex, health, body weight, body mass index, and diet of the recipient; nature and extent of symptoms of the disease being treated, kind of concurrent treatment, complications from the disease being treated or other health-related problems. Adjustment and manipulation of established dosages (e.g., frequency and duration) are well within the ability of those skilled in the art. The treatment, such as those disclosed herein, can be administered to the subject on a daily, twice daily, biweekly, monthly or any applicable basis that is therapeutically effective. In embodiments, the treatment is only on an as-needed basis, e.g., upon appearance of signs or symptoms of a condition or a disease, e.g., an atherosclerotic vascular disease, hypertriglyceridemia, or diabetes.

[0549] The compositions described herein, may be administered to a subject in need thereof, in a therapeutically effective amount, to treat conditions related to high circulating cholesterol levels. Conditions related to high circulating cholesterol level that may be treated using the compositions and methods described herein include, without limitation: hypercholesterolemia, elevated total cholesterol levels, elevated low-density lipoprotein (LDL) levels, elevated blood LDL-cholesterol levels, reduced blood high-density lipoprotein cholesterol level, liver steatosis, coronary heart disease, vascular disease, ischemia, stroke, peripheral vascular disease, thrombosis, type 2 diabetes, hypertriglyceridemia, high elevated blood pressure, atherosclerosis, obesity, Alzheimer's disease, neurodegeneration, and combinations thereof. The compositions and methods disclosed herein are effective in reducing the circulating cholesterol level in the subject, thus treating the conditions. The compositions and methods disclosed herein are effective in reducing blood LDL cholesterol level and/or a reducing blood triglycerides level as compared to before the administration.

[0550] Toxicity and therapeutic efficacy of the compositions of the disclosure can be determined by standard pharmaceutical procedures in cell cultures or experimental animals, e.g., for determining the LD50 (the dose lethal to 50% of the population) and the ED50 (the dose therapeutically effective in 50% of the population). The dose ratio between toxic and therapeutic effects (the ratio LD50/ED50) is the therapeutic index. Agents that exhibit high therapeutic indices are preferred. The dosage of agents lies preferably within a range of circulating concentrations that include the ED50 with little or no toxicity. While agents that exhibit toxic side effects may be used, care should be taken to design a delivery system that targets such agents to the site of affected tissue in order to minimize potential damage to uninfected cells and, thereby, reduce side effects.

[0551] The skilled artisan will appreciate that certain factors may influence the dosage and frequency of administration required to effectively treat a subject, including but not limited to the severity of the disease or disorder, previous treatments, the general characteristics of the subject including health, sex, weight and/or age of the subject, and other diseases present. Moreover, treatment of a subject with a therapeutically effective amount of the compositions can include a single treatment or, preferably, can include a series of treatments. It will also be appreciated that the effective dosage of the composition of the disclosure used for treatment may increase or decrease over the course of a particular treatment. Changes in dosage may result and become apparent from the results of diagnostic assays as described herein. The therapeutically-effective dosage will generally be dependent on the patient's status at the time of administration. The precise amount can be determined by routine experimentation but may ultimately lie with the judgment of the clinician, for example, by monitoring the patient for signs of disease and adjusting the treatment accordingly.

[0552] Frequency of administration may be determined and adjusted over the course of therapy, and is generally, but not necessarily, based on treatment and/or suppression and/or amelioration and/or delay of a disease. Alternatively, sustained continuous release formulations of a polypeptide or a polynucleotide may be appropriate. Various formulations and devices for achieving sustained release are known in the art. In some embodiments, dosage is daily, every other day, every three days, every four days, every five days, or every six days. In some embodiments, dosing frequency is once every week, every 2 weeks, every 4 weeks, every 5 weeks, every 6 weeks, every 7 weeks, every 8 weeks, every 9 weeks, or every 10 weeks; or once every month, every 2 months, or every 3 months, or longer. The progress of this therapy is easily monitored by conventional techniques and assays.

[0553] The dosing regimen (including a composition disclosed herein) can vary over time. In some embodiments, for an adult subject of normal weight, doses ranging from about 0.01 to 1000 mg/kg may be administered. In some embodiments, the dose is between 1 to 200 mg. The particular dosage regimen, i.e., dose, timing and repetition, will depend on the particular subject and that subject's medical history, as well as the properties of the polypeptide or the polynucleotide (such as the half-life of the polypeptide or the polynucleotide, and other considerations well known in the art).

[0554] For the purpose of the present disclosure, the appropriate therapeutic dosage of a composition as described herein will depend on the specific agent (or compositions thereof) employed, the formulation and route of administration, the type and severity of the disease, whether the polypeptide or the polynucleotide is administered for preventive or therapeutic purposes, previous therapy, the subject's clinical history and response to the antagonist, and the discretion of the attending physician. Typically, the clinician will administer a polypeptide until a dosage is reached that achieves the desired result.

[0555] Administration of one or more compositions can be continuous or intermittent, depending, for example, upon the recipient's physiological condition, whether the purpose of the administration is therapeutic or prophylactic, and other factors known to skilled practitioners. The administration of a composition may be essentially continuous over a preselected period of time or may be in a series of spaced dose, e.g., either before, during, or after developing a disease.

[0556] The methods and compositions of the disclosure described herein including embodiments thereof can be administered with one or more additional therapeutic regimens or agents or treatments, which can be co-administered to the mammal.

### Metabolic Syndrome and Cardiovascular Disease

[0557] The ability of gene modification, especially to edit bases directly allows for the precise edit, modification, and/or disruption of genes in vivo without the need to create DSBs and improved methods of treating human disease. For example, Chadwick et. al used cytosine base editing to introduce nonsense mutations into the Pcsk9 gene in adult mice. Delivery of BE3 and a gRNA via adenoviral vector into the liver caused a reduction in plasma PCSK9 levels by 56%. Furthermore, cholesterol levels in the base-edited mice were reduced by roughly 30%. In subsequent work, cytosine base editing to disrupt the Angptl3 gene in adult mice resulted in substantially reduced blood cholesterol and triglyceride levels, and cytosine base editing to disrupt the Pcsk9 gene or the Hpd gene in fetal mice resulted in postnatal reduction of cholesterol levels or cure of the disease hereditary tyrosinemia type 1.

[0558] Cardiovascular disease, obesity, type 2 diabetes, metabolic syndrome may share one or more similar underlying etiologies. The human PCSK9 gene encodes a protein that helps regulate the amount of cholesterol in the bloodstream. The liver protein Proprotein Convertase Subtilisin/Kexin Type 9 (PCSK9) in human is a secreted, globular, auto-activating serine protease that acts as a protein-binding adaptor within endosomal vesicles to bridge a pH-dependent interaction with the low-density lipoprotein receptor (LDL-R) during endocytosis of LDL particles, preventing recycling of the LDL-R to the cell surface and leading to reduction of LDL-cholesterol clearance. PCSK9 orthologs are found across many species. The PCSK9 protein breaks down low-density lipoprotein receptors before they reach the cell surface, so more cholesterol can remain in the bloodstream. As a result, the PCSK9 gene and the encoded PCSK9 protein are attractive targets for regulating cholesterol metabolism, especially in lowering blood cholesterol levels.

[0559] Other targets have also been shown that are associated with decreased plasma levels of triglycerides (TGs), low-density lipoprotein cholesterol (LDL-C), and high-density lipoprotein cholesterol (HDL-C), which leads to a significant reduction in cardiovascular risk. For example, human ANGPTL3 is considered an important new pharmacological target for the treatment of cardiovascular diseases. Experimental evidence demonstrates that anti-ANGPTL3 therapies have an important anti-atherosclerotic effect. Results from phase I clinical trials with a monoclonal anti-ANGPTL3 antibody (evinacumab) and anti-sense oligonucleotide (ASO) clearly show a significant lipid lowering effect.

[0560] Human ANGPTL3 gene is located on chromosome 1p31. Genetic variants of human ANGPTL3 gene have been linked to different plasma lipid profiles. For example, homozygous loss of function (LOF) variants of ANGPTL3 gene cause the levels of all plasma lipoproteins to be greatly reduced. ANGPTL3 is exclusively expressed in the liver and is secreted into circulation where it goes through cleavage by hepatic proprotein convertases. The ANGPTL3 protein is a 460-amino-acid (aa) polypeptide with a distinctive signal peptide sequence, a N-terminal helical domain and a C-terminal globular fibrinogen homology domain. The N-terminal coiled-coil region (17-207aa) affects plasma TG levels via reversibly inhibiting catalytic activity of LPL while the fibrinogen-like domain (207-460aa) binds to integrin αvβ3 receptor and affects angiogenesis, which is similar to the function of angiopoietins. A short linker region (at 221-222 and 224-225) between N- and C-terminal domains is a special zone, which has been verified to be split by furin. Existed results have shown that the truncated form of cleavage ANGPTL3 could reinforce the inhibitory activity of LPL and endothelial lipase (EL), suggesting that the cleavage type of ANGPTL3 may function more effectively.

[0561] Moreover, human apolipoprotein C—III (APOC3) could potentially be another therapeutic target. APOC3 is a protein that in humans is encoded by the APOC3 gene. APOC3 is a component of VLDL. APOC3 inhibits lipoprotein lipase and hepatic lipase. It is also thought to inhibit hepatic uptake of triglyceride-rich particles. An increase in APOC3 levels induces the development of hypertriglyceridemia. Recent evidence suggests an intracellular role for APOC3 in promoting the assembly and secretion of triglyceride-rich VLDL particles from hepatic cells under lipid-rich conditions. However, two naturally occurring point mutations in human apoC3 coding sequence, A23T and K58E have been shown to abolish the intracellular assembly and secretion of triglyceride-rich VLDL particles from hepatic cells.

[0562] Targeted base editing with target genes involved in vascular disease and diabetes as described in Chadwick AC, Wang X, Musunuru K. In vivo base editing of PCSK9 (proprotein convertase subtilisin/kexin type 9) as a therapeutic alternative to genome editing. Arterioscler Thromb Vasc Biol, 2017, 37:1741-7; Chadwick AC, Evitt NH, Lv W, et al. Reduced blood lipid levels with in vivo CRISPR-Cas9 base editing of ANGPTL3. Circulation, 2018, 137:975-7; Rossidis AC, Stratigis JD, Chadwick AC, et al. In utero CRISPR-mediated therapeutic editing of metabolic genes. Nat Med, 2018, 24:1513-8 is incorporated herein by reference in its entirety. While genes involved in lipid metabolism, including PCSK9, have been edited by targeted by current gene editing technologies, there remains a need for precise base editing targeting these genes for improved editing outcomes.

### Pharmaceutical Composition

[0563] In some aspects, provided herein is a pharmaceutical composition comprising the base editor system as provided herein and a pharmaceutically acceptable carrier or excipient.

[0564] In some aspects, provided herein, is a pharmaceutical composition for gene modification comprising a gRNA or sgRNA described herein and a Base editor fusion protein or a nucleic acid sequence encoding the Base editor fusion protein and a pharmaceutically acceptable carrier. The composition for gene modification comprising a gRNA or sgRNA described herein and a Base editor fusion protein or a nucleic acid sequence encoding the Base editor fusion protein can be formulated into pharmaceutical compositions. Pharmaceutical compositions are formulated in a conventional manner using one or more pharmaceutically acceptable inactive ingredients that facilitate processing of the active compounds into preparations that can be used pharmaceutically. Suitable formulations for use in the present disclosure and methods of delivery are generally well known in the art. Proper formulation is dependent upon the route of administration chosen. A summary of pharmaceutical compositions described herein can be found, for example, in Remington: The Science and Practice of Pharmacy, Nineteenth Ed (Easton, Pa.: Mack Publishing Company, 1995); Hoover, John E., Remington's Pharmaceutical Sciences, Mack Publishing Co., Easton, Pennsylvania 1975; Liberman, H. A. and Lachman, L., Eds., Pharmaceutical Dosage Forms, Marcel Decker, New York, N.Y., 1980; and Pharmaceutical Dosage Forms and Drug Delivery Systems, Seventh Ed. (Lippincott Williams & Wilkins 1999), herein incorporated by reference for such disclosure.

[0565] A pharmaceutical composition can be a mixture of a gRNA or sgRNA described herein and a Base editor fusion protein or a nucleic acid sequence encoding the Base editor fusion protein with one or more of other chemical components (i.e., pharmaceutically acceptable ingredients), such as carriers, excipients, binders, filling agents, suspending agents, flavoring agents, sweetening agents, disintegrating agents, dispersing agents, surfactants, lubricants, colorants, diluents, solubilizers, moistening agents, plasticizers, stabilizers, penetration enhancers, wetting agents, anti-foaming agents, antioxidants, preservatives, or one or more combination thereof. The pharmaceutical composition facilitates administration of the gRNA or sgRNA described herein and the Base editor fusion protein or a nucleic acid sequence encoding the Base editor fusion protein to an organism or a subject in need thereof.

[0566] The pharmaceutical compositions of the present disclosure can be administered to a subject using any suitable methods known in the art. The pharmaceutical compositions described herein can be administered to the subject in a variety of ways, including parenterally, intravenously, intradermally, intramuscularly, colonically, rectally, or intraperitoneally. In some embodiments, the pharmaceutical compositions can be administered by intraperitoneal injection, intramuscular injection, subcutaneous injection, or intravenous injection of the subject. In some embodiments, the pharmaceutical compositions can be administered parenterally, intravenously, intramuscularly, or orally.

[0567] For administration by inhalation, the adenovirus described herein can be formulated for use as an aerosol, a mist, or a powder. For buccal or sublingual administration, the pharmaceutical compositions may be formulated in the form of tablets, lozenges, or gels formulated in a conventional manner. In some embodiments, the adenovirus described herein can be prepared as transdermal dosage forms. In some embodiments, the adenovirus described herein can be formulated into a pharmaceutical composition suitable for intramuscular, subcutaneous, or intravenous injection. In some embodiments, the adenovirus described herein can be administered topically and can be formulated into a variety of topically administrable compositions, such as solutions, suspensions, lotions, gels, pastes, medicated sticks, balms, creams, or ointments. In some embodiments, the adenovirus described herein can be formulated in rectal compositions such as enemas, rectal gels, rectal foams, rectal aerosols, suppositories, jelly suppositories, or retention enemas. In some embodiments, the adenovirus described herein can be formulated for oral administration such as a tablet, a capsule, or liquid in the form of aqueous suspensions or solutions selected from the group including, but not limited to, aqueous oral dispersions, emulsions, solutions, elixirs, gels, and syrups.

[0568] In some embodiments, the pharmaceutical composition for gene modification comprising a gRNA or sgRNA described herein and a Type II Cas protein or a nucleic acid sequence encoding the Type II Cas protein further comprises a therapeutic agent. The additional therapeutic agent may modulate different aspects of the disease, disorder, or condition being treated and provide a greater overall benefit than administration of either the replication competent recombinant adenovirus or the therapeutic agent alone. Therapeutic agents include, but are not limited to, a chemotherapeutic agent, a radiotherapeutic agent, a hormonal therapeutic agent, and/or an immunotherapeutic agent. In some embodiments, the therapeutic agent may be a radiotherapeutic agent. In some embodiments, the therapeutic agent may be a hormonal therapeutic agent. In some embodiments, the therapeutic agent may be an immunotherapeutic agent. In some embodiments, the therapeutic agent is a chemotherapeutic agent. Preparation and dosing schedules for additional therapeutic agents can be used according to manufacturers' instructions or as determined empirically by a skilled practitioner. For example, preparation and dosing schedules for chemotherapy are also described in The Chemotherapy Source Book, 4th Edition, 2008, M. C. Perry, Editor, Lippincott, Williams & Wilkins, Philadelphia, PA.

[0569] The subjects that can be treated with gene modification compositions of chemically modified gRNAs or sgRNAs described herein and a Type II Cas protein or a nucleic acid sequence encoding the Type II Cas protein and methods described herein can be any subject with a disease or a condition. For example, the subject may be a eukaryotic subject, such as an animal. In some embodiments, the subject is a mammal, e.g., human. In some embodiments, the subject is a human. In some embodiments, the subject is a non-human animal. In some embodiments, the subject is a fetus, an embryo, or a child. In some embodiments, the subject is a non-human primate such as chimpanzee, and other apes and monkey species; farm animals such as cattle, horses, sheep, goats, pigs; domestic animals such as rabbits, dogs, and cats; laboratory animals including rodents, such as rats, mice, and guinea pigs, and the like.

[0570] In some embodiments, the subject is prenatal (e.g., a fetus), a child (e.g., a neonate, an infant, a toddler, a preadolescent), an adolescent, a pubescent, or an adult (e.g., an early adult, a middle-aged adult, a senior citizen). The human subject can be between about 0 month and about 120 years old, or older. The human subject can be between about 0 and about 12 months old; for example, about 1, 2, 3, 4, 5, 6, 7, 8, 9, 10, 11, or 12 months old. The human subject can be between about 0 and 12 years old; for example, between about 0 and 30 days old; between about 1 month and 12 months old; between about 1 year and 3 years old;

[0571] between about 4 years and 5 years old; between about 4 years and 12 years old; about 1, 2, 3, 4, 5, 6, 7, 8, 9, 10, 11, or 12 years old. The human subject can be between about 13 years and 19 years old; for example, about 13, 14, 15, 16, 17, 18, or 19 years old. The human subject can be between about 20 and about 39 years old; for example, about 20, 21, 22, 23, 24, 25, 26, 27, 28, 29, 30, 31, 32, 33, 34, 35, 36, 37, 38, or 39 years old. The human subject can be between about 40 to about 59 years old; for example, about 40, 41, 42, 43, 44, 45, 46, 47, 48, 49, 50, 51, 52, 53, 54, 55, 56, 57, 58, or 59 years old. The human subject can be greater than 59 years old; for example, about 60, 61, 62, 63, 64, 65, 66, 67, 68, 69, 70, 71, 72, 73, 74, 75, 76, 77, 78, 79, 80, 81, 82, 83, 84, 85, 86, 87, 88, 89, 90, 91, 92, 93, 94, 95, 96, 97, 98, 99, 100, 101, 102, 103, 104, 105, 106, 107, 108, 109, 110, 111, 112, 113, 114, 115, 116, 117, 118, 119, or 120 years old. The human subjects can include male subjects and/or female subjects.

### Lipid Nanoparticle (LNP) Composition

[0572] In some embodiments, LNPs are prepared in accordance with the methods described in Conway, A. et al. 2019 Mol. Ther. 27, 866-877, and Villiger, L. et al 2021 Nat. Biomed. Eng. 5, 179-18, which are incorporated by reference. In some embodiments, LNPs are composed of an amino lipid, a monomethoxypolyethylene glycol (or methoxypoluyethyle glycol) of average molecular weight 2000 Da conjugated to a lipid called PEG-Lipid, cholesterol and 1,2-distearoyl-sn-glycero-3-phosphocholine (DSPC). In some embodiments, LNPs are composed of proprietary ionizable cationic lipid, 1,2-distearoyl-sn-glycero-3-phosphocholine, cholesterol, and a PEG-lipid.

[0573] In some embodiments, LNPs have an average hydrodynamic diameter of about 30-about 160, about 35-about 160, about 40-about 160, about 45-about 160, about 50-about 160, about 55-about 160, about 60-about 160, about 65-about 160, about 70-about 160, about 75-about 160, about 80-about 160, about 85-about 160, about 90-about 160, about 95-about 160, about 100-about 160, about 105-about 160, about 110-about 160, about 115-about 160, about 120-about 160, about 125-about 160, about 130-about 160, about 135-about 160, about 140-about 160, about 145-about 160, about 150-about 160, about 30-about 155, about 30-about 150, about 30-about 145, about 30-about 140, about 30-about 135, about 30-about 130, about 30-about 125, about 30-about 120, about 30-about 115, about 30-about 110, about 30-about 105, about 30-about 100, about 30-about 95, about 30-about 90, about 30-about 85, about 30-about 80, about 30-about 75, about 30-about 70, about 30-about 65, about 30-about 60, about 30-about 55, about 30-about 50, about 30-about 45, about 30-about 40, about 30-about 45, about 35-about 45, about 35-about 50, about 40-about 50, about 40-about 55, about 45-about 55, about 45-about 60, about 50-about 60, about 50-about 65, about 55-about 60, about 55-about 65, about 55-about 70, about 60-about 70, about 60-about 75, about 65-about 75, about 65-about 80, about 70-about 80, about 70-about 85, about 75-about 85, about 75-about 90, about 80-about 90, about 80-about 95, about 85-about 95, about 85-about 100, about 90-about 100, about 90-about 105, about 95-about 105, about 95-about 110, about 100-about 110, about 100-about 115, about 105-about 115, about 105-about 120, about 110-about 120, about 110-about 125, about 115-about 125, about 115-about 130, about 120-about 130, about 120-about 135, about 125-about 135, about 125-about 140, about 130-about 140, about 130-about 145, about 35-about 140, about 45-about 130, about 55-about 120, about 65-about 110, about 75-about 100, or about 85-about 90 nm.

[0574] In some embodiments, LNPs comprise about 1-about 97, about 5-about 97, about 10-about 97, about 15-about 97, about 20-about 97, about 25-about 97, about 30-about 97, about 35-about 97, about 40-about 97, about 45-about 97, about 50-about 97, about 55-about 97, about 60-about 97, about 65-about 97, about 70-about 97, about 75-about 97, about 80-about 97, about 1-about 95, about 1-about 90, about 1-about 85, about 1-about 80, about 1-about 75, about 1-about 70, about 1-about 65, about 1-about 60, about 1-about 55, about 1-about 50, about 1-about 45, about 1-about 40, about 1-about 35, about 1-about 30, about 1-about 25, about 1-about 20, about 1-about 15, about 1-about 10, about 10-about 30, about 10-about 35, about 15-about 35, about 15-about 40, about 20-about 40, about 20-about 45, about 25-about 45, about 25-about 50, about 30-about 50, about 30-about 55, about 35-about 55, about 35-about 60, about 40-about 60, about 40-about 65, about 45-about 65, about 45-about 70, about 50-about 70, about 50-about 75, about 55-about 75, about 55-about 80, or about 60-about 80% of amino lipids (in mol %).

[0575] In some embodiments, LNPs comprise about 1-about 40, about 1-about 38, about 1 about 36, about 1-about 34, about 1-about 32, about 1-about 30, about 1-about 28, about 1-about 26, about 1-about 24, about 1-about 22, about 1-about 20, about 1-about 18, about 1-about 16, about 1-about 14, about 1-about 12, about 1-about 10, about 1-about 8, about 1-about 6, about 1-about 4, about 1-about 2, about 2-about 40, about 4-about 40, about 6-about 40, about 8-about 40, about 10-about 40, about 12-about 40, about 14-about 40, about 16-about 40, about 18-about 40, about 20-about 40, about 22-about 40, about 24-about 40, about 26-about 40, about 28-about 40, about 30-about 40, about 32-about 40, about 34-about 40, about 36-about 40, about 38-about 40, about 2-about 35, about 2-about 30, about 2-about 25, about 2-about 20, about 2-about 15, about 2-about 10, about 2-about 8, about 2-about 6, or about 2-about 4% DSPC (in mol %).

[0576] In some embodiments, LNPs comprise about 1-about 20, about 1-about 19, about 1 about 18, about 1-about 17, about 1-about 16, about 1-about 15, about 1-about 14, about 1-about 13, about 1-about 12, about 1-about 11, about 1-about 10, about 1-about 9, about 1-about 8, about 1-about 7, about 1-about 6, about 1-about 5, about 1-about 4, about 1-about 3, about 2-about 6, about 3-about 7, about 4-about 8, about 5-about 9, about 6-about 10, about 7-about 11, about 8-about 12, about 9-about 13, about 10-about 14, about 11-about 15, about 12-about 16, about 13-about 17, about 14-about 18, about 15-about 19, or about 16-about 20% PEG-Lipid (in mol %),

[0577] In some embodiments, LNPs comprise about 1-about 97, about 5-about 97, about 10-about 97, about 15-about 97, about 20-about 97, about 25-about 97, about 30-about 97, about 35-about 97, about 40-about 97, about 45-about 97, about 50-about 97, about 55-about 97, about 60-about 97, about 65-about 97, about 70-about 97, about 75-about 97, about 80-about 97, about 1-about 95, about 1-about 90, about 1-about 85, about 1-about 80, about 1-about 75, about 1-about 70, about 1-about 65, about 1-about 60, about 1-about 55, about 1-about 50, about 1-about 45, about 1-about 40, about 1-about 35, about 1-about 30, about 1-about 25, about 1-about 20, about 1-about 15, about 1-about 10, about 10-about 30, about 10-about 35, about 15-about 35, about 15-about 40, about 20-about 40, about 20-about 45, about 25-about 45, about 25-about 50, about 30-about 50, about 30-about 55, about 35-about 55, about 35-about 60, about 40-about 60, about 40-about 65, about 45-about 65, about 45-about 70, about 50-about 70, about 50-about 75, about 55-about 75, about 55-about 80, or about 60-about 80% of cholesterol (in mol %).

[0578] In some embodiments, LNPs comprise about 1-about 97, 5-about 97, 10-about 97, 15-about 97, 20-about 97, 25-about 97, 30-about 97, 35-about 97, 40-about 97, 45-about 97, 50-about 97, 55-about 97, 60-about 97, 65-about 97, 70-about 97, 75-about 97, 80-about 97, 1-about 95, 1-about 90, 1-about 85, 1-about 80, 1-about 75, 1-about 70, 1-about 65, 1-about 60, 1-about 55, 1-about 50, 1-about 45, 1-about 40, 1-about 35, 1-about 30, 1-about 25, 1-about 20, 1-about 15, 1-about 10, 10-about 30, 10-about 35, 15-about 35, 15-about 40, 20-about 40, 20-about 45, 25-about 45, 25-about 50, 30-about 50, 30-about 55, 35-about 55, 35-about 60, 40-about 60, 40-about 65, 45 about 65, 45-about 70, 50-about 70, 50-about 75, 55-about 75, 55-about 80, or 60-about 80% of amino lipids; 1-about 40, 1-about 38, 1-about 36, 1-about 34, 1-about 32, 1-about 30, 1-about 28, 1-about 26, 1-about 24, 1-about 22, 1-about 20, 1-about 18, 1-about 16, 1-about 14, 1-about 12, 1-about 10, 1-about 8, 1-about 6, 1-about 4, 1-about 2, 2-about 40, 4-about 40, 6-about 40, 8-about 40, 10-about 40, 12-about 40, 14 about 40, 16-about 40, 18-about 40, 20-about 40, 22-about 40, 24-about 40, 26-about 40, 28-about 40, 30-about 40, 32-about 40, 34-about 40, 36-about 40, 38-about 40, 2-about 35, 2-about 30, 2-about 25, 2-about 20, 2-about 15, 2-about 10, 2-about 8, 2-about 6, or 2-about 4% DSPC; 1-about 20, 1-about 19, 1-about 18, 1-about 17, 1-about 16, 1-about 15, 1-about 14, 1-about 13, 1-about 12, 1-about 11, 1-about 10, 1-about 9, 1-about 8, 1-about 7, 1-about 6, 1-about 5, 1-about 4, 1-about 3, 2-about 6, 3 about 7, 4-about 8, 5-about 9, 6-about 10, 7-about 11, 8-about 12, 9-about 13, 10-about 14, 11-about 15, 12-about 16, 13-about 17, 14-about 18, 15-about 19, and about 16-about 20% PEG-Lipid, with the balance being cholesterol (all in mol %).

### Amino Lipid

[0579] Described herein are LNP compositions comprising an amino lipid, a phospholipid, a PEGlipid, a cholesterol or a derivative thereof, a payload, or any combination thereof. In some embodiments, the LNP composition comprises an amino lipid. In one aspect, disclosed herein is an amino lipid having the structure of. Formula (I), or a pharmaceutically acceptable salt or solvate thereof,

[chemical structure]

[0580] wherein
[0581] each of R¹ and R² is independently C₇-C₂₂ alkyl, C₇-C₂₂ alkenyl, C₃-C₈ cycloalkyl, —C₂-C₁₀ allkylene-L-R⁶, or

[chemical structure]

wherein each of the alkyl, alkylene, alkenyl, and cycloalkyl is independently substituted or unsubstituted;
[0582] each of X, Y, and Z is independently —C(═O)NR⁴—, —NR⁴C(═O)—, —C(═O)O—, —OC(═O)—, —OC(═O)O—, —NR⁴C(═O)O—, —OC(═O)NR⁴—, —NR⁴C(═O)NR⁴—, —NR⁴C(═NR⁴)NR⁴—, —C(═S)NR⁴—, —NR⁴C(═S)—, —C(═O)O—, —OC(═S)—, OC(═S)O—, —NR⁴C(═S)O—, —OC(═S)NR⁴—, -NR⁴° C. (═S)NR⁴—, —C(═O)S—, —SC(═O)—, —OC(═O)S—, —NR⁴C(═O)S—, —SC(═O)NR⁴—, —C(═S)S—, —SC(═S)—, —SC(═S)O—, —NR⁴C(═S)S—, —SC(═S)NR⁴—, —C(═S)S—, —SC(═S)—, —SC(═O)S—, —SC(═S)S—, —NR⁴C(═S)S—, —SC(═S)NR⁴—O, S, or a bond;
[0583] each of L is independently-C(═O)NR⁴—, —NR⁴C(═O)—, —C(═O)O—.—OC(═O)O—, —NR⁴C(═O)O—, —OC(═O)NR⁴—, —NR⁴C(—O)NR⁴—, —NR⁴C(═NR⁴)NR⁴—, —C(═S)NR⁴—, —NR⁴C(═S)—, —C(═O)O—, —OC(═S)—, OC(═S)O—, —NR⁴C(═S)O—, —OC(═S)NR⁴—, —NR⁴C(═S)NR⁴—, —C(═O)S—, SC(═O)—, —OC(═O)S—, —NR⁴C(═O)S—, —SC(═O)NR⁴—, —C(═S)S—, —SC(═S)—, —SC(═S)O—, —NR⁴C(═S)S—, —SC(═S)NR⁴—, —C(═S)S—, —SC(═S)—, —SC(═O)S—, —SC(═S)S—, —NR⁴C(═S)S—, —SC(═S)NR⁴—, O, S, —C₁-C₁₀ alkylene-O—, —C₁-C₁₀ alkylene-C(═O)O—, —C₁-C₁₀ alkylene-OC(═O)—, or a bond, wherein the alkylene is substituted or unsubstituted;
[0584] R³ is —C₀-C₁₀ alkylene-NR⁷R⁸, —C₀-C₁₀ alkylene-heterocycloalkyl, or —C₀-C₁₀ alkylene-heterocycloaryl, wherein the alkylene, heterocycloalkyl and heterocycloaryl is independently substituted or unsubstituted; each of R⁴ is independently hydrogen or substituted or unsubstituted C₁-C₆ alkyl;
[0585] R⁵ is hydrogen or substituted or unsubstituted C₁-C₆ alkyl;
[0586] each of R⁶ is independently substituted or unsubstituted C₃-C₂₂ alkyl or substituted or unsubstituted C₃-C₂₂ alkenyl;
[0587] each of R⁷ and R⁸ is independently hydrogen or substituted or unsubstituted C₁-C₆ alkyl, or R⁷ and R⁸ taken together with the nitrogen to which they are attached form a substituted or unsubstituted C₂-C₆ heterocyclyl;
[0588] p is an integer selected from 1 to 10; and
[0589] each of n, m, and q is independently 0, 1, 2, 3, 4, or 5.

[0590] In some embodiments of Formula (I), if the structure carries more than one asymmetric C-atom, each asymmetric C-atom independently represents racemic, chirally pure R and/or chirally pure S isomer, or a combination thereof.

[0591] In some embodiments, each of n, in, and q in Formula (I) is independently 0, 1, 2, or 3. In some embodiments, each of n, m, and q in Formula (I) is 1.

[0592] In some embodiments, the compound of Formula (1) has a structure of Formula (Ia), or a pharmaceutically acceptable salt or pharmaceutically acceptable solvate thereof:

[chemical structure]

[0593] wherein
[0594] each of R¹ and R² is independently C₇-C₂₂ alkyl, C₇-C₂₂ alkenyl, C₃-C₈ cycloalkyl, —C₂-C₁₀ alkylene-L-R⁶, or

[chemical structure]

wherein each of the alkyl, alkylene, alkenyl, and cycloalkyl is independently substituted or unsubstituted;
[0595] each of X, Y, and Z is independently C(═O)NR⁴—, —NR⁴C(D)-, —C(═O)O—, —OC(═O)—, —OC(═O)O—, —NR⁴C(═O)O—, —OC(═O)NR⁴—, —NR⁴C(═O)NR⁴—, —NR⁴C(═NR⁴)NR⁴—, —C(═S)NR⁴—, —NR⁴C(═S)—, —C(E)O—, —OC(═S)—, OC(═S)O—, —NR⁴C(═S)O—, —OC(═S)NR⁴—, —NR⁴° C. (═S)NR⁴—, —C(═O)S—, —SC(═O)—, —OC(═O)S—, —NR⁴C(═O)S—, —SC(═O)NR⁴—, —C(═S)S—, —SC(═S)—, —SC(═S)O—, —NR⁴C(═S)S—, —SC(═S)NR⁴—, —C(═S)S—, —SC(═S)—, —SC (═O)S—, —SC(═S)S—, —NR⁴C(═S)S—, —SC(═S)NR⁴—, O, S, —C₁-C₁₀ alkylene-O—, or a bond, wherein the alkylene is substituted or unsubstituted;
[0596] each of L is independently-C(═O)NR⁴—, —NR⁴C(═O)—, —C(═O)O—, —OC(═O)—, —OC(═O)O—, —NR⁴C(═O)O—, —OC(═O)NR⁴—, —NR⁴C(═O)NR⁴—, —NR⁴C(═NR⁴)NR⁴—, —C(═S)NR⁴—, —NR⁴C(═S)—, —C(═O)O—, —OC(═S)—, OC(═S)O—, —NR⁴C(═S)O—, —OC(═S)NR⁴—, —NR⁴C(═S)NR⁴_, —C(═O)S—, —SC(═O)—, —OC(═O)S—, —NR⁴C(═O)S—, —SC(═O)NR⁴—, —C(═S)S—, —SC(═S)—, —SC(═S)O—, —NR⁴C(—S)S—, —SC(═S)NR⁴—, —C(═S)S—, —SC(═S)—, —SC(═O)S—, —SC(═S)S—, —NR⁴° C. (═S)S—, —SC(═S)NR⁴—, O, S.-C₁-C₁₀ alkylene-O—, —C₁-C₁₀ alkylene-C(═O)O—, —C₁-C₁₀ alkylene-OC(═O)—, or a bond, wherein the alkylene is substituted or unsubstituted;
[0597] R³ is —C₀-C₁₀ alkylene-NR⁷R⁸, —C₀-C₁₀ alkylene-heterocycloalkyl, or —C₀-C₁₀ alkylene-heterocyclowyl, wherein the alkylene, heterocycloalkyl and heterocycloaryl is independently substituted or unsubstituted;
[0598] each of R⁴ is independently hydrogen or substituted or unsubstituted CI—C₆ alkyl;
[0599] R⁵ is hydrogen or substituted or unsubstituted C₁-C₆ alkyl;
[0600] each of R⁶ is independently substituted or unsubstituted C₃-C₂₂ alkyl or substituted or unsubstituted C₃-C₂₂ alkenyl;
[0601] each of R⁷ and R⁸ is independently hydrogen or substituted or unsubstituted C₁-C₆ alkyl, or R⁷ and R⁸ taken together with the nitrogen to which they are attached form a substituted or unsubstituted C₂-C₆ heterocyclyl; and
[0602] p is an integer selected from 1 to 10.

[0603] In some embodiments of Formula (Ia), if the structure carries more than one asymmetric Catom, each asymmetric C-atom independently represents racemic, chirally pure R and/or chirally pure S isomer, or a combination thereof.

[0604] In some embodiments, R¹ and R² in Formula (I) and Formula (Ia) is independently C₇-C₂₂ alkyl, C₇-C₂₂ alkenyl, —C₂-C₁₀ alkylene-L-R⁶,

[chemical structure]

or wherein each of the alkyl, alkylene, alkenyl, and cycloalkyl is independently substituted or unsubstituted. In some embodiments, R¹ and R² in Formula (I) and Formula (Ia) is independently C₁₀-C₂₀ alkyl, C₁₀-C₂₀ alkenyl.—C₈-C₇ alkylene-L-R⁶, or

[chemical structure]

wherein each of the alkyl, alkylene, alkenyl, and cycloalkyl is independently substituted or unsubstituted. In some embodiments, R¹ in Formula (I) and Formula (Ia) is

[chemical structure]

[0605] In some embodiments, each of L in Formula (I) and Formula (Ia) is independently O, S, —C₁-C₁₀ alkylene-O—, —C₁-C₁₀ alkylene-C(═O)O—, —C₁-C₁₀ alkylene-OC(═O)—, or a bond, wherein the alkylene is substituted or unsubstituted. In some embodiments, each of L in Formula (I) and Formula (Ia) is independently O, S, —C₁-C₃ alkylene-O—, —C₁-C₃ alkylene-C(═O)O—, —C₁-C₃ alkylene-OC(═O)—, or a bond, wherein the alkylene is substituted or unsubstituted. In some embodiments, each of L in Formula (I) and Formula (Ia) is independently O, S, —C₁-C₃ alkylene-O—, —C₁-C₃ alkylene-C(═O)O—, —C₁-C₃ alkylene-OC(═O)—, or a bond, wherein the alkylene is linear or branched unsubstituted alkylene.

[0606] In some embodiments, each of R⁶ in Formula (I) and Formula (Ia) is independently substituted or unsubstituted linear C₃-C₂₂ alkyl or substituted or unsubstituted linear C₃-C₂₂ alkenyl. In some embodiments, each of R⁶ in Formula (I) and Formula (Ia) is independently substituted or unsubstituted C₃-C₂₀ alkyl or substituted or unsubstituted C₃-C₂₀ alkenyl. In some embodiments, each of R⁶ in Formula (I) and Formula (Ia) is independently substituted or unsubstituted C₃-C₁₀ alkyl or substituted or unsubstituted C₃-C₁₀ alkenyl. In some embodiments, each of R⁶ in Formula (I) and Formula (Ia) is independently substituted or unsubstituted C₃-C₁₀ alkyl. In some embodiments, each of R⁶ in Formula (I) and Formula (Ia) is independently substituted or unsubstituted linear C₃-C₁₀ alkyl. In some embodiments, each of R⁶ in Formula (I) and Formula (Ia) is independently substituted or unsubstituted n-pentyl, n-hexyl, n-heptyl, n-octyl, n-nonyl, n-decyl, n-undecyl, or n-dodecyl. In some embodiments, each of R⁶ in Formula (I) and Formula (Ia) is independently substituted or unsubstituted n-octyl. In some embodiments, each of R⁶ in Formula (I) and Formula (Ia) is n-octyl.

[0607] In some embodiments, each of L in Formula (I) and Formula (Ia) is independently-C(═O)O—, —OC(═O)—, —C₁-C₁₀ alkylene-O—, or O. In some embodiments, each of. L in Formula (I) and Formula (Ia) is O. In some embodiments, each of L in Formula (I) and Formula (Ia) is —C₁-C₃ alkylene-O—. In some embodiments, p in Formula (I) and Formula (Ia) is 1, 2, 3, 4, or 5. In some embodiments, p in Formula (I) and Formula (Ia) is 2.

[0608] In some embodiments, R¹ in Formula (I) and Formula (Ia) is

[chemical structure]

[chemical structure]

[0609] In some embodiments, each of R⁴ in Formula (I) and Formula (Ia) is independently H or substituted or unsubstituted C₁-C₄ alkyl. In some embodiments, each of. R⁴ in Formula (I) and Formula (Ia) is independently substituted or unsubstituted linear C₁-C₄ alkyl. In some embodiments, each of R⁴ in Formula (1) and Formula (Ia) is H. In some embodiments, each of R⁴ in Formula (I) and Formula (Ia) is independently H, —CH₃, —CH₂CH₃, —CH₂CH₂CH₃, or —CH (CH₃)₂. In some embodiments, each of R⁴ in Formula (I) and Formula (Ia) is independently H or —CH₃. In some embodiments, each of R⁴ in Formula (1) and Formula (Ia) is —CH₃.

[0610] In some embodiments, X in Formula (I) and Formula (Ia) is —C(═O)O—or —OC(═O))—. In some embodiments, X in Formula (I) and Formula (Ia) is —C(═O)NR⁴-or-NR⁴C(═O)—. In some embodiments, X in Formula (I) and Formula (Ia) is —C(═O)N(CH₃)—, —N(CH₃) C(═O)—, —C(═O) NH—, or-NHC(═O)—. In some embodiments, X in Formula (I) and Formula (Ia) is-C(═O)) NH—, —C(═O)N(CH₃)—.—OC(═O))—, —NHC (═O)—, —N(CH₃) C(═O))—, —C(═O)O—, —OC(═O)O—, —NHC(═O)O—, —N(CH₃) C(═O)O—, —OC(═O)) NH—, —OC(═O)N(CH₃)—, —NHC(═O) NH—, —N(CH₃) C(═O)) NH—, —NHC(═O)N(CH₃)—, —N(CH₃) C(═O)N(CH₃)—, NHC(═NH) NH—, —N(CH₃) C(═NH) NH—, —NHC(═NH)N(CH₃)—, —N(CH₃) C(═NH)N(CH₃)—, NHC(═NMe) NH—, —N(CH₃) C(═NMe) NH—, —NHC(═NMe)N(CH₃)—, or-N (CH₃) C(═NMe)N(CH₃)—.

[0611] In some embodiments. R² in Formula (I) and Formula (Ia) is C₇-C₂₂ alkyl, C₇-C₂₂ alkenyl, —C₂-C₁₀ alkylene-L-R⁶, or

[chemical structure]

wherein each of the alkyl, alkylene, alkenyl, and cycloalkyl is independently substituted or unsubstituted. In some embodiments, R² in Formula (I) and Formula (Ia) is substituted or unsubstituted C₇-C₂₂ alkyl or substituted or unsubstituted C₇-C₂₂ alkenyl. In some embodiments, R² in Formula (I) and Formula (Ia) is substituted or unsubstituted linear C₇-C₂₂ alkyl or substituted or unsubstituted linear C₇-C₂₂ alkenyl. In some embodiments, R² in Formula (I) and Formula (Ia) is substituted or unsubstituted C₁₀-C₂₀ alkyl or substituted or unsubstituted C₁₀-C₂₀ alkenyl. In some embodiments, R² in Formula (I) and Formula (Ia) is unsubstituted C₁₀-C₂₀ alkyl. In some embodiments, R² in Formula (I) and Formula (Ia) is unsubstituted C₁₀-C₂₀ alkenyl. In some embodiments, R² in Formula (I) and Formula (Ia) is —C₂-C₁₀ alkylene-L-R⁶. In some embodiments, R² in Formula (I) and Formula (Ia) is —C₂-C₁₀ alkylene-C(═O)O—R⁶ or —C₂-C₁₀ alkylene-OC(═O)—R⁶.

[0612] In some embodiments, R² in Formula (I) and Formula (Ia) is

[chemical structure]

[0613] In some embodiments, Y in Formula (I) and Formula (Ia) is —C(═O)O—or —OC(═O)—. In some embodiments, Y in Formula (I) and Formula (Ia) is —C(═O)NR⁴-or-NR⁴C(═O)—. In some embodiments, Y in Formula (I) and Formula (Ia) is —C(═O)N(CH₃)—, —N(CH₃) C(═O)—, —C(═O) NH—, or-NHC(═O)—. In some embodiments, Y in Formula (I) and Formula (Ia) is-OC(═O)O—, —NR⁴C(═O)O—, —OC(═O)NR⁴—, or-NR⁴C(═O)NR⁴—. In some embodiments. Y in Formula (I) and Formula (Ia) is-OC(═O)O—, —NHC(═O)O—, —OC(═O) NH—, —NHC(═O) NH—, —N (CH₃) C(═O)O—.—OC(═O)N(CH₃)—, —N(CH₃) C(═O)N(CH₃)-or-N(CH₃) C(═O) NH—. In some embodiments, Y in Formula (I) and Formula (Ia) is-OC(═O)O—, —NHC(═O)O—, —OC(═O) NH—, or-NHC(═O) NH—.

[0614] In some embodiments, R³ in Formula (I) and Formula (Ia) is —C₀-C₁₀ alkylene-NR⁷R⁸ or —C₀-C₁₀ alkylene-heterocycloalkyl, wherein the alkylene and heterocycloalkyl is independently substituted or unsubstituted. In some embodiments, R³ in Formula (I) and Formula (Ta) is —C₀-C₁₀ alkylene-NR⁷R⁸. In some embodiments, R³ in Formula (I) and Formula (Ia) is —C₁-C₆ alkylene-NR⁷R⁸. In some embodiments, R³ in Formula (I) and Formula (Ia) is —C₁-C₄ alkylene-NR⁷R⁸. In some embodiments, R³ in Formula (I) and Formula (Ia) is —C₁-alkylene-NR⁷R⁸. In some embodiments, R³ in Formula (I) and Formula (Ia) is —C₂—-alkylene-NR⁷R⁸. In some embodiments, R³ in Formula (I) and Formula (Ia) is-C₃-alkylene-NR⁷R⁸. In some embodiments, R³ in Formula (I) and Formula (Ia) is —C₄-alkylene-NR⁷R⁸. In some embodiments, R³ in Formula (I) and Formula (Ia) is —C₅-alkylene-NR⁷R⁸. In some embodiments, R³ in Formula (I) and Formula (Ia) is —C₀-C₁₀ alkylene-heterocycloalkyl. In some embodiments, R³ in Formula (I) and Formula (Ia) is —C₁-C₆ alkylene-heterocycloalkyl, wherein the heterocycloalkyl comprises 1 to 3 nitrogen and 0-2 oxygen. In some embodiments, R³ in Formula (I) and Formula (Ia) is —C₁-C₆ alkylene-heterocycloaryl.

[0615] In some embodiments, each of R⁷ and R⁸ in Formula (I) and Formula (Ia) is independently hydrogen or substituted or unsubstituted C₁-C₆ alkyl. In some embodiments, each of R⁷ and R⁸ is independently hydrogen or substituted or unsubstituted C₁-C₃ alkyl. In some embodiments, each of R⁷ and R⁸ is independently substituted or unsubstituted C₁-C₃ alkyl. In some embodiments, each of R⁷ and R⁸ is independently-CH₃, —CH₂CH₃, —CH₂CH₂CH₃, or —CH (CH₃)₂. In some embodiments, each of R and R⁸ is CH₃. In some embodiments, each of R⁷ and R⁸ is —CH₂CH₃.

[0616] In some embodiments, R⁷ and R⁸ in Formula (I) and Formula (Ia) taken together with the nitrogen to which they are attached form a substituted or unsubstituted C₂-C₆ heterocyclyl. In some embodiments, R⁷ and R⁸ taken together with the nitrogen to which they are attached form a substituted or unsubstituted C₂-C₆ heterocycloalkyl. In some embodiments, R⁷ and R⁸ taken together with the nitrogen to which they are attached form a substituted or unsubstituted 3-7 membered heterocycloalkyl.

[0617] In some embodiments, R³ in Formula (I) and Formula (Ia) is

[chemical structure]

[0618] In some embodiments. R³ in Formula (I) and Formula (Ia) is

[chemical structure]

[0619] In some embodiments. R³ in Formula (1) and Formula (Ia) is

[chemical structure]

[0620] In some embodiments, Z in Formula (I) and Formula (Ia) is —C(═O)O—or —OC(═O)—. In some embodiments, Z in Formula (1) and Formula (Ia) is —C(═O)NR⁴-or-NR⁴C(═O)—. In some embodiments, Z in Formula (I) and Formula (Ia) is —C(═O)N(CH₃)—, —N(CH₃) C(═O)—, —C (═O) NH—, or-NHC(═O)—. In some embodiments, Z in Formula (I) and Formula (Ia) is-OC(═O)O—, —NR⁴C(═O)O—, —OC(O)NR⁴—, or-NR⁴C(═O)NR⁴—. In some embodiments. Z in Formula (I) and Formula (Ia) is-OC(═O)O—, —NHC(═O)O—, —OC(═O) NH—, —NHC(═O) NH—, —N (CH₃) C(═O)O—, —OC(═O)N(CH₃)—, —N(CH₃) C(═O)N(CH₃)—, —NHC(═O)N(CH₃)-or-N (CH₃) C(═O) NH—. In some embodiments, Y in Formula (I) and Formula (Ia) is-OC(═O)O—, —NHC(═O)O—, —OC(═O) NH—, or-NHC(═O) NH—.

[0621] In some embodiments, R⁵ in Formula (I) and Formula (Ia) is hydrogen or substituted or unsubstituted C₁-C₃ alkyl. In some embodiments, R⁵ in Formula (I) and Formula (Ia) is H, —CH₃, —CH—) CH₃, —CH₂CH₂CH₃, or —CH (CH₃)₂. In some embodiments, R⁵ in Formula (I) and Formula (Ia) is H.

[0622] In some embodiments, the LNP comprises a plurality of amino lipids. For example, the LNP composition can comprise 2, 3, 4, 5, 6.7, 8, 9. 10, or more amino lipids. For another example, the LNP composition can comprise at least 2, at least 3, at least 4, at least 5, at least 6, at least 7, at least 9, at least 10, or at least 20 amino lipids. For yet another example, the LNP composition can comprise at most 2, at most 3, at most 4, at most 5, at most 6, at most 7, at most 9, at most 10, at most 20, or at most 30 amino lipids.

[0623] In some embodiments, the LNP composition comprises a first amino lipid. In some embodiments, the LNP composition comprises a first amino lipid and a second amino lipid. In some embodiments, the LNP composition comprises a first amino lipid, a second amino lipid, and a third amino lipid. In some embodiments, the LNP composition comprises a first amino lipid, a second amino lipid, a third amino lipid, and a fourth amino lipid. In some embodiments, the LNP composition does not comprise a fourth amino lipid. In some embodiments, the LNP composition does not comprise a third amino lipid. In some embodiments, a molar ratio of the first amino lipid to the second amino lipid is from about 0.1 to about 10. In some embodiments, a molar ratio of the first amino lipid to the second amino lipid is from about 0.20 to about 5. In some embodiments, a molar ratio of the first amino lipid to the second amino lipid is from about 0.25 to about 4. In some embodiments, a molar ratio of the first amino lipid to the second amino lipid is about 0.25, about 0.33, about 0.5, about 1, about 2, about 3, or about 4.

[0624] In some embodiments, a molar ratio of the first amino lipid: the second amino lipid: the third amino lipid is about 4:1:1. In some embodiments, a molar ratio of the first amino lipid: the second amino lipid: the third amino lipid is about 1:1:1. In some embodiments, a molar ratio of the first amino lipid: the second amino lipid: the third amino lipid is about 2:1:1. In some embodiments, a molar ratio of the first amino lipid: the second amino lipid: the third amino lipid is about 2:2:1. In some embodiments, a molar ratio of the first amino lipid: the second amino lipid: the third amino lipid is about 3:2:1. In some embodiments, a molar ratio of the first amino lipid: the second amino lipid: the third amino lipid is about 3:1:1. In some embodiments, a molar ratio of the first amino lipid: the second amino lipid: the third amino lipid is about 5:1:1. In some embodiments, a molar ratio of the first amino lipid: the second amino lipid: the third amino lipid is about 3:3:1. In some embodiments, a molar ratio of the first amino lipid: the second amino lipid: the third amino lipid is about 4:4:1.

[0625] In some embodiments, the LNP composition comprises one or more amino lipids. In some embodiments, the one or more amino lipids comprise from about 40 mol % to about 65 mol % of the total lipid present in the particle. In some embodiments, the one or more amino lipids comprise about 40 mol %, about 41 mol %, about 42 mol %, about 43 mol %, about 44 mol %, about 45 mol %, about 46 mol %, about 47 mol %, about 48 mol %, about 49 mol %, about 50 mol %, about 51 mol %, about 52 mol %, about 53 mol %, about 54 mol %, about 55 mol %, about 56 mol %, about 57 mol %, about 58 mol %, about 59 mol %, about 60 mol %, about 61 mol %, about 62 mol %, about 63 mol %, about 64 mol %, or about 65 mol % of the total lipid present in the particle. In some embodiments, the first amino lipid comprises from about 1 mol % to about 99 mol % of the total amino lipids present in the particle. In some embodiments, the first amino lipid comprises from about 16.7 mol % to about 66.7 mol % of the total amino lipids present in the particle. In some embodiments, the first amino lipid comprises from about 20 mol % to about 60 mol % of the total amino lipids present in the particle.

[0626] In some embodiments, the amino lipid is an ionizable lipid. An ionizable lipid can comprise one or more ionizable nitrogen atoms. In some embodiments, at least one of the one or more ionizable nitrogen atoms is positively charged. Tn some embodiments, at least 10 mol %, 20 mol %, 30 mol %, 40 mol %, 50 mol %, 60 mol %, 70 mol %, 80 mol %. 90 mol %, 95 mol %, or 99 mol % of the ionizable nitrogen atoms in the LNP composition are positively charged. In some embodiments, the amino lipid comprises a primary amine, a secondary amine, a tertiary amine, an imine, an amide, a guanidine moiety, a histidine residue, a lysine residue, an arginine residue, or any combination thereof. In some embodiments, the amino lipid comprises a primary amine, a secondary amine, a tertiary amine, a guanidine moiety, or any combination thereof. In some embodiments, the amino lipid comprises a tertiary amine.

[0627] In some embodiments, the amino lipid is a cationic lipid. In some embodiments, the amino lipid is an ionizable lipid. In some embodiments, the amino lipid comprises one or more nitrogen atoms. In some embodiments, the amino lipid comprises one or more ionizable nitrogen atoms. Exemplary cationic and/or ionizable lipids include, but are not limited to, 3-(didodecylamino)-N1,N1,4-tri dodecyl-1-piperazineethan amine (KL10), N142-(didodecylamino) ethyl]-N1,N4,N4-tridodecyl-1,4-piperazinediethanamine (KL22), 14,25-ditridecyl-15,18,21,24-tetraaza-octatriacontane (KL25), 1,2-dilinoleyloxy-N,N-dimethylaminopropane (DLin-DMA), 2,2-dilinoleyl-4-dimethylaminomethyl-[1,3]-dioxolane (DLin-K-DMA), heptatriaconta-6,9,28,31-tetraen-19-yl 4-(dimethylamino) butanoate (DLin-MC 3-DMA), 2,2-dilinoley 1-4-(2-dimethylaminoethy 1)-[1,3]-dioxolane (DLin-KC2-DMA), 1,2-dioleyloxy-N,N-dimethylaminopropane (DODMA), 2-({8-[(3)-cholest-5-en-3-yloxy]octyl}oxy)-N,N-dimethyl-3-[(9Z,12Z)-octadeca-9,12-dien-1-yloxy]propan-1-amine (Octyl-CLinDMA), (2R)-2-({8-[(3B)-cholest-5-en-3-yloxy]octyl}oxy)-N,N-dimethy 1-3-[(9Z,12Z)-octadeca-9,12-dien-1-yloxy]propan-1-amine (Octyl-CLinDMA (2R)), and (2S)-2-({8-[(3B)-cholest-5-en-3-yloxy]octyl}oxy)-N,N-dimethy 1-3-[(9Z,12Z)-octadeca-9,12-dien-1-yloxy]propan-1-amine (Octyl-CLinDMA (2S)).

[0628] In some embodiments, an amino lipid described herein can take the form of a salt, such as a pharmaceutically acceptable salt. All pharmaceutically acceptable salts of the amino lipid are encompassed by this disclosure. As used herein, amino lipid also includes its pharmaceutically acceptable salts, and its diastereomeric, enantiomeric, and epimeric forms.

[0629] In some embodiments, an amino lipid described herein, possesses one or more stereocenters and each stereocenter exists independently in either the R or S configuration. The lipids presented herein include all diastereomeric, enantiomeric, and epimeric forms as well as the appropriate mixtures thereof. The lipids provided herein include all cis. trans, syn, anti, entgegen (E), and zusammen (Z) isomers as well as the appropriate mixtures thereof. In certain embodiments, lipids described herein are prepared as their individual stereoisomers by reacting a racemic mixture of the compound with an optically active resolving agent to form a pair of diastereoisomeric compounds/salts, separating the diastereomers and recovering the optically pure enantiomers. In some embodiments, resolution of enantiomers is carried out using covalent diastereomeric derivatives of the compounds described herein. In another embodiment, diastereomers are separated by separation/resolution techniques based upon differences in solubility. In other embodiments, separation of stereoisomers is performed by chromatography or by the forming diastereomeric salts and separation by recrystallization, or chromatography, or any combination thereof. Jean Jacques, Andre Collet, Samuel H. Wilen, “Enantiomers, Racemates and Resolutions”, John Wiley and Sons, Inc., 1981. In one aspect, stereoisomers are obtained by stereoselective synthesis.

[0630] In some embodiments, the lipids such as the amino lipids are substituted based on the structures disclosed herein. In some embodiments, the lipids such as the amino lipids are unsubstituted. In another embodiment, the lipids described herein are labeled isotopically (e.g. with a radioisotope) or by another other means, including, but not limited to, the use of chromophores or fluorescent moieties, bioluminescent labels, or chemiluminescent labels.

[0631] Lipids described herein include isotopically-labeled compounds, which are identical to those recited in the various formulae and structures presented herein, but for the fact that one or more atoms are replaced by an atom having an atomic mass or mass number different from the atomic mass or mass number usually found in nature. Examples of isotopes that can be incorporated into the present lipids include isotopes of hydrogen, carbon, nitrogen, oxygen, sulfur, fluorine and chlorine, such as, for example, ²H, ³H, ¹³C, ¹⁴C, ¹⁵N, ¹⁸O, ¹⁷O, ³⁵S, ¹⁸F, ³⁶Cl. In one aspect, isotopically-labeled lipids described herein, for example those into which radioactive isotopes such as 3H and 14C are incorporated, are useful in drug and/or substrate tissue distribution assays. In one aspect, substitution with isotopes such as deuterium affords certain therapeutic advantages resulting from greater metabolic stability, such as, for example, increased in vivo half-life or reduced dosage requirements.

[0632] In some embodiments, the asymmetric carbon atom of the amino lipid is present in enantiomerically enriched form. In certain embodiments, the asymmetric carbon atom of the amino lipid has at least 50% enantiomeric excess, at least 60% enantiomeric excess, at least 70% enantiomeric excess, at least 80% enantiomeric excess, at least 90% enantiomeric excess, at least 95% enantiomeric excess, or at least 99% enantiomeric excess in the(S)- or (R)-configuration.

[0633] In some embodiments, the disclosed amino lipids can be converted to N-oxides. In some embodiments, N-oxides are formed by a treatment with an oxidizing agent (e.g., 3-chloroperoxybenzoic acid and/or hydrogen peroxides). Accordingly, disclosed herein are N-oxide compounds of the described amino lipids, when allowed by valency and structure, which can be designated as N O or N⁺—O⁻. In some embodiments, the nitrogen in the compounds of the disclosure can be converted to N-hydroxy or N-alkoxy. For example, N-hydroxy compounds can be prepared by oxidation of the parent amine by an oxidizing agent such as ra-CPBA. All shown and claimed nitrogencontaining compounds are also considered. Accordingly, also disclosed herein are N-hydroxy and Nal koxy (e.g., N—OR, wherein R is substituted or unsubstituted C₁-C₆ alkyl, C₁-C₆ alkenyl, C₁-C₆ alkynyl, 3-14-membered carbocycle or 3-14-membered heterocycle) derivatives of the described amino lipids.

### PEG-Lipid

[0634] As used herein, a “PEG lipid” or “PEG-lipid” refers to a lipid comprising a polyethylene glycol component.

[0635] In some embodiments, the described LNP composition comprises a PEG-lipid. In some embodiments, the described LNP composition comprises two or more PEG-lipids. Exemplary PEG-lipids include, but are not limited to, the lipids. Exemplary PEG-lipids also include, but are not limited to, PEG-modified phosphatidylethanolamines, PEG-modified phosphatidic acids, PEG-modified ceramides, PEG-modified dialkylamines, PEG-modified diacylglycerols, PEG-modified dialkylglycerols, and mixtures thereof. For example, the one or more PEG-lipids can comprise PEG-c-DOMG, PEG-DMG, PEG-DLPE, PEG-DMPE, PEG-DPPC, a PEG-DSPE lipid, or a combination thereof. In some embodiments, PEG moiety is an optionally substituted linear or branched polymer of ethylene glycol or ethylene oxide. In some embodiments, the PEG moiety is substituted, e.g., by one or more alkyl, alkoxy, acyl, hydroxy, or aryl groups. In some embodiments, the PEG moiety includes PEG copolymer such as PEG-polyurethane or PEG-polypropylene (see, e.g., j. Milton Harris, Poly (ethylene glycol) chemistry: biotechnical and biomedical applications (1992)). In some embodiments, the PEG moiety does not include PEG copolymers, e.g., it may be a PEG monopolymer. Exemplary PEG-lipids include, but are not limited to, PEG-dilauroylglycerol, PEG-dimyristoylglycerol (PEG-DMG), PEG-dipalmitoylglycerol, PEG-distearoylgiycerol (PEG-DSPE), PEG-dipalmitoylglycerol, PEG-disteiylglycerol, PEG-dilawylglycamide, PEG-dimyristylglycamide, PEG-dipalmitoylglycamide, PEG-disterylglycamide, PEG-cholesterol, and PEG-DMB (3,4-Ditetradecoxylbenzyl-[omega]-methyl-poly (ethylene glycol) ether), 1,2-dimyristoyl-sn-glycero-3-phosphoethanolamine-N-[methoxy (polyethylene glycol)-2000]).

[0636] In some embodiments, a PEG-lipid is a PEG-lipid conjugate, for example, PEG coupled to dialkyloxypropyls (e.g., PEG-DAA conjugates), PEG coupled to diacylglycerols (e.g., PEG-DAG conjugates), PEG coupled to cholesterol, PEG coupled to phosphatidylethanolamines, and PEG conjugated to ceramides (see, e.g., U.S. Pat. No. 5,885,613), cationic PEG lipids, polyoxazoline (POZ)-lipid conjugates (e.g. POZ-DAA conjugates; see, e.g., WO 2010/006282), polyamide oligomers (e.g., ATTA-lipid conjugates), and mixtures thereof.

[0637] A PEG-lipid can comprise one or more ethylene glycol units, for example, at least 1, at least 2, at least 5, at least 10, at least 20, at least 30, at least 40, at least 50, at least 60, at least 70, at least 80, at least 90, at least 100, at least 120, or at least 150 ethylene glycol units. In some embodiments, a number average molecular weight of the PEG-lipids is from about 200 Da to about 5000 Da. In some embodiments, a number average molecular weight of the PEG-lipids is from about 500 Da to about 3000 Da. In some embodiments, a number average molecular weight of the PEG-lipids is from about 750 Da to about 2500 Da. In some embodiments, a number average molecular weight of the PEG-lipids is from about 750 Da to about 2500 Da. In some embodiments, a number average molecular weight of the PEG-lipids is about 500 Da, about 750 Da, about 1000 Da, about 1250 Da, about 1500 Da, about 1750 Da, or about 2000 Da. In some embodiments, a polydispersity index (PD1) of the one or more PEG-lipids is smaller than 2. In some embodiments, a PDI of the one or more PEG-lipids is at most 1.1, 1.2, 1.3, 1.4, 1.5, 1.6, 1.7, 1.8, 1.9, 2.0, 2.1, 2.2, 2.3. 2.4, 2.5, 2.6, 2.7, 2.8, 2.9, or 3.0. In some embodiments, a PDI of the one or more PEG-lipids is at least 1.1, 1.2, 1.3, 1.4, 1.5, 1.6, 1.7, 1.8, 1.9, 2.0, 2.1, 2.2, 2.3, 2.4, 2.5, 2.6, 2.7, 2.8, 2.9, or 3.0.

[0638] In some embodiments, the PEG-lipid comprises from about 0.1 mol % to about 10 mol % of the total lipid present in the particle. In some embodiments, the PEG-lipid comprises from about 0.1 mol % to about 6 mol % of the total lipid present in the particle. In some embodiments, the PEG-lipid comprises from about 0.5 mol % to about 5 mol % of the total lipid present in the particle. In some embodiments, the PEG-lipid comprises from about 1 mol % to about 3 mol % of the total lipid present in the particle. In some embodiments, the PEG-lipid comprises about 2.0 mol % to about 2.5 mol % of the total lipid present in the particle. In some embodiments, the PEG-lipid comprises about 1 mol %, about 1.1 mol %, about 1.2 mol %, about 1.3 mol %, about 1.4 mol %, about 1.5 mol %, about 1.6 mol %, about 1.7 mol %, about 1.8 mol %, about 1.9 mol %, about 2.0 mol %, about 2.1 mol %, about 2.2 mol %, about 2.3 mol %, about 2.4 mol %, about 2.5 mol %, about 2.6 mol %, about 2.7 mol %, about 2.8 mol %, about 2.9 mol %, or about 3.0 mol % of the total lipid present in the particle.

[0639] In some embodiments, the LNP composition comprises a plurality of PEG-lipids, for example, at least 2, 3, 4, 5, 6, 7, 8, 9, 10, or more distinct PEG-lipids.

### Phospholipid

[0640] As used herein, a “phospholipid” refers to a lipid that includes a phosphate moiety and one or more carbon chains, such as unsaturated fatty acid chains. A phospholipid may include one or more multiple (e.g., double or triple) bonds. In some embodiments, a phospholipid may facilitate fusion to a membrane. For example, a cationic phospholipid may interact with one or more negatively charged phospholipids of a membrane (e.g., a cellular or intracellular membrane). Fusion of a phospholipid to a membrane may allow one or more elements of an LNP to pass through the membrane, i.e., delivery of the one or more elements to a cell.

[0641] In some embodiments, the described LNP composition comprises a phospholipid. In some embodiments, the phospholipid comprises a lipid selected from the group consisting of: phosphatidylcholine (PC), phosphatidylethanolamine amine, glycerophospholipid, sphingophospholipids, Guriserohosuhono, sphingolipids phosphono lipids, natural lecithins, and hydrogenated phospholipid. In some embodiments, the phospholipid comprises a phosphatidylcholine. Exemplary phosphatidylcholines include, but are not limited to, soybean phosphatidylcholine, egg yolk phosphatidylcholine (EPC), distearoylphosphatidylcholine, 1,2-distearoyl-sn-glycero-3-phosphocholine (DSPC), dipalmitoyl phosphatidylcholine, dipalmitoyl-sn-glycero-3-phosphocholine (DPPC), 2-Oleoy 1-1-palmitoyl-sn-glycero-3-phosphocholine (POPC), dimyristoyl phosphatidylcholine (DMPC), and dioleoyl phosphatidylcholine (DOPC). In certain specific embodiments, the phospholipid is DSPC.

[0642] In some embodiments, the phospholipid comprises a phosphatidylethanolamine amine. In some embodiments, the phosphatidylethanolamine amine is distearoyl phosphatidylethanolamine (DSPE), dipalmitoyl phosphatidyl ethanolamine (DPPE), 1,2-dioleoyl-sn-glycero-3-phosphoethanolamine (DOPE), dimyristoyl phosphoethanolamine (DMPE), 16-0-Monome Le PE, 16-0-dimethyl PE, 18-1-trans PE, palmitoyl oleoyl-phosphatidylethanolamine (POPE), or 1-stearoy 1-2-oleoyl-phosphatidyl ethanolamine (SOPE). In some embodiments, the phospholipid comprises a glycerophospholipid. In some embodiments, the glycerophospholipid is plasmalogen, phosphatidate, or phosphatidylcholine. In some embodiments, the glycerophospholipid is phosphatidylserine, phosphatidic acid, phosphatidylglycerol, phosphatidylinositol, palmitoyl oleoyl phosphatidylglycerol (POPG), or lysophosphatidylcholine. In some embodiments, the phospholipid comprises a sphingophospholipid. In some embodiments, the sphingophospholipid is sphingomyelin, ceramide phosphoethanolamine, ceramide phosphoglycerol, or ceramide phosphoglycerophosphoric acid. In some embodiments, the phospholipid comprises a natural lecithin. In some embodiments, the natural lecithin is egg yolk lecithin or soybean lecithin. Tn some embodiments, the phospholipid comprises a hydrogenated phospholipid. In some embodiments, the hydrogenated phospholipid is hydrogenated soybean phosphatidylcholine. In some embodiments, the phospholipid is selected from the group consisting of: phosphatidylcholine, phosphatidylethanolamine, phosphatidylserine, phosphatidylinositol, phosphatidic acid, palmitoyloleoyl phosphatidylcholine, lysophosphatidylcholine, lysophosphatidylethanolamine, dipalmitoylphosphatidylcholine, dioleoylphosphatidylcholine, distearoylphosphatidylcholine, and dilinoleoylphosphatidylcholine.

[0643] In some embodiments, the phospholipid comprises a lipid selected from: 1,2-distearoyl-sn-glycero-3-phosphocholine (DSPC). 1,2-dioleoyl-sn-glycero-3-phosphoethanolamine (DOPE), 1,2-dilinoleoyl-sn-glycero-3-phosphocholine (DLPC), 1,2-dimyristoyl-sn-glycero-phosphocholine (DMPC), 1,2-dioleoyl-sn-glycero-3-phosphocholine (DOPC), 1,2-dipalmitoyl-sn-glycero-3-phosphocholine (DPPC), 1,2-diundecanoyl-sn-glycero-phosphocholine (DUPC), 2-Oleoy 1-1-pahnitoyl-sn-glycero-3-phosphocholine (POPC), 1,2-di-O-octadecenyl-sn-glycero-3-phosphocholine (18:0 Diether PC), 1-oleoyl-2-cholesterylhemisuccinoyl-sn-glycero-3-phosphocholine (OChemsPC), 1-hexadecyl-sn-glycero-3-phosphocholine (C₁₆ Lyso PC), 1,2-dilinolenoyl-sn-glycero-3-phosphocholine, 1,2-di arachidonoyl-sn-glycero-3-phosphocholine, 1,2-di docosahexaenoyl-sn-glycero-3-phosphocholine, 1,2-diphytanoyl-sn-glycero-3-phosphoethanolamine (ME 16.0 PE), 1,2-distearoyl-sn-glycero-3-phosphoethanolamine, 1,2-dilinoleoyl-sn-glycero-3-phosphoethanolamine, 1,2-dilinolenoyl-sn-glycero-3-phosphoethanolamine, 1,2-diaracliidonoyl-sn-gly cero-3-phosphoethanol amine, 1,2-di docosahexaenoyl-sn-glycero-3-phosphoethanolamine, 1,2-diol eoy I-sn-glycero-3-phospho-rac-(1-glycerol) sodium salt (DOPG), and sphingomyelin.

[0644] A phospholipid can comprise a phospholipid moiety and one or more fatty acid moieties. A phospholipid moiety can comprise phosphatidyl choline, phosphatidyl ethanolamine, phosphatidyl glycerol, phosphatidyl serine, phosphatidic acid, 2-lysophosphatidyl choline, or a sphingomyelin. A fatty acid moiety can comprise lauric acid, myristic acid, myristoleic acid, palmitic acid, palmitoleic acid, stearic acid, oleic acid, linoleic acid, alpha-linolenic acid, erucic acid, phytanoic acid, arachidic acid, arachidonic acid, eicosapentaenoic acid, behenic acid, docosapentaenoic acid, or docosahexaenoic acid. In some specific embodiments, a phospholipid can be functionalized with or cross-linked to one or more alkynes, which may undergo a copper-catalyzed cycloaddition upon exposure to an azide.

[0645] In some embodiments, the LNP composition comprises a plurality of phospholipids, for example, at least 2, 3, 4, 5, or more distinct phospholipids. In some embodiments, the phospholipid comprises from 1 mol % to 20 mol % of the total lipid present in the particle. In some embodiments, the phospholipid comprises from about 5 mol % to about 15 mol % of the total lipid present in the particle. In some embodiments, the phospholipid comprises from about 8 mol % to about 12 mol % of the total lipid present in the particle. In some embodiments, the phospholipid comprises from about 9 mol %, 10 mol %, or 11 mol % of the total lipid present in the particle.

### Cholesterol

[0646] In some embodiments, the LNP composition comprises a cholesterol or a derivative thereof. In some embodiments, the LNP composition comprises a structural lipid. The structural lipid can be selected from steroid, sterol, alkyl resoreinol, cholesterol or derivative thereof, fecosterol, sitosterol, ergosterol, campesterol, stigmasterol, brassicasterol, tomatidine, tomatine, ursolic acid, alphatocopherol, and a combination thereof. In some embodiments, the structural lipid is a corticosteroid such as prednisolone, dexamethasone, prednisone, and hydrocortisone. In some embodiments, the cholesterol or derivative thereof is cholesterol, 5-heptadecylresorcinol, or cholesterol hemisuccinate. Tn some embodiments, the cholesterol or derivative thereof is cholesterol.

[0647] In some embodiments, the cholesterol or derivative thereof is a cholesterol derivative. In some embodiments, the cholesterol derivative is a polar cholesterol analogue. In some embodiments, the polar cholesterol analogue is 5a-cholestanol, 513-coprostanol, cholesteryl-(2′-hydroxy)-ethyl ether, cholestely 1-(4′-hydroxy)-butyl ether, or 6-ketocholestanol. In some embodiments, the polar cholesterol analogue is cholestery 1-(4′-hydroxy)-butyl ether. In some embodiments, the cholesterol derivative is a non-polar cholesterol analogue. In some embodiments, the non-polar cholesterol analogue is 5acholestane, cholestenone, 5a-cholestanone, 5ß-cholestanone, or cholestetyl decanoate.

[0648] In some embodiments, the cholesterol or the derivative thereof comprises from 20 mol % to 50 mol % of the total lipid present in the particle. In some embodiments, the cholesterol or the derivative thereof comprises about 20 mol %, about 21 mol %, about 22 mol %, about 23 mol %, about 24 mol %, about 25 mol %, about 26 mol %, about 27 mol %, about 28 mol %, about 29 mol %, about 30 mol %, about 31 mol %, about 32 mol %, about 33 mol %, about 34 mol %, about 35 mol %, about 36 mol %, about 37 mol %, about 38 mol %, about 39 mol %, about 40 mol %, about 41 mol %, about 42 mol %, about 43 mol %, about 44 mol %. about 45 mol %. about 46 mol %, about 47 mol %, about 48 mol %, or about 50 mol % of the total lipid present in the particle.

### Phosphate Charge Neutralizer

[0649] In some embodiments, the LNP described herein comprises a phosphate charge neutralizer. In some embodiments, the phosphate charge neutralizer comprises arginine, asparagine, glutamine, lysine, histidine, cationic dendrimers, polyamines, or a combination thereof. In some embodiments, the phosphate charge neutralizer comprises one or more nitrogen atoms. In some embodiments, the phosphate charge neutralizer comprises a polyamine. In some embodiments, the polyamine is 1,3-propanediamine, spermine, spermidine, Norspermidine, Tris (2-aminoethy)amine, Cyclen, 1,4,7-Triazacyclononane, 1,1,1-Tris (aminomethyl) ethane, Diethylenetriamine, Triethylenetetramine, or a combination thereof. In some embodiments, the polyamine is 1,3-propanediamine, 1,4-butanediamine, spermine, spermidine, or a combination thereof. In some embodiments, the N/P ratio for the phosphate charge neutralizer is from 0.01 to 10. In some embodiments, the N/P ratio for the phosphate charge neutralizer is from about 0.05 to about 2. In some embodiments, the N/P ratio for the phosphate charge neutralizer is from about 0.1 to about 1. In some embodiments, the N/P ratio for the phosphate charge neutralizer is about 0.1, about 0.2, about 0.3, about 0.4, about 0.5, about 0.6, about 0.7, about 0.8, about 0.9, or about 1. In some embodiments, the NIP ratio for the phosphate charge neutralizer is about 0.25, 0.5, or 0.75.

### Antioxidants

[0650] In some embodiments, the LNP described herein comprises one or more antioxidants. In some embodiments, the one or more antioxidants function to reduce a degradation of the cationic lipids, the payload, or both. In some embodiments, the one or more antioxidants comprise a hydrophilic antioxidant. In some embodiments, the one or more antioxidants is a chelating agent such as ethylenediaminetetraacefic acid (EDTA) and citrate. In some embodiments, the one or more antioxidants is EDTA. In some embodiments, the one or more antioxidants comprise a lipophilic antioxidant. In some embodiments, the lipophilic antioxidant comprises a vitamin E isomer or a polyphenol. In some embodiments, the one or more antioxidants are present in the LNP composition at a concentration of at least 1 mM, at least 10 mM, at least 20 mM, at least 50 mM, or at least 100 mM. In some embodiments, the one or more antioxidants are present in the particle at a concentration of about 20 mM.

### Payload

[0651] The LNPs described herein can be designed to deliver a payload, such as a therapeutic agent, or a target of interest. In some embodiments, an LNP described herein encloses one or more components of a base editor system as described herein. For example, a LNP may enclose one or more of a guide RNA, a nucleic acid encoding the guide RNA, a vector encoding the guide RNA, a base editor fusion protein, a nucleic acid encoding the base editor fusion protein, a programmable DNA binding domain, a nucleic acid encoding the programmable DNA binding domain, a deaminase, a nucleic acid encoding the deaminase, or all or any combination thereof. In some embodiments, the nucleic acid is a DNA. In some embodiments, the nucleic acid is a RNA, for example, a mRNA.

[0652] Additional exemplary therapeutic agents include, but are not limited to, antibodies (e.g., monoclonal, chimeric, humanized, nanobodies, and fragments thereof etc.), cholesterol, hormones, peptides, proteins, chemotherapeutics and other types of antineoplastic agents, low molecular weight drugs, vitamins, co-factors, nucleosides, nucleotides, oligonucleotides, enzymatic nucleic acids, antisense nucleic acids, triplex forming oligonucleotides, antisense DNA or RNA compositions, chimeric DNA: RNA compositions, allozymes, aptamers, ribozyme, decoys and analogs thereof, plasmids and other types of expression vectors, and small nucleic acid molecules, RNAi agents, short interfering nucleic acid (siNA), messenger ribonucleic acid (messenger RNA, mRNA), short interfering RNA (siRNA), double-stranded RNA (dsRNA), micro-RNA (miRNA), and short hairpin RNA (shRNA) molecules, peptide nucleic acid (PNA), a locked nucleic acid ribonucleotide (LNA), morpholino nucleotide, threose nucleic acid (TNA), glycol nucleic acid (GNA), sisiRNA (small internally segmented interfering RNA), aiRNA (asymetrical interfering RNA), and siRNA with 1, 2 or more mismatches between the sense and anti-sense strand to relevant cells and/or tissues, such as in a cell culture, subject or organism. Therapeutic agents can be purified or partially purified, and can be naturally occurring or synthetic, or chemically modified. In some embodiments, the therapeutic agent is an RNAi agent, short interfering nucleic acid (siNA), short interfering RNA (siRNA), double-stranded RNA (dsRNA), micro-RNA (miRNA), or a short hairpin RNA (shRNA) molecule. In some embodiments, the therapeutic agent is an mRNA.

[0653] In some embodiments, the payload comprises one or more nucleic acid(s) (i.e., one or more nucleic acid molecular entities). In some embodiments, the nucleic acid is a single-stranded nucleic acid. In some embodiments, single-stranded nucleic acid is a DNA. In some embodiments, single-stranded nucleic acid is an RNA. In some embodiments, the nucleic acid is a double-stranded nucleic acid. In some embodiments, the double-stranded nucleic acid is a DNA. In some embodiments, the double-stranded nucleic acid is an RNA. In some embodiments, the double-stranded nucleic acid is a DNA-RNA hybrid. In some embodiments, the nucleic acid is a messenger RNA (mRNA), a microRNA, an asymmetrical interfering RNA (aiRNA), a small hairpin RNA (shRNA), or a Dicer-Substrate dsRNA.

### Other Lipids

[0654] In some embodiments, the disclosed LNP compositions comprise a helper lipid. In some embodiments, the disclosed LNP compositions comprise a neutral lipid. In some embodiments, the disclosed LNP compositions comprise a stealth lipid. In some embodiments, the disclosed LNP compositions comprises additional lipids.

[0655] As used herein, neutral lipids suitable for use in a lipid composition of the disclosure include, for example, a variety of neutral, uncharged or zwitterionic lipids. Examples of neutral phospholipids suitable for use in the present disclosure include, but are not limited to, 5-heptadecylbenzene-1,3-diol (resorcinol), 1,2-dipalmitoyl-sn-glycero-3-phosphocholine (DPPC), 1,2-distearoyl-sn-glycero-3-phosphocholine (DSPC), phosphocholine (DOPC), 1,2-dimyristoyl-sn-glycero-phosphocholine (DMPC), phosphatidylcholine (PLPC), 1,2-distearoyl-sn-glycero-3-phosphocholine (DAPC), phosphatidylethanolamine (PE), egg phosphatidylcholine (EPC), dilauryloylphosphatidylcholine (DLPC), 1-myristoy 1-2-palmitoyl phosphatidylcholine (MPPC), 1-palmitoy 1-2-myristoyl phosphatidylcholine (PMPC), 1-palmitoy 1-2-stearoyl phosphatidylcholine (PSPC), 1,2-diarachidoylsn-glycero-3-phosphocholine (DBPC), 1-stearoy 1-2-palmitoyl phosphatidylcholine (SPPC), 1,2-dieicosenoyl-sn-glycero-3-phosphocholine (DEPC), 2-Oleoyl-1-palmitoyl-sn-glycero-3-phosphocholine (POPC), lysophosphatidyl choline, 1,2-dioleoyl-sn-glycero-3-phosphoethanolamine (DOPE), dilinoleoylphosphatidylcholine distearoylphosphatidylethanolamine (DSPE), dimyristoyl phosphatidylethanolamine (DMPE), dipalmitoyl phosphatidylethanolamine (DPPE), palmitoyloleoyl phosphatidylethanolamine (POPE), lysophosphatidylethanolamine and combinations thereof. In some embodiments, the neutral phospholipid is selected from the group consisting of DSPC and dimyristoyl phosphatidyl ethanolamine (DMPE). In some embodiments, the neutral phospholipid is DSPC. Neutral lipids can function to stabilize and improve processing of the LNPs.

[0656] Helper lipids can refer to lipids that enhance transfection (e.g. transfection of the nanoparticle (LNP) comprising the composition as provided herein, including the biologically active agent). The mechanism by which the helper lipid enhances transfection includes enhancing particle stability. In some embodiments, the helper lipid enhances membrane fusogenicity. Helper lipids can include steroids, sterols, and alkyl resorcinols. Helper lipids suitable for use in the present disclosure can include, but are not limited to, cholesterol, 5-heptadecylresorcinol, and cholesterol hemisuccinate. In some embodiments, the helper lipid is cholesterol. In some embodiments, the helper lipid is be cholesterol hemisuccinate.

[0657] Stealth lipids can refer to lipids that alter the length of time the nanoparticles can exist in vivo (e.g., in the blood). Stealth lipids can assist in the formulation process by, for example, reducing particle aggregation and controlling particle size. Stealth lipids used herein may modulate pharmacokinetic properties of the LNP. Stealth lipids suitable for use in a lipid composition of the disclosure can include, but are not limited to, stealth lipids having a hydrophilic head group linked to a lipid moiety. Stealth lipids suitable for use in a lipid composition of the present disclosure and information about the biochemistry of such lipids can be found in Romberg et al, Pharmaceutical Research, Vol. 25, No. 1, 2008, pg. 55-71 and I-Toekstra et al, Biochimica et Biophysica Acta 1660 (2004) 41-52. Additional suitable PEG lipids are disclosed, e.g., in WO 2006/007712.

[0658] In some embodiments, the stealth lipid is a PEG-lipid. In one embodiment, the hydrophilic head group of stealth lipid comprises a polymer moiety selected from polymers based on PEG (sometimes referred to as poly (ethylene oxide)), poly (oxazoline), poly(vinyl alcohol), poly (glycerol), poly (N-vinylpyrrolidone), polyaminoacids and poly N-(2-hydroxypropyl) methacrylamide]. Stealth lipids can comprise a lipid moiety. In some embodiments, the lipid moiety of the stealth lipid may be derived from diacylglycerol or diacylglycamide, including those comprising a dialkylglycerol or dialkylglycamide group having alkyl chain length independently comprising from about C₄ to about C₄₀ saturated or unsaturated carbon atoms, wherein the chain may comprise one or more functional groups such as, for example, an amide or ester. The dialkylglycerol or dialkylglycamide group can further comprise one or more substituted alkyl groups.

[0659] The structures and properties of helper lipids, neutral lipids, stealth lipids, and/or other lipids are further described in WO2017173054A1, WO2019067999A1, US20180290965A1, US20180147298A1, US20160375134A1, U.S. Pat. Nos. 8,236,770, 8,021,686, 8,236,770B2, U.S. Pat. No. 7,371,404B2, U.S. Pat. No. 7,780,983B2, U.S. Pat. No. 7,858,117B2, US20180200186A1, US20070087045A1, WO2018119514A1, and WO2019067992A1, all of which are hereby incorporated by reference in their entirety.

### LNP Formulations

[0660] The LNPs described herein can be designed for one or more specific applications or targets. The elements of a nanoparticle (LNP) composition or a composition can be selected based on a particular application or target, and/or based on the efficacy, toxicity, expense, ease of use, and availability. Similarly, the particular formulation of a nanoparticle composition is a composition comprising one or more described lipids. may be selected for the particular application or target. Suitable phosphate charge neutralizers to be used in formulations include, but are not limited to, Spermidine and 1,3-propanediamine.

[0661] The described LNP formulations can be designed for one or more specific applications or targets. For example, a nanoparticle composition may be designed to deliver a therapeutic agent such as an RNA to a particular cell, tissue, organ, or system or group thereof in a mammal's body. Physiochemical properties of nanoparticle compositions may be altered in order to increase selectivity for particular bodily targets. For instance, particle sizes may be adjusted based on the fenestration sizes of different organs. The therapeutic agent included in a nanoparticle composition may also be selected based on the desired delivery target or targets. For example, a therapeutic agent may be selected for a particular indication, condition, disease, or disorder and/or for delivery to a particular cell, tissue, organ, or system or group thereof (e.g., localized or specific delivery). In certain embodiments, a nanoparticle composition may include an mRNA encoding a polypeptide of interest capable of being translated within a cell to produce the polypeptide of interest. Such a composition may be designed to be specifically delivered to a particular organ.

[0662] The amount of a therapeutic agent in an LNP composition may depend on the size, composition, desired target and/or application, or other properties of the nanoparticle composition. For example, the amount of an RNA comprised in a nanoparticle composition may depend on the size, sequence, and other characteristics of the RNA. The relative amounts of a therapeutic agent and other elements (e.g., lipids) in a nanoparticle composition may also vary. In some embodiments, the wt/wt ratio of the lipid component to a therapeutic agent in a nanoparticle composition may be from about 5:1 to about 60:1, such as about 5:1. 6:1, 7:1, 8:1, 9:1, 10:1, 11:1, 12:1, 13:1, 14:1, 15:1, 16:1, 17:1, 18:1, 19:1, 20:1, 25:1, 30:1, 35:1, 40:1, 45:1, 50:1, and 60:1. For example, the wt/wt ratio of the lipid component to a therapeutic agent may be from about 10:1 to about 40:1. In certain embodiments, the wt/wt ratio is about 20:1. The amount of a therapeutic agent in a nanoparticle composition can be measured using absorption spectroscopy (e.g., ultraviolet-visible spectroscopy).

[0663] In some embodiments, an LNP composition comprises one or more nucleic acids such as RNAs. In some embodiments, the one or more RNAs, lipids, and amounts thereof may be selected to provide a specific NIP ratio. The NIP ratio can be selected from about 1 to about 30. The N/P ratio can be selected from about 2 to about 10. In some embodiments, the NIP ratio is from about 0.1 to about 50. In some embodiments, the N/P ratio is from about 2 to about 8. hi some embodiments, the NIP ratio is from about 2 to about 15, from about 2 to about 10, from about 2 to about 8, from about 2 to about 6, from about 3 to about 15, from about 3 to about 10, from about 3 to about 8, from about 3 to about 6, from about 4 to about 15, from about 4 to about 10, from about 4 to about 8, or from about 4 to about 6. hi some embodiments, the N/P ratio is about 2, about 2.5, about 3, about 3.5, about 4, about 4.5, about 5, about 5.5, about 6, or about 6.5. In some embodiments, the NIP ratio is from about 4 to about 6. In some embodiments, the NIP ratio is about 4, about 4.5, about 5, about 5.5, or about 6.

[0664] In some embodiments, the LNPs are formed with an average encapsulation efficiency ranging from about 50% to about 70%, from about 70% to about 90%, or from about 90% to about 100%. In some embodiments, the LNPs are formed with an average encapsulation efficiency ranging from about 75% to about 95%.

[0665] In another aspect, provided herein is a lipid nanoparticle (LNP) comprising the composition as provided herein. As used herein, a lipid nanoparticle (LNP) composition or a nanoparticle composition is a composition comprising one or more described lipids. LNP compositions are typically sized on the order of micrometers or smaller and may include a lipid bilayer. Nanoparticle compositions encompass lipid nanoparticles (LNPs), liposomes (e.g., lipid vesicles), and lipoplexes. In some embodiments, a LNP refers to any particle that has a diameter of less than 1000 nm, 500 nm, 250 nm, 200 nm, 150 nm, 100 nm, 75 nm, 50 nm, or 25 nm. In some embodiments, a nanoparticle may range in size from 1-1000 nm, 1-500 nm, 1-250 nm, 25-200 nm, 25-100 nm, 35-75 nm, or 25-60 nm. In some embodiments, a liposome having a lipid bilayer with a diameter of 500 rim or less. In some embodiments, the LNPs described herein can have a mean diameter of from about 1 nm to about 2500 nm, from about 10 nm to about 1500 nm, from about 20 nm to about 1000 nm, from about 30 nm to about 150 nm, from about 40 nm to about 150 nm, from about 50 rim to about 150 nm, from about 60 nm to about 130 nm, from about 70 nm to about 110 nm, from about 70 nm to about 100 nm, from about 80 nm to about 100 nm, from about 90 nm to about 100 nm, from about 70 to about 90 nm, from about 80 nm to about 90 nm- or from about 70 nm to about 80 nm. The LNPs described herein can have a mean diameter of about 30 nm, 35 nm, 40 nm, 45 nm, 50 nm, 55 nm, 60 nm, 65 nm, 70 nm, 75 nm, 80 nm, 85 nm, 90 nm, 95 nm, 100 nm, 105 nm, 110 nm, 115 nm, 120 nm, 125 nm, 130 nm, 135 nm, 140 nm, 145 nm, 150 nm, or greater. The LNPs described herein can be substantially non-toxic.

[0666] In some embodiments, an LNP may be made from cationic, anionic, or neutral lipids. In some embodiments, an LNP may comprise neutral lipids, such as the fusogenic phospholipid 1,2-Dioleoyl-sn-glycero-3-phosphoethanolamine (DOPE) or the membrane component cholesterol, as helper lipids to enhance transfection activity and nanoparticle stability. In some embodiments, an LNP may comprise hydrophobic lipids, hydrophilic lipids, or both hydrophobic and hydrophilic lipids. Any lipid or combination of lipids that are known in the art can be used to produce an LNP. Examples of lipids used to produce LNPs include, but are not limited to DOTMA (N [1-(2,3-dioleyloxy) propyl]-N,N,N-trimethylammonium chloride), DOSPA (N,N-dimethyl-N-([2-sperminecarboxamido]ethyl)-2,3-bis (dioleyloxy)-1-propaniminium pentahydrochloride), DOTAP (1,2-Dioleoyl-3-trimethylammonium propane), DMRIE (N-(2-hydroxyethyl)-N,N-dimethyl-2,3-bis (tetradecyloxy-1-propanaminiumbromide), DC-cholesterol (3B—[N—(N′,N′-dimethylaminoethane)-carbamoyl]cholesterol), DOTAP-cholesterol, GAP-DMORIE-DPyPE, and GL67A-DOPE-DMPE (,2-Bis (dimethylphosphino) ethane)-polyethylene glycol (PEG). Examples of cationic lipids include, but are not limited to, 98N12-5, C₁₂-200, DLin-KC2-DMA (KC2), DLin-MC3-DMA (MC3), XTC, MD1, and 7C₁. Examples of neutral lipids include, but are not limited to, DPSC, DPPC (Dipalmitoylphosphatidylcholine), POPC (1-palmitoyl-2-oleoyl-sn-glycero-3-phosphocholine), DOPE, and SM (sphingomyelin). Examples of PEG-modified lipids include, but are not limited to, PEG-DMG (Dimyristoyl glycerol), PEG-CerC14, and PEG-CerC20. In some embodiments, the lipids may be combined in any number of molar ratios to produce a LNP. In some embodiments, the polynucleotide may be combined with lipid(s) in a wide range of molar ratios to produce an LNP.

[0667] The term “substituted”, unless otherwise indicated, refers to the replacement of one or more hydrogen radicals in a given structure with the radical of a specified substituent including, but not limited to: halo, alkyl, alkenyl, alkynyl, aryl, heterocyclyl, thiol, alkylthio, oxo, thioxy, arylthio, alkylthioalkyl, arylthioallcyl, alkylsulfonyl, alkylsulfonylalkyl, arylsulfonylalkyl, alkoxy, aryloxy, aralkoxy, aminocarbonyl, alkylaminocarbonyl, aiylaminocarbonyl, alkoxycarbonyl, aryloxycarbonyl, haloalkyl, amino, trifluoromethyl, cyano, nitro, alkylamino, arylamino, alkylaminoalkyl, aiylaminoalkyl, aminoalkylamino, hydroxy, alkoxyalkyl, carboxyalkyl, alkoxycarbonylalkyl, aminocarbonylalkyl, acyl, aralkoxycarbonyl, carboxylic acid, sulfonic acid, sulfonyl, phosphonic acid, aryl, heteroaryl, heterocyclic, and an aliphatic group. It is understood that the substituent may be further substituted. Exemplary· substituents include amino, alkylamino, and the like.

[0668] As used herein, the term “substituent” means positional variables on the atoms of a core molecule that are substituted at a designated atom position, replacing one or more hydrogens on the designated atom, provided that the designated atom's normal valency is not exceeded, and that the substitution results in a stable compound. Combinations of substituents and/or variables are permissible only if such combinations result in stable compounds. A person of ordinal), skill in the art should note that any carbon as well as heteroatom with valences that appear to be unsatisfied as described or shown herein is assumed to have a sufficient number of hydrogen atom(s) to satisfy the valences described or shown. In certain instances one or more substituents having a double bond (e.g., “oxo” or “═O”) as the point of attachment may be described, shown or listed herein within a substituent group, wherein the structure may only show a single bond as the point of attachment to the core structure of Formula (I). A person of ordinary skill in the art would understand that, while only a single bond is shown, a double bond is intended for those substituents.

[0669] The term “alkyl” refers to a straight or branched hydrocarbon chain radical, having from one to twenty carbon atoms, and which is attached to the rest of the molecule by a single bond. An alkyl comprising up to 10 carbon atoms is referred to as a C₁-C₁₀ alkyl, likewise, for example, an alkyl comprising up to 6 carbon atoms is a C₁-C₆ alkyl. Alkyls (and other moieties defined herein) comprising other numbers of carbon atoms are represented similarly. Alkyl groups include, but are not limited to, C₁-C₁₀ alkyl, C₁-C₉ alkyl, C₁-C₈ alkyl. C₁-C₇ alkyl, C₁-C₆ alkyl, C₁-C₅ alkyl, C₁-C₄ alkyl, C₁-C₃ alkyl, C₁-C₂ alkyl, C₂-C₈ alkyl, C₃-C₈ alkyl and C₄-C₈ alkyl. Representative alkyl groups include, but are not limited to, methyl, ethyl, n-propyl, 1-methylethyl (i-propyl), n-butyl, i-butyl, s-butyl, n-pentyl, 1,1-dimethylethyl (t-butyl), 3-methylhexyl, 2-methylhexyl, 1-ethyl-propyl, and the like. In some embodiments, the alkyl is methyl or ethyl. In some embodiments, the alkyl is —CH (CH₃)₂ or —C (CH₃) 3. Unless stated otherwise specifically in the specification, an alkyl group may be optionally substituted as described below. “Alkylene” or “alkylene chain” refers to a straight or branched divalent hydrocarbon chain linking the rest of the molecule to a radical group. In some embodiments, the alkylene is —CI-12-, —CH₂CH₂—, or —CH₂CH₂CH₂—. In some embodiments, the alkylene is —CH₂—. In some embodiments, the alkylene is —CH₂CH₂—. In some embodiments, the alkylene is —CH₂CH₂CH₂—.

[0670] The term “alkenyl” refers to a type of alkyl group in which at least one carbon-carbon double bond is present. In one embodiment, an alkenyl group has the formula-C(R)—CR², wherein R refers to the remaining portions of the alkenyl group, which may be the same or different. In some embodiments, R is H or an alkyl. In some embodiments, an alkenyl is selected from ethenyl (i.e., vinyl), propenyl (i.e., allyl), butenyl, pentenyl, pentadienyl, and the like. Non-limiting examples of an alkenyl group include-CH—CH₂, —C(CH₃)—CH₂, —CH═CHCH₃, —C(CH₃)=CHCH₃, and —CH₂CH═CH₂.

[0671] The term “cycloalkyl” refers to a monocyclic or polycyclic non-aromatic radical, wherein each of the atoms forming the ring (i.e. skeletal atoms) is a carbon atom. In some embodiments, cycloalkyls are saturated or partially unsaturated. In some embodiments, cycloalkyls are spirocyclic or bridged compounds. In some embodiments, cycloalkyls are fused with an aromatic ring (in which case the cycloalkyl is bonded through a non-aromatic ring carbon atom). Cycloalkyl groups include groups having from 3 to 10 ring atoms. Representative cycloalkyls include, but are not limited to, cycloalkyls having from three to ten carbon atoms, from three to eight carbon atoms, from three to six carbon atoms, or from three to five carbon atoms. Monocyclic cycloalkyl radicals include, for example, cyclopropyl, cyclobutyl, cyclopentyl, cyclohexyl, cycloheptyl, and cyclooctyl. In some embodiments, the monocyclic cycloalkyl is cyclopropyl, cyclobutyl, cyclopentyl or cyclohexyl. In some embodiments, the monocyclic cycloalkyl is cyclopentenyl or cyclohexenyl. In some embodiments, the monocyclic cycloalkyl is cyclopenteny 1. Polycyclic radicals include, for example, adamantyl, 1,2-dihydronaphthalenyl, 1,4-dihydronaphthalenyl, tetrainyl, decalinyl, 3,4-dihydronaphthalenyl-. 1 (2H)-one. spiro[2.2]pentyl, norbomyl and bicycle [1.1.1]pentyl. Unless otherwise stated specifically in the specification, a cycloalkyl group may be optionally substituted. Depending on the structure, a cycloalkyl group can be monovalent or divalent (i.e., a cycloalkylene group).

[0672] The term “heterocycle” or “heterocyclic” refers to heteroaromatic rings (also known as heteroaryls) and heterocycloallcyl rings (also known as heteroalicyclic groups) that includes at least one heteroatom selected from nitrogen, oxygen and sulfur, wherein each heterocyclic group has from 3 to 12 atoms in its ring system, and with the proviso that any ring does not contain two adjacent O or S atoms. A “heterocyclyl” is a univalent group formed by removing a hydrogen atom from any ring atoms of a heterocyclic compound. In some embodiments, heterocycles are monocyclic, bicyclic, polycyclic, spirocyclic or bridged compounds. Non-aromatic heterocyclic groups (also known as heterocycloalkyls) include rings having 3 to 12 atoms in its ring system and aromatic heterocyclic groups include rings having 5 to 12 atoms in its ring system. The heterocyclic groups include benzofused ring systems. Examples of non-aromatic heterocyclic groups are pyrrolidinyl, tetrahydrofuranyl, dihydrofuranyl, tetrahydrothienyl, oxazolidinonyl, tetrahydropyranyl, dihydropyranyl, tetrahydrothiopyranyl, piperidinyl, morpholinyl. thiomorpholinyl, thioxanyl, piperazinyl, aziridinyl, azetidinyl, oxetanyl, thietanyl, homopiperidinyl, oxepanyl, thiepanyl, oxazepinyl, diazepinyl, thiazepinyl, 1,2,3,6-tetrahydropyridinyl, pyrrolin-2-yl, pyrrolin-3-yl, indolinyl, 2H-pyranyl, 4Hpyranyl, dioxanyl, 1,3-dioxolanyl, pyrazolinyl, dithianyl, dithiolanyl, dihydropyranyl, dihydrothienyl, dihydrofuranyl, pyrazolidinyl, imidazolinyl, imidazoli diny I, 3-az.abicy cl o [3. 1.0]hexany 1,3-azabicyclo[4.1.0]heptanyl, 3 h-indolyl, indolin-2-onyl, isoindolin-1-onyl, isoindoline-1,3-dionyl, 3,4-dihydroisoquinolin-1 (2H)-onyl, 3,4-dihydroquinolin-2 (1H)-onyl, isoindoline-1,3-dithionyl, benzo[d]oxazol-2 (3H)-onyl, 1H-benzo[d]imidazol-2 (3H)-onyl, benzo[d]thiazol-2 (3H)-onyl, and quinolizinyl. Examples of aromatic heterocyclic groups are pyridinyl, imidazolyl, pyrimidinyl, pyrazolyl, triazolyl, pyrazinyl, tetrazolyl, futyl, thienyl, isoxazolyl, thiazolyl, oxazolyl, isothiazolyl, pyrrolyl, quinolinyl, isoquinolinyl, indolyl, benzimidazolyl, benzofuranyl, cinnolinyl, indazolyl, indolizinyl, phthalazinyl, pyridazinyl, triazinyl, isoindolyl, pteridinyl, purinyl, oxadiazolyl, thiadiazolyl, furaz.anyl, benzofuraz.anyl, benzothiophenyl, benzothiazolyl, benzoxazolyl, quinazolinyl, quinoxalinyl, naphthyridinyl, and furopyridinyl. The foregoing groups are either C-attached (or Clinked) or N-attached where such is possible. For instance, a group derived from pyrrole includes both pyrrol-1-yl (N-attached) or pyrrol-3-yl (C-attached). Further, a group derived from imidazole includes imidazol-1-yl or imidazol-3-yl (both N-attached) or imidazol-2-yl, imidazol-4-yl or imidazol-5-yl (all C-attached). The heterocyclic groups include benzo-fused ring systems. Non-aromatic heterocycles are optionally substituted with one or two oxo (═O) moieties, such as pyrrolidin-2-one. In some embodiments, at least one of the two rings of a bicyclic heterocycle is aromatic. In some embodiments, both rings of a bicyclic heterocycle are aromatic.

[0673] The term “heterocycloalkyl” refers to a cycloalkyl group that includes at least one heteroatom selected from nitrogen, oxygen, and sulfur. Unless stated otherwise specifically in the specification, the heterocycloalkyl radical may be a monocyclic, or bicyclic ring system, which may include fused (when fused with an aryl or a heterowyl ring, the heterocycloalkyl is bonded through a non-aromatic ring atom) or bridged ring systems. The nitrogen, carbon or sulfur atoms in the heterocyclyl radical may be optionally oxidized. The nitrogen atom may be optionally quaternized. The heterocycloalkyl radical is partially or fully saturated. Examples of heterocycloalkyl radicals include, but are not limited to, dioxolanyl, thienyl[1,3]dithianyl, tetrahydroquinolyl, tetrahydroisoquinolyl, decahydroquinolyl, decahydroisoquinolyl, imidazolinyl, imidazolidinyl, isothiazolidinyl, isoxazolidinyl, morpholinyl, octahydroindolyl, octahydroisoindolyl, 2-oxopiperazinyl, 2-oxopiperidinyl, 2-oxopyrrolidinyl, oxazolidinyl, piperidinyl, piperazinyl, 4-piperidonyl, pyrrolidinyl, pyrazolidinyl, quinuclidinyl, thiazolidinyl, tetrahydrofuryl, trithianyl, tetrahydropyranyl, thiomorpholinyl, thiamorpholinyl, 1-oxothiomorpholinyl, 1,1-dioxo-thiomorpholinyl. The term heterocycloalkyl also includes all ring forms of carbohydrates, including but not limited to monosaccharides, disaccharides and oligosaccharides. Unless otherwise noted, heterocycloalkyls have from 2 to 12 carbons in the ring. In some embodiments, heterocycloalkyls have from 2 to 10 carbons in the ring. In some embodiments, heterocycloalkyls have from 2 to 10 carbons in the ring and 1 or 2 N atoms. In some embodiments, heterocycloalkyls have from 2 to 10 carbons in the ring and 3 or 4 N atoms. In some embodiments, heterocycloalkyls have from 2 to 12 carbons, 0-2 N atoms, 0-2 O atoms, 0-2 P atoms, and 0-1 S atoms in the ring. In some embodiments, heterocycloalkyls have from 2 to 12 carbons, 1-3 N atoms, 0-1 O atoms, and 0-1 S atoms in the ring. It is understood that when referring to the number of carbon atoms in a heterocycloalkyl, the number of carbon atoms in the heterocycloalkyl is not the same as the total number of atoms (including the heteroatoms) that make up the heterocycloalkyl (i.e. skeletal atoms of the heterocycloalkyl ring). Unless stated otherwise specifically in the specification, a heterocycloalkyl group may be optionally substituted. As used herein, the term “teterocycloalkylene” can refer to a divalent heterocycloalkyl group.

[0674] The term “heteroaryl” refers to an aryl group that includes one or more ring heteroatoms selected from nitrogen, oxygen and sulfur. The heteroaryl is monocyclic or bicyclic. Illustrative examples of monocyclic heteroaryls include pyridinyl, imidazolyl, pyrimidinyl, pyrazolyl, triazolyl, pyrazinyl, tetrazolyl, furyl, thienyl, isoxazolyl, thiazolyl, oxazolyl, isothiazolyl, pyrrolyl, pyridazinyl, triazinyl, oxadiazolyl, thiadiazolyl, furazanyl, indolizine, indole, benzofuran, benzothiophene, indazole, benzimidazole, purine, quinolizine, quinoline, isoquinoline, cinnoline, phthalazine, quinazoline, quinoxaline, 1,8-naphthyridine, and pteridine. Illustrative examples of monocyclic heteroaryls include pyridinyl, imidazolyl, pyrimidinyl, pyrazolyl, triazolyl, pyrazinyl, tetrazolyl, furyl, thienyl, isoxazolyl, thiazolyl, oxazolyl, isothiazolyl, pyrrolyl, pyridazinyl, triazinyl, oxadiazolyl, thiadiazolyl, and furazanyl. Illustrative examples of bicyclic heteroaryls include indolizine, indole, benzofuran, benzothiophene, indazole, benzimidazole, purine, quinolizine, quinoline, isoquinoline, cinnoline, phthalazine, quinazoline, quinoxaline, 1,8-naphthyridine, and pteridine. In some embodiments, heteroaryl is pyridinyl, pyrazinyl, pyrimidinyl, thiazolyl, thienyl, thiadiazolyl or furyl. In some embodiments, a heteroaryl contains 0-6 N atoms in the ring. In some embodiments, a heteroaryl contains 1-4 N atoms in the ring. In some embodiments, a heteroaryl contains 4-6 N atoms in the ring. In some embodiments, a heteroaryl contains 0-4 N atoms, 0-1 O atoms, 0-1 P atoms, and 0-1 S atoms in the ring. In some embodiments, a heteroaryl contains 1-4 N atoms, 0-1 O atoms, and 0-1 S atoms in the ring. In some embodiments, heteroaryl is a C₁-C₉ heteroaryl. In some embodiments, monocyclic heteroaryl is a C₁-C₅ heteroaryl. In some embodiments, monocyclic heteroaryl is a 5-membered or 6-membered heteroaryl. In some embodiments, a bicyclic heteroaryl is a C₆-C₉ heteroaryl. In some embodiments, a heteroaryl group is partially reduced to form a heterocycloalkyl group defined herein. In some embodiments, a heteroaryl group is fully reduced to form a heterocycloalkyl group defined herein.

[0675] As used herein, the “N/P ratio” is the molar ratio of ionizable (e.g., in the physiological pH range) nitrogen atoms in a lipid (or lipids) to phosphate groups in a nucleic acid molecular entity (or nucleic acid molecular entities), e.g., in a nanoparticle composition comprising a lipid component and an RNA. Ionizable nitrogen atoms can include, for example, nitrogen atoms that can be protonated at about pH 1, about pH 2, about pH 3, about pH 4, about pH5, about pH 6, about pH 7, about pH 7.5, or about pH 8 or higher. The physiological pH range can include, for example, the pH range of different cellular compartments (such as organs, tissues, and cells) and bodily fluids (such as blood, CSF, gastric juice, milk, bile, saliva, tears, and urine). In certain specific embodiments, the physiological pH range refers to the pH range of blood in a mammal, for example, from about 7.35 to about 7.45. Similarly, for phosphate charge neutralizers that have one or more ionizable nitrogen atoms, the N/P ratio can refer to a molar ratio of ionizable nitrogen atoms in the phosphate charge neutralizer to the phosphate groups in a nucleic acid. In some embodiments, ionizable nitrogen atoms refer to those nitrogen atoms that are ionizable within a pH range between 5 and 14.

[0676] It is further contemplated that the LNP formulations that encapsulate the gRNAs and mRNAs drug substances described herein may be modified to include GalNac lipid formulations such as those disclosed in co-owned U.S. patent application Ser. No. 17/192,709 filed on Mar. 4, 2021 with a parallel PCT application being filed on same date having International Application Number PCT/US21/20955. Employment of such GalNac lipid formulations are understood to be capable of enhancing LNP uptake in LDL-R deficient cells, such as those associated with heterozygous and homozygous familial hypercholesterolemia patient populations.

[0677] For the payload that does not contain a phosphate group, the N/P ratio can refer to a molar ratio of ionizable nitrogen atoms in a lipid to the total negative charge in the payload. For example, the N/P ratio of an LNP composition can refer to a molar ratio of the total ionizable nitrogen atoms in the LNP composition to the total negative charge in the payload that is present in the composition.

[0678] As used herein, amino lipids can contain at least one primary, secondary or tertiary amine moiety that is protonatable (or ionizable) between pH range 4 and 14. In some embodiments, the amine moiety/moieties function as the hydrophilic headgroup of the amino lipids. When most of the amine moiety (ies) of an amino lipid (or amino lipids) in a nucleic acid-lipid nanoparticle formulation is protonated at physiological pH, then the nanoparticles can be termed as cationic lipid nanoparticle (cLNP). When most of the amine moiety (ies) of an amino lipid (or amino lipids) in a nucleic acid-lipid nanoparticle formulation is not protonated at physiological pH but can be protonated at acidic pH, endosomal pH for example, can be termed as ionizable lipid nanoparticle (iLNP). The amino lipids that constitute cLNPs can be generally called cationic amino lipids (cLipids). The amino lipids that constitute iLNPs can be called ionizable amino lipids (iLipids). The amino lipid can be an iLipid or a cLipid at physiological pH.

### Kits

[0679] One aspect of the disclosure relates to kits including the compositions comprising a single guide RNA as provided herein, the base editor system and complex as provided herein, the composition as provided herein, or the lipid nanoparticle as provided herein for treating or preventing a condition. The kits can further include one or more additional therapeutic regimens or agents for treating or preventing a condition.

[0680] Also disclosed herein, in certain embodiments, are kits and articles of manufacture for use with one or more methods described herein. Such kits include a carrier, package, or container that is compartmentalized to receive one or more containers such as vials, tubes, and the like, each of the container(s) comprising one of the separate elements to be used in a method described herein. Suitable containers include, for example, bottles, vials, syringes, and test tubes. In one embodiment, the containers are formed from a variety of materials such as glass or plastic.

[0681] The articles of manufacture provided herein contain packaging materials. Examples of pharmaceutical packaging materials include, but are not limited to, blister packs, bottles, tubes, bags, containers, bottles, and any packaging material suitable for a selected formulation and intended mode of administration and treatment.

[0682] For example, the container(s) include the composition of the disclosure, and optionally in addition with therapeutic regimens or agents disclosed herein. Such kits optionally include an identifying description or label or instructions relating to its use in the methods described herein.

[0683] A kit typically includes labels listing contents and/or instructions for use, and package inserts with instructions for use. A set of instructions will also typically be included.

[0684] In embodiments, a label is on or associated with the container. In one embodiment, a label is on a container when letters, numbers or other characters forming the label are attached, molded or etched into the container itself; a label is associated with a container when it is present within a receptacle or carrier that also holds the container, e.g., as a package insert. In one embodiment, a label is used to indicate that the contents are to be used for a specific therapeutic application. The label also indicates directions for use of the contents, such as in the methods described herein.

### Examples

### INTRODUCTION

[0685] The present disclosure will be described in greater detail by way of specific examples. These examples are provided for illustrative purposes only and not to limit the scope of the claims provided herein. Those of skill in the art will readily recognize a variety of non-critical parameters that can be changed or modified to yield alternative embodiments according to the present disclosure.

[0686] Gene-editing technologies, including CRISPR-Cas9 nucleases and CRISPR base editors, have the potential to precisely and permanently modify disease-causing genes in human patients. The demonstration of durable editing in target organs of non-human primates (NHPs) is an important and necessary step prior to in vivo administration of gene editors to patients in clinical trials. Herein provided is the first demonstration that CRISPR base editors delivered in vivo using lipid nanoparticles (LNP) can efficiently modify disease-related genes in living NHPs. In addition to providing proof-of-concept for a once-and-done approach to reduce cholesterol and treat coronary heart disease, the leading cause of death worldwide, these results demonstrate how CRISPR base editors can be productively applied to a variety of therapeutic target genes in the liver and potentially other organs.

[0687] In vivo gene editing is an emerging new therapeutic approach to make DNA modifications in a patient's own body in organs such as the liver. Gene-editing methods include CRISPR-Cas9 and -Cas 12 nucleases, CRISPR cytosine base editors, CRISPR adenine base editors, and CRISPR prime editors. The human PCSK9 and ANGPTL3 gene are particularly attractive potential target(s) for in vivo gene editing. In principle, editing of PCSK9 could produce durable reductions in blood LDL-C levels and thereby dramatically lower one's cumulative exposure to LDL-C in contrast to all existing therapies (e.g., statins, ezetimibe, or PCSK9 inhibitors), which must be taken daily or every few weeks to months and can suffer from lack of patient adherence.

[0688] In vivo delivery of a gene editor that can introduce a PCSK9 or ANGPTL3 loss-of-function mutation in the liver has the potential to offer a new kind of once-and-done therapy that offers lifelong treatment of coronary heart disease. CRISPR base editors make an attractive gene-editing modality for this purpose because they function efficiently for introducing precise targeted alterations and, in contrast to CRISPR-Cas9 and other gene-editing nucleases, minimize any deleterious consequences of introducing double-strand DNA breaks.

[0689] CRISPR adenine base editors can induce targeted A>G edits in DNA (T->C on the opposing strand) and can be used to inactivate genes by disrupting start codons, splice donors (canonical GT sequence on the sense strand) or splice acceptors (canonical AG sequence on the sense strand) at exon-intron or intron-exon boundaries, or introducing missense mutations. Adenine 8.8-m (hereafter referred to as ABE8.8) uses its core Streptococcus pyogenes nickase Cas9 (nSpCas9) protein with a guide RNA (gRNA) to engage a double-strand protospacer DNA sequence, flanked by an NGG protospacer-adjacent motif (PAM) sequence on its 3′ end. The protospacer sequence is specified via hybridization of the first 20 bases of the gRNA with a complementary sequence on the “target” DNA strand, leaving part of the other (“non-target”) strand in exposed single-strand form structure called the R-loop. The ABE base editor uses an evolved deoxyadenosine deaminase domain-fused to nSpCas9-to chemically modify an adenosine nucleoside, contained in the single-stranded DNA portion of the R-loop, into inosine and nicks the target DNA strand within the DNA: RNA heteroduplex of the R-loop. This nick biases DNA repair machinery to use the freshly deaminated strand as a template, enabling highly efficient transition mutation at the targeted site. The activity window of ABE8.8 typically ranges from positions 3 to 9 in the protospacer DNA sequence specified by the gRNA, 12 to 18 base pairs 5′ of the NGG PAM (positions 21 to 23), with peak editing observed at position 6 of the protospacer. Although the mechanism of action of ABE8.8 does not involve double-strand DNA breaks, indel mutagenesis can occur low frequency.

[0690] The advantages of base editing compared to CRISPR-Cas9 genome editing for gene inactivation or other types of gene alteration is noted. Standard CRISPR-Cas9 editing carries higher risks of unwanted on-target effects and off-target effects emanating from double-strand breaks (large deletions, integration of vector DNA sequences, chromosomal rearrangements, induction of p53 activity, etc.). Even the intended on-target effects—small indel mutations—have an element of unpredictability, as they can result in frameshift mutations that add varied strings of anomalous amino acids at the end of the truncated protein product, or in-frame mutations that add or remove amino acids from the protein without knocking out its function. In contrast, base editing offers a means to efficiently make precise, stereotyped changes in the genome, allowing for more reproducible alteration of gene function. Base editing mitigates unintended on-target effects by virtue of not requiring double-strand breaks but instead acting through enzymatic modification of DNA bases via the deaminase domain.

[0691] While preferred embodiments of the present invention have been shown and described herein, it will be obvious to those skilled in the art that such embodiments are provided by way of example only. It is not intended that the invention be limited by the specific examples provided within the specification. While the invention has been described with reference to the aforementioned specification, the descriptions and illustrations of the embodiments herein are not meant to be construed in a limiting sense. Numerous variations, changes, and substitutions will now occur to those skilled in the art without departing from the invention. Furthermore, it shall be understood that all aspects of the invention are not limited to the specific depictions, configurations or relative proportions set forth herein which depend upon a variety of conditions and variables. It should be understood that various alternatives to the embodiments of the invention described herein may be employed in practicing the invention. It is therefore contemplated that the invention shall also cover any such alternatives, modifications, variations or equivalents.

### Protospacer Selection and Editing

### Example 1. gRNA Design for Targeting PCSK9 and ANGPTL3

[0692] All protospacers shown in Table 1 and Table 24 were chosen by two criteria. First, they matched (or very closely matched) sequences in the human, cynomolgus monkey, and/or mouse orthologs of the genes. Second, they had favorable predicted off-target profiles, as judged by the MIT Specificity Score (calculated by http://crispor.tefor.net/; minimum score of 50).

[0693] Where the goal is to disrupt a gene in vivo for a therapeutic purpose, cytosine base editors have the advantage of being able to directly introduce stop codons into the coding sequence of the gene (nonsense mutations) by altering specific codons for glutamine (CAG→TAG, CAA→TAA), arginine (CGA→TGA), and tryptophan (TGG→TAG/TAA/TGA, with editing of cytosines on the antisense strand). In contrast, adenine base editors cannot directly introduce stop codons, as there are no A→G changes that result in nonsense mutations. Nonetheless, the more favorable off-target profile of adenine base editors, particularly with respect to gRNA-independent off-target DNA base editing, recommend the use of adenine base editors over cytosine base editors for therapeutic purposes. Similar approaches were followed to identify and select mouse/rodent specific protospacers listed in Tables 1 and 24.

[0694] One strategy by which adenine base editors might be used to disrupt gene function is to edit the start codon, such as from ATG→GTG or ATG→ACG. Therefore, the resultant translation into protein will not initiate at the canonical ATG site. A second strategy by which adenine base editors might be used to disrupt gene function is to edit splice sites, whether splice donors at the 5′ ends of introns or splice acceptors at the 3′ ends of introns. Splice site disruption can result in the inclusion of intronic sequences in messenger RNA (mRNA) potentially introducing nonsense, frameshift, or in-frame indel mutations that result in premature stop codons or in insertion/deletion of amino acids that disrupt protein activity- or in the exclusion of exonic sequences, which can also introduce nonsense, frameshift, or in-frame indel mutations. Canonical splice donors comprise the DNA sequence GT on the sense strand, whereas canonical splice acceptors comprise the DNA sequence AG. Alteration of the sequence disrupts normal splicing. Splice donors can be disrupted by adenine base editing of the complementary base in the second position in the antisense strand (GT→GC), and splice acceptors can be disrupted by adenine base editing of the first position in the sense strand (AG→GG). A third strategy by which adenine base editors might be used to disrupt gene function is to introduce a missense mutation(s) into the coding region of the gene that results in production of a less functional, or non-functional protein.

[0695] All gRNA spacer sequences that would permit ABE8.8 (and other ABE variants containing Streptococcus pyogenes Cas9, such as ABE7.10, or another Cas protein that can use the NGG PAM) to disrupt splice sites were identified, whether donors or acceptors, via A→G editing within its editing window (roughly positions 3 to 9 in the 20-nt protospacer region of DNA) were identified. Guide RNAs matching each of the protospacer sequences and otherwise conforming to the standard 100-nt Streptococcus pyogenes CRISPR gRNA sequence were synthesized, with each gRNA molecule having a modest degree of chemical modifications (e.g., in Table 1).

TABLE 1
Guide RNAs (SgRNA/gRNA) for Cas9 nuclease and ABE editors

| | | | SEQ | | SEQ | Editor |
|---|---|---|---|---|---|---|
| Gene | gRNA | Protospacer | ID | | ID | associated |
| Target | ID | (5′-3′) | NO | Sequence (5′-3′) | NO | data |
| hcPCSK9 | GA001 | GGTGCTAG | 66 | GsGsUsGCUAGCCUUGCGUUCCG | 253 | SpCas9 |
| | | CCTTGCGT | | GUUUUAGAgcuagaaauagcAAGUU | | |
| | | TCCG | | AAAAUAAGGCUAGUCCGUUAU | | |
| | | | | CAacuugaaaaaguggcaccgagucggugcu | | |
| | | | | sususu | | |
| hcPCSK9 | GA002 | GGTGCTAG | 66 | gsgsusGCUAGCCUUGCGUUCCGG | 2231 | SpCas9 |
| | | CCTTGCGT | | UUUUAGAgcuagaaauagcAAGUUA | | |
| | | TCCG | | AAAUAAGGCUAGUCCGUUAUC | | |
| | | | | Aacuugaaaaaguggcaccgagucggugcusu | | |
| | | | | susu | | |
| hcPCSK9 | GA003 | GGTGCTAG | 66 | gsgsusGCUAGCCUUGCGUUCCGG | 254 | SpCas9 |
| | | CCTTGCGT | | UUUUsAGAgcuagaaauagcAAGUUs | | |
| | | TCCG | | AAAAUSAAGGCUSAGUCCGUUs | | |
| | | | | AUCsAacuugaaaaaguggcaccgagucgg | | |
| | | | | ugcusususu | | |
| hcPCSK9 | GA004 | GGTGCTAG | 66 | gsgsusGCUAGCCUUGCGUUCCGg | 255 | SpCas9 |
| | | CCTTGCGT | | UUUUAGagcuagaaauagcaaGUUaAa | | |
| | | TCCG | | AuAaggcuaGUccGUUAucAAcuugaa | | |
| | | | | aaagugGcaccgagucggugcuuuuu | | |
| hcPCSK9 | GA005 | GGTGCTAG | 66 | GsGsUsGCUAGCCUUGCGUUCCG | 2232 | SpCas9 |
| | | CCTTGCGT | | gUUUUAGagcuagaaauagcaaGUUaA | | |
| | | TCCG | | aAuAaggcuaGUccGUUAucAAcuuga | | |
| | | | | aaagugGcaccgagucggugcuuuuu | | |
| hcPCSK9 | GA006 | GGTGCTAG | 66 | GsGsUsGCUAGCCUUGCGUUCCG | 2233 | SpCas9 |
| | | CCTTGCGT | | gUUUUAGagcuagaaauagcaaGUUaA | | |
| | | TCCG | | aAuAaggcuaGUccGUUAucAAcuuga | | |
| | | | | aaaagugGcaccgagucggugcusususu | | |
| hcPCSK9 | GA007 | GGTGCTAG | 66 | gsgsusGCUAGCCUUGCGUUCCGg | 2234 | SpCas9 |
| | | CCTTGCGT | | UUUUAGagcuagaaauagcaaGUUaAa | | |
| | | TCCG | | AuAaggcuaGUccGUUAucAAcuugaa | | |
| | | | | aaagugGcaccgagucggugcusususu | | |
| hcPCSK9 | GA007/ | GGTGCTAG | 66 | gsgsusGCUAGCCUUGCGUUCCGg | 2234 | SpCas9 |
| | GA252 | CCTTGCGT | | UUUUAGagcuagaaauagcaaGUUaAa | | |
| | | TCCG | | AuAaggcuaGUccGUUAucAAcuugaa | | |
| | | | | aaagugGcaccgagucggugcusususu | | |
| hcPCSK9 | GA008 | GGTGCTAG | 66 | gsgsusGCUAGCCUUGCGUUCCGg | 256 | SpCas9 |
| | | CCTTGCGT | | UUUUAGagcuagaaauagcaaGUUsaA | | |
| | | TCCG | | aAuAaggcuaGUccGUUsAucAAcuug | | |
| | | | | aaaaagugGcaccgagucggugcusususu | | |
| hcPCSK9 | GA009 | GGTGCTAG | 66 | gsgsusGCUAGCCUUGCGUUCCGG | 2235 | SpCas9 |
| | | CCTTGCGT | | UUUUAGAGCUAGAAAUAGCAA | | |
| | | TCCG | | GUUAAAAUAAGGCUAGUCCGU | | |
| | | | | UAUCAACUUGAAAAAGUGGCA | | |
| | | | | CCGAGUCGGUGCUsususu | | |
| mcPCSK9 | GA052 | CAGGTTCC | 81 | csasgsGUUCCAUGGGAUGCUCUG | 2237 | SpCas9 |
| | | ATGGGATG | | UUUUAGAGCUAGAAAUAGCAA | | |
| | | CTCT | | GUUAAAAUAAGGCUAGUCCGU | | |
| | | | | UAUCAACUUGAAAAAGUGGCA | | |
| | | | | CCGAGUCGGUGCUsususu | | |
| mcPCK9 | GA053 | CAGGTTCC | 81 | csasgsGUUCCAUGGGAUGCUCUG | 2236 | SpCas9 |
| | | ATGGGATG | | UUUUAGAgcuagaaauagcAAGUUA | | |
| | | CTCT | | AAAUAAGGCUAGUCCGUUAUC | | |
| | | | | Aacuugaaaaaguggcaccgagucggugcusu | | |
| | | | | susu | | |
| mcPCSK9 | GA054 | CAGGTTCC | 81 | csasgsGUUCCAUGGGAUGCUCUg | 55 | SpCas9 |
| | | ATGGGATG | | UUUUAGagcuaGaaauagcaaGUUaAa | | |
| | | CTCT | | AuAaggCUaGUCcGUUAucAAcuuG | | |
| | | | | aaaaaguGgcaccgAgUCggugcusususu | | |
| mcPCSK9 | GA055 | CAGGTTCC | 81 | csasgsGUUCCAUGGGAUGCUCUg | 2238 | SpCas9 |
| | | ATGGGATG | | UUUUAGagcuagaaauagcaaGUUaAa | | |
| | | CTCT | | AuAaggcuaGUccGUUAucAAcuugaa | | |
| | | | | aaagugGcaccgagucggugcusususu | | |
| hcPCSK9 | GA066/ | CCCGCACC | 13 | cscscsGCACCUUGGCGCAGCGGG | 2239 | ABE/ |
| | GA095 | TTGGCGCA | | UUUUAGAgcuagaaauagcAAGUUA | | SpCas9 |
| | | GCGG | | AAAUAAGGCUAGUCCGUUAUC | | |
| | | | | Aacuugaaaaaguggcaccgagucggugcusu | | |
| | | | | susu | | |
| CANGPTL3 | GA067/ | AAGATACC | 14 | asasgsAUACCUGAAUAACUCUCG | 257 | ABE/ |
| | GA101 | TGAATAAC | | UUUUAGAgcuagaaauagcAAGUUA | | SpCas9 |
| | | TCTC | | AAAUAAGGCUAGUCCGUUAUC | | |
| | | | | Aacuugaaaaaguggcaccgagucggugcusu | | |
| | | | | susu | | |
| hcPCSK9 | GA072 | GGTGGCTC | 82 | gsgsusGGCUCACCAGCUCCAGCG | 258 | ABE |
| | | ACCAGCTC | | UUUUAGAGCUAGAAAUAGCAA | | |
| | | CAGC | | GUUAAAAUAAGGCUAGUCCGU | | |
| | | | | UAUCAACUUGAAAAAGUGGCA | | |
| | | | | CCGAGUCGGUGCUsususu | | |
| hcPCSK9 | GA073 | GCTTACCT | 67 | gscsusUACCUGUCUGUGGAAGC | 259 | ABE |
| | | GTCTGTGG | | GUUUUAGAGCUAGAAAUAGCA | | |
| | | AAGC | | AGUUAAAAUAAGGCUAGUCCG | | |
| | | | | UUAUCAACUUGAAAAAGUGGC | | |
| | | | | ACCGAGUCGGUGCUsususu | | |
| hcPCSK9 | GA074 | TGCTTACC | 68 | usgscsUUACCUGUCUGUGGAAG | 260 | ABE |
| | | TGTCTGTG | | GUUUUAGAGCUAGAAAUAGCA | | |
| | | GAAG | | AGUUAAAAUAAGGCUAGUCCG | | |
| | | | | UUAUCAACUUGAAAAAGUGGC | | |
| | | | | ACCGAGUCGGUGCUsususu | | |
| hPCSK9 | GA075 | TTGGAAAG | 83 | ususgsGAAAGACGGAGGCAGCC | 261 | ABE |
| | | ACGGAGG | | GUUUUAGAGCUAGAAAUAGCA | | |
| | | CAGCC | | AGUUAAAAUAAGGCUAGUCCG | | |
| | | | | UUAUCAACUUGAAAAAGUGGC | | |
| | | | | ACCGAGUCGGUGCUsususu | | |
| hPCSK9 | GA076 | GAAAGAC | 84 | gsasasAGACGGAGGCAGCCUGGG | 262 | ABE |
| | | GGAGGCA | | UUUUAGAGCUAGAAAUAGCAA | | |
| | | GCCTGG | | GUUAAAAUAAGGCUAGUCCGU | | |
| | | | | UAUCAACUUGAAAAAGUGGCA | | |
| | | | | CCGAGUCGGUGCUsususu | | |
| hcPCSK9 | GA077 | TCCCAGGC | 85 | uscscsCAGGCCUGGAGUUUAUU | 263 | ABE |
| | | CTGGAGTT | | GUUUUAGAGCUAGAAAUAGCA | | |
| | | TATT | | AGUUAAAAUAAGGCUAGUCCG | | |
| | | | | UUAUCAACUUGAAAAAGUGGC | | |
| | | | | ACCGAGUCGGUGCUsususu | | |
| hPCSK9 | GA078 | AGCACCTA | 86 | asgscsACCUACCUCGGGAGCTGG | 264 | ABE |
| | | CCTCGGGA | | UUUUAGAGCUAGAAAUAGCAA | | |
| | | GCTG | | GUUAAAAUAAGGCUAGUCCGU | | |
| | | | | UAUCAACUUGAAAAAGUGGCA | | |
| | | | | CCGAGUCGGUGCUsususu | | |
| hcPCSK9 | GA079 | CTTTCCAG | 87 | csususUCCAGGUCAUCACAGUUG | 265 | ABE |
| | | GTCATCAC | | UUUUAGAGCUAGAAAUAGCAA | | |
| | | AGTT | | GUUAAAAUAAGGCUAGUCCGU | | |
| | | | | UAUCAACUUGAAAAAGUGGCA | | |
| | | | | CCGAGUCGGUGCUsususu | | |
| hcPCSK9 | GA080 | CCTTTCCA | 88 | cscsusUUCCAGGUCAUCACAGUG | 266 | ABE |
| | | GGTCATCA | | UUUUAGAGCUAGAAAUAGCAA | | |
| | | CAGT | | GUUAAAAUAAGGCUAGUCCGU | | |
| | | | | UAUCAACUUGAAAAAGUGGCA | | |
| | | | | CCGAGUCGGUGCUsususu | | |
| hcPCSK9 | GA081 | TTTCCAGG | 89 | usususCCAGGUCAUCACAGUUG | 267 | ABE |
| | | TCATCACA | | GUUUUAGAGCUAGAAAUAGCA | | |
| | | GTTG | | AGUUAAAAUAAGGCUAGUCCG | | |
| | | | | UUAUCAACUUGAAAAAGUGGC | | |
| | | | | ACCGAGUCGGUGCUsususu | | |
| hPCSK9 | GA082 | CTTACCTG | 90 | csususACCUGCCCCAUGGGUGCG | 268 | ABE |
| | | CCCCATGG | | UUUUAGAGCUAGAAAUAGCAA | | |
| | | GTGC | | GUUAAAAUAAGGCUAGUCCGU | | |
| | | | | UAUCAACUUGAAAAAGUGGCA | | |
| | | | | CCGAGUCGGUGCUsususu | | |
| hPCSK9 | GA083 | TAAGGCCC | 91 | usasasGGCCCAAGGGGGCAAGCG | 269 | ABE |
| | | AAGGGGG | | UUUUAGAGCUAGAAAUAGCAA | | |
| | | CAAGC | | GUUAAAAUAAGGCUAGUCCGU | | |
| | | | | UAUCAACUUGAAAAAGUGGCA | | |
| | | | | CCGAGUCGGUGCUsususu | | |
| hPCSK9 | GA084 | CCTCTTCA | 92 | cscsusCUUCACCUGCUCCUGAGG | 270 | ABE |
| | | CCTGCTCC | | UUUUAGAGCUAGAAAUAGCAA | | |
| | | TGAG | | GUUAAAAUAAGGCUAGUCCGU | | |
| | | | | UAUCAACUUGAAAAAGUGGCA | | |
| | | | | CCGAGUCGGUGCUsususu | | |
| hPCSK9 | GA085 | GCCTCTTC | 93 | gscscsUCUUCACCUGCUCCUGAG | 271 | ABE |
| | | ACCTGCTC | | UUUUAGAGCUAGAAAUAGCAA | | |
| | | CTGA | | GUUAAAAUAAGGCUAGUCCGU | | |
| | | | | UAUCAACUUGAAAAAGUGGCA | | |
| | | | | CCGAGUCGGUGCUsususu | | |
| hPCSK9 | GA086 | TTCACCTG | 94 | ususcsACCUGCUCCUGAGGGGCG | 272 | ABE |
| | | CTCCTGAG | | UUUUAGAGCUAGAAAUAGCAA | | |
| | | GGGC | | GUUAAAAUAAGGCUAGUCCGU | | |
| | | | | UAUCAACUUGAAAAAGUGGCA | | |
| | | | | CCGAGUCGGUGCUsususu | | |
| hcPCSK9 | GA087 | TCACCTGC | 95 | uscsasCCUGCUCCUGAGGGGCCG | 273 | ABE |
| | | TCCTGAGG | | UUUUAGAGCUAGAAAUAGCAA | | |
| | | GGCC | | GUUAAAAUAAGGCUAGUCCGU | | |
| | | | | UAUCAACUUGAAAAAGUGGCA | | |
| | | | | CCGAGUCGGUGCUsususu | | |
| hcPCSK9 | GA088 | CCCAGGCT | 96 | cscscsAGGCUGCAGCUCCCACUG | 274 | ABE |
| | | GCAGCTCC | | UUUUAGAGCUAGAAAUAGCAA | | |
| | | CACT | | GUUAAAAUAAGGCUAGUCCGU | | |
| | | | | UAUCAACUUGAAAAAGUGGCA | | |
| | | | | CCGAGUCGGUGCUsususu | | |
| hPCSK9 | GA089 | CCCCAGGC | 97 | cscscsCAGGCUGCAGCUCCCACG | 275 | ABE |
| | | TGCAGCTC | | UUUUAGAGCUAGAAAUAGCAA | | |
| | | CCAC | | GUUAAAAUAAGGCUAGUCCGU | | |
| | | | | UAUCAACUUGAAAAAGUGGCA | | |
| | | | | CCGAGUCGGUGCUsususu | | |
| hPCSK9 | GA090 | GCAGGTG | 98 | gscsasGGUGACCGUGGCCUGCGG | 276 | ABE |
| | | ACCGTGGC | | UUUUAGAGCUAGAAAUAGCAA | | |
| | | CTGCG | | GUUAAAAUAAGGCUAGUCCGU | | |
| | | | | UAUCAACUUGAAAAAGUGGCA | | |
| | | | | CCGAGUCGGUGCUsususu | | |
| hANGPTL3 | GA091 | AAGATACC | 15 | asasgsAUACCUGAAUAACCCUCG | 59 | ABE |
| | | TGAATAAC | | UUUUAGAGCUAGAAAUAGCAA | | |
| | | CCTC | | GUUAAAAUAAGGCUAGUCCGU | | |
| | | | | UAUCAACUUGAAAAAGUGGCA | | |
| | | | | CCGAGUCGGUGCUsususu | | |
| hcANGPTL3 | GA092 | CTCCTTTA | 99 | csuscsCUUUAGGAGGCUGGUGG | 277 | ABE |
| | | GGAGGCT | | GUUUUAGAGCUAGAAAUAGCA | | |
| | | GGTGG | | AGUUAAAAUAAGGCUAGUCCG | | |
| | | | | UUAUCAACUUGAAAAAGUGGC | | |
| | | | | ACCGAGUCGGUGCUsususu | | |
| hANGPTL3 | GA093 | TTTTCAGG | 100 | usususUCAGGAGAAUUUUGGUU | 278 | ABE |
| | | AGAATTTT | | GUUUUAGAGCUAGAAAUAGCA | | |
| | | GGTT | | AGUUAAAAUAAGGCUAGUCCG | | |
| | | | | UUAUCAACUUGAAAAAGUGGC | | |
| | | | | ACCGAGUCGGUGCUsususu | | |
| hANGPTL3 | GA094/ | CTTTTCAG | 101 | csususUUCAGGAGAAUUUUGGU | 279 | ABE |
| | GA153 | GAGAATTT | | GUUUUAGAGCUAGAAAUAGCA | | |
| | | TGGT | | AGUUAAAAUAAGGCUAGUCCG | | |
| | | | | UUAUCAACUUGAAAAAGUGGC | | |
| | | | | ACCGAGUCGGUGCUsususu | | |
| hcPCSK9 | GA095/ | CCCGCACC | 13 | cscscsGCACCUUGGCGCAGCGGG | 2239 | ABE |
| | GA066 | TTGGCGCA | | UUUUAGAgcuagaaauagcAAGUUA | | |
| | | GCGG | | AAAUAAGGCUAGUCCGUUAUC | | |
| | | | | Aacuugaaaaaguggcaccgagucggugcusu | | |
| | | | | susu | | |
| hcPCSK9 | GA096 | CCCGCACC | 13 | cscscsGCACCUUGGCGCAGCGGg | | ABE |
| | | TTGGCGCA | | UUUUAGagcuaGaaauagcaaGUUaAa | | |
| | | GCGG | | AuAaggCUaGUCcGUUAucAAcuuG | | |
| | | | | aaaaaguGgcaccgAgUCggugcusususu | | |
| hcPCSK9 | GA097 | CCCGCACC | 13 | cscscsGCACCUUGGCGCAGCGGg | 2240 | ABE |
| | | TTGGCGCA | | UUUUAGagcuagaaauagcaaGUUaAa | | |
| | | GCGG | | AuAaggcuaGUccGUUAucAAcuugaa | | |
| | | | | aaagugGcaccgagucggugcusususu | | |
| hANGPTL3 | GA098 | AAGATACC | 15 | asasgsAUACCUGAAUAACCCUCG | 60 | ABE |
| | | TGAATAAC | | UUUUAGAgcuagaaauagcAAGUUA | | |
| | | CCTC | | AAAUAAGGCUAGUCCGUUAUC | | |
| | | | | Aacuugaaaaaguggcaccgagucggugcusu | | |
| | | | | susu | | |
| hANGPTL3 | GA099 | AAGATACC | 15 | asasgsAUACCUGAAUAACCCUCg | 2242 | ABE |
| | | TGAATAAC | | UUUUAGagcuaGaaauagcaaGUUaAa | | |
| | | CCTC | | AuAaggCUaGUCcGUUAucAAcuuG | | |
| | | | | aaaaaguGgcaccgAgUCggugcusususu | | |
| hANGPTL3 | GA100 | AAGATACC | 15 | asasgsAUACCUGAAUAACCCUCg | 2243 | ABE |
| | | TGAATAAC | | UUUUAGagcuagaaauagcaaGUUaAa | | |
| | | CCTC | | AuAaggcuaGUccGUUAucAAcuugaa | | |
| | | | | aaagugGcaccgagucggugcusususu | | |
| CANGPTL3 | GA101/ | AAGATACC | 14 | asasgsAUACCUGAAUAACUCUCG | 257 | ABE |
| | GA067 | TGAATAAC | | UUUUAGAgcuagaaauagcAAGUUA | | |
| | | TCTC | | AAAUAAGGCUAGUCCGUUAUC | | |
| | | | | Aacuugaaaaaguggcaccgagucggugcusu | | |
| | | | | susu | | |
| CANGPTL3 | GA102 | AAGATACC | 14 | asasgsAUACCUGAAUAACUCUCg | 2244 | ABE |
| | | TGAATAAC | | UUUUAGagcuaGaaauagcaaGUUaAa | | |
| | | TCTC | | AuAaggCUaGUCcGUUAucAAcuuG | | |
| | | | | aaaaaguGgcaccgAgUCggugcusususu | | |
| cANGPTL3 | GA103 | AAGATACC | 14 | asasgsAUACCUGAAUAACUCUCg | 2245 | ABE |
| | | TGAATAAC | | UUUUAGagcuagaaauagcaaGUUaAa | | |
| | | TCTC | | AuAaggcuaGUccGUUAucAAcuugaa | | |
| | | | | aaagugGcaccgagucggugcusususu | | |
| hANGPTL3 | GA104 | TAATTTGG | 102 | usasasUUUGGCCCUUCGUCUUAG | 280 | ABE |
| | | CCCTTCGT | | UUUUAGAGCUAGAAAUAGCAA | | |
| | | CTTA | | GUUAAAAUAAGGCUAGUCCGU | | |
| | | | | UAUCAACUUGAAAAAGUGGCA | | |
| | | | | CCGAGUCGGUGCUsususu | | |
| hANGPTL3 | GA105 | AGACTTTG | 103 | asgsasCUUUGUCCAUAAGACGAG | 281 | ABE |
| | | TCCATAAG | | UUUUAGAGCUAGAAAUAGCAA | | |
| | | ACGA | | GUUAAAAUAAGGCUAGUCCGU | | |
| | | | | UAUCAACUUGAAAAAGUGGCA | | |
| | | | | CCGAGUCGGUGCUsususu | | |
| hANGPTL3 | GA106 | GACTTTGT | 104 | gsascsUUUGUCCAUAAGACGAA | 282 | ABE |
| | | CCATAAGA | | GUUUUAGAGCUAGAAAUAGCA | | |
| | | CGAA | | AGUUAAAAUAAGGCUAGUCCG | | |
| | | | | UUAUCAACUUGAAAAAGUGGC | | |
| | | | | ACCGAGUCGGUGCUsususu | | |
| hcANGPTL3 | GA107 | AGCCAATG | 105 | asgscsCAAUGGCCUCCUUCAGUG | 283 | SpCas9 |
| | | GCCTCCTT | | UUUUAGAGCUAGAAAUAGCAA | | |
| | | CAGT | | GUUAAAAUAAGGCUAGUCCGU | | |
| | | | | UAUCAACUUGAAAAAGUGGCA | | |
| | | | | CCGAGUCGGUGCUsususu | | |
| hcANGPTL3 | GA108 | TCCCAACT | 106 | uscscsCAACUGAAGGAGGCCAUG | 284 | SpCas9 |
| | | GAAGGAG | | UUUUAGAGCUAGAAAUAGCAA | | |
| | | GCCAT | | GUUAAAAUAAGGCUAGUCCGU | | |
| | | | | UAUCAACUUGAAAAAGUGGCA | | |
| | | | | CCGAGUCGGUGCUsususu | | |
| hcANGPTL3 | GA109 | GGCCTCCT | 107 | gsgscsCUCCUUCAGUUGGGACAG | 285 | SpCas9 |
| | | TCAGTTGG | | UUUUAGAGCUAGAAAUAGCAA | | |
| | | GACA | | GUUAAAAUAAGGCUAGUCCGU | | |
| | | | | UAUCAACUUGAAAAAGUGGCA | | |
| | | | | CCGAGUCGGUGCUsususu | | |
| hcANGPTL3 | GA110 | GACCATGT | 108 | gsascsCAUGUCCCAACUGAAGGG | 286 | SpCas9 |
| | | CCCAACTG | | UUUUAGAGCUAGAAAUAGCAA | | |
| | | AAGG | | GUUAAAAUAAGGCUAGUCCGU | | |
| | | | | UAUCAACUUGAAAAAGUGGCA | | |
| | | | | CCGAGUCGGUGCUsususu | | |
| hcANGPTL3 | GA111 | GCCAATGG | 109 | gscscsAAUGGCCUCCUUCAGUUG | 287 | SpCas9 |
| | | CCTCCTTC | | UUUUAGAGCUAGAAAUAGCAA | | |
| | | AGTT | | GUUAAAAUAAGGCUAGUCCGU | | |
| | | | | UAUCAACUUGAAAAAGUGGCA | | |
| | | | | CCGAGUCGGUGCUsususu | | |
| hANGPTL3 | GA112 | ATTGTCTT | 110 | asususGUCUUGAUCAAUUCUGG | 288 | ABE/ |
| | | GATCAATT | | GUUUUAGAGCUAGAAAUAGCA | | SpCas9 |
| | | CTGG | | AGUUAAAAUAAGGCUAGUCCG | | |
| | | | | UUAUCAACUUGAAAAAGUGGC | | |
| | | | | ACCGAGUCGGUGCUsususu | | |
| hcANGPTL3 | GA113 | ATTCTGGA | 111 | asususCUGGAGGAAAUAACUAG | 289 | ABE/ |
| | | GGAAATA | | GUUUUAGAGCUAGAAAUAGCA | | SpCas9 |
| | | ACTAG | | AGUUAAAAUAAGGCUAGUCCG | | |
| | | | | UUAUCAACUUGAAAAAGUGGC | | |
| | | | | ACCGAGUCGGUGCUsususu | | |
| hANGPTL3 | GA114 | TCTGGGTG | 112 | uscsusGGGUGUUCUGGAGUUUC | 290 | SpCas9 |
| | | TTCTGGAG | | GUUUUAGAGCUAGAAAUAGCA | | |
| | | TTTC | | AGUUAAAAUAAGGCUAGUCCG | | |
| | | | | UUAUCAACUUGAAAAAGUGGC | | |
| | | | | ACCGAGUCGGUGCUsususu | | |
| hcANGPTL3 | GA115 | AACATAGC | 113 | asascsAUAGCAAAUCUUGAUUU | 291 | ABE/ |
| | | AAATCTTG | | GUUUUAGAGCUAGAAAUAGCA | | SpCas9 |
| | | ATTT | | AGUUAAAAUAAGGCUAGUCCG | | |
| | | | | UUAUCAACUUGAAAAAGUGGC | | |
| | | | | ACCGAGUCGGUGCUsususu | | |
| hcANGPTL3 | GA116 | GTAGAATT | 114 | gsusasGAAUUUUUUCUUCUAGG | 292 | ABE/ |
| | | TTTTCTTC | | GUUUUAGAGCUAGAAAUAGCA | | SpCas9 |
| | | TAGG | | AGUUAAAAUAAGGCUAGUCCG | | |
| | | | | UUAUCAACUUGAAAAAGUGGC | | |
| | | | | ACCGAGUCGGUGCUsususu | | |
| hcANGPTL3 | GA117 | ACTACAAG | 115 | ascsusACAAGUCAAAAAUGAAG | 293 | ABE/ |
| | | TCAAAAAT | | GUUUUAGAGCUAGAAAUAGCA | | SpCas9 |
| | | GAAG | | AGUUAAAAUAAGGCUAGUCCG | | |
| | | | | UUAUCAACUUGAAAAAGUGGC | | |
| | | | | ACCGAGUCGGUGCUsususu | | |
| hANGPTL3 | GA118 | TATATTGG | 116 | usasusAUUGGUCUUCCACGGUCG | 294 | ABE/ |
| | | TCTTCCAC | | UUUUAGAGCUAGAAAUAGCAA | | SpCas9 |
| | | GGTC | | GUUAAAAUAAGGCUAGUCCGU | | |
| | | | | UAUCAACUUGAAAAAGUGGCA | | |
| | | | | CCGAGUCGGUGCUsususu | | |
| hANGPTL3 | GA119 | CAAAGAC | 117 | csasasAGACCUUCUCCAGACCGG | 295 | ABE/ |
| | | CTTCTCCA | | UUUUAGAGCUAGAAAUAGCAA | | SpCas9 |
| | | GACCG | | GUUAAAAUAAGGCUAGUCCGU | | |
| | | | | UAUCAACUUGAAAAAGUGGCA | | |
| | | | | CCGAGUCGGUGCUsususu | | |
| hANGPTL3 | GA120 | GGTCTTCC | 118 | gsgsusCUUCCACGGUCUGGAGA | 296 | ABE/ |
| | | ACGGTCTG | | GUUUUAGAGCUAGAAAUAGCA | | SpCas9 |
| | | GAGA | | AGUUAAAAUAAGGCUAGUCCG | | |
| | | | | UUAUCAACUUGAAAAAGUGGC | | |
| | | | | ACCGAGUCGGUGCUsususu | | |
| hANGPTL3 | GA121 | TTGTTTAT | 119 | ususgsUUUAUAUUGGUCUUCCA | 297 | ABE/ |
| | | ATTGGTCT | | GUUUUAGAGCUAGAAAUAGCA | | SpCas9 |
| | | TCCA | | AGUUAAAAUAAGGCUAGUCCG | | |
| | | | | UUAUCAACUUGAAAAAGUGGC | | |
| | | | | ACCGAGUCGGUGCUsususu | | |
| hcANGPTL3 | GA122 | CTTTTATT | 120 | csususUUAUUUGACUAUGCUGU | 298 | ABE/ |
| | | TGACTATG | | GUUUUAGAGCUAGAAAUAGCA | | SpCas9 |
| | | CTGT | | AGUUAAAAUAAGGCUAGUCCG | | |
| | | | | UUAUCAACUUGAAAAAGUGGC | | |
| | | | | ACCGAGUCGGUGCUsususu | | |
| hANGPTL3 | GA123 | AAAGTCTG | 121 | asasasGUCUGGAUAUAGAGAGU | 299 | ABE/ |
| | | GATATAGA | | GUUUUAGAGCUAGAAAUAGCA | | SpCas9 |
| | | GAGT | | AGUUAAAAUAAGGCUAGUCCG | | |
| | | | | UUAUCAACUUGAAAAAGUGGC | | |
| | | | | ACCGAGUCGGUGCUsususu | | |
| hANGPTL3 | GA124 | GTTGGTTT | 122 | gsususGGUUUAAUUGUUUAUAU | 300 | ABE/ |
| | | AATTGTTT | | GUUUUAGAGCUAGAAAUAGCA | | SpCas9 |
| | | ATAT | | AGUUAAAAUAAGGCUAGUCCG | | |
| | | | | UUAUCAACUUGAAAAAGUGGC | | |
| | | | | ACCGAGUCGGUGCUsususu | | |
| hcANGPTL3 | GA125 | TGATGGTA | 123 | usgsasUGGUAAGACACUUUGGU | 301 | ABE/ |
| | | AGACACTT | | GUUUUAGAGCUAGAAAUAGCA | | SpCas9 |
| | | TGGT | | AGUUAAAAUAAGGCUAGUCCG | | |
| | | | | UUAUCAACUUGAAAAAGUGGC | | |
| | | | | ACCGAGUCGGUGCUsususu | | |
| hcANGPTL3 | GA126 | GGAGTAGT | 124 | gsgsasGUAGUUCUUGGUGCUCU | 302 | ABE/ |
| | | TCTTGGTG | | GUUUUAGAGCUAGAAAUAGCA | | SpCas9 |
| | | CTCT | | AGUUAAAAUAAGGCUAGUCCG | | |
| | | | | UUAUCAACUUGAAAAAGUGGC | | |
| | | | | ACCGAGUCGGUGCUsususu | | |
| hcANGPTL3 | GA127 | AACATGAT | 125 | asascsAUGAUGGUAAGACACUU | 303 | ABE/ |
| | | GGTAAGA | | GUUUUAGAGCUAGAAAUAGCA | | SpCas9 |
| | | CACTT | | AGUUAAAAUAAGGCUAGUCCG | | |
| | | | | UUAUCAACUUGAAAAAGUGGC | | |
| | | | | ACCGAGUCGGUGCUsususu | | |
| hcANGPTL3 | GA128 | TGAAGAA | 126 | usgsasAGAAAGGGAGUAGUUCU | 304 | ABE/ |
| | | AGGGAGT | | GUUUUAGAGCUAGAAAUAGCA | | SpCas9 |
| | | AGTTCT | | AGUUAAAAUAAGGCUAGUCCG | | |
| | | | | UUAUCAACUUGAAAAAGUGGC | | |
| | | | | ACCGAGUCGGUGCUsususu | | |
| hcANGPTL3 | GA129 | AGTTCTTG | 127 | asgsusUCUUGGUGCUCUUGGCU | 305 | ABE/ |
| | | GTGCTCTT | | GUUUUAGAGCUAGAAAUAGCA | | SpCas9 |
| | | GGCT | | AGUUAAAAUAAGGCUAGUCCG | | |
| | | | | UUAUCAACUUGAAAAAGUGGC | | |
| | | | | ACCGAGUCGGUGCUsususu | | |
| hcANGPTL3 | GA130 | ATGATGGT | 128 | asusgsAUGGUAAGACACUUUGG | 306 | ABE/ |
| | | AAGACACT | | GUUUUAGAGCUAGAAAUAGCA | | SpCas9 |
| | | TTGG | | AGUUAAAAUAAGGCUAGUCCG | | |
| | | | | UUAUCAACUUGAAAAAGUGGC | | |
| | | | | ACCGAGUCGGUGCUsususu | | |
| hcANGPTL3 | GA131 | GAAGATA | 129 | gsasasGAUAGAGAAAUUUCUGU | 307 | ABE/ |
| | | GAGAAATT | | GUUUUAGAGCUAGAAAUAGCA | | SpCas9 |
| | | TCTGT | | AGUUAAAAUAAGGCUAGUCCG | | |
| | | | | UUAUCAACUUGAAAAAGUGGC | | |
| | | | | ACCGAGUCGGUGCUsususu | | |
| hcANGPTL3 | GA132 | GGAAGAT | 130 | gsgsasAGAUAGAGAAAUUUCUG | 308 | ABE/ |
| | | AGAGAAA | | GUUUUAGAGCUAGAAAUAGCA | | SpCas9 |
| | | TTTCTG | | AGUUAAAAUAAGGCUAGUCCG | | |
| | | | | UUAUCAACUUGAAAAAGUGGC | | |
| | | | | ACCGAGUCGGUGCUsususu | | |
| hANGPTL3 | GA133 | TATTTCAT | 131 | usasusUUCAUUCAACUGAAGAA | 309 | ABE/ |
| | | TCAACTGA | | GUUUUAGAGCUAGAAAUAGCA | | SpCas9 |
| | | AGAA | | AGUUAAAAUAAGGCUAGUCCG | | |
| | | | | UUAUCAACUUGAAAAAGUGGC | | |
| | | | | ACCGAGUCGGUGCUsususu | | |
| hANGPTL3 | GA134 | ATTTCATT | 132 | asususUCAUUCAACUGAAGAAA | 310 | ABE/ |
| | | CAACTGAA | | GUUUUAGAGCUAGAAAUAGCA | | SpCas9 |
| | | GAAA | | AGUUAAAAUAAGGCUAGUCCG | | |
| | | | | UUAUCAACUUGAAAAAGUGGC | | |
| | | | | ACCGAGUCGGUGCUsususu | | |
| hANGPTL3 | GA135 | GTCTACTG | 133 | gsuscsUACUGUGAUGUUAUAUC | 311 | ABE/ |
| | | TGATGTTA | | GUUUUAGAGCUAGAAAUAGCA | | SpCas9 |
| | | TATC | | AGUUAAAAUAAGGCUAGUCCG | | |
| | | | | UUAUCAACUUGAAAAAGUGGC | | |
| | | | | ACCGAGUCGGUGCUsususu | | |
| hANGPTL3 | GA136 | TAAATGGT | 134 | usasasAUGGUGGUACAUUCAGC | 312 | ABE/ |
| | | GGTACATT | | GUUUUAGAGCUAGAAAUAGCA | | SpCas9 |
| | | CAGC | | AGUUAAAAUAAGGCUAGUCCG | | |
| | | | | UUAUCAACUUGAAAAAGUGGC | | |
| | | | | ACCGAGUCGGUGCUsususu | | |
| hcANGPTL3 | GA137 | TATCAGGT | 135 | usasusCAGGUAAAACCUGUCUA | 313 | ABE/ |
| | | AAAACCTG | | GUUUUAGAGCUAGAAAUAGCA | | SpCas9 |
| | | TCTA | | AGUUAAAAUAAGGCUAGUCCG | | |
| | | | | UUAUCAACUUGAAAAAGUGGC | | |
| | | | | ACCGAGUCGGUGCUsususu | | |
| hANGPTL3 | GA138 | TGTACCAC | 136 | usgsusACCACCAUUUAUAACAG | 314 | ABE/ |
| | | CATTTATA | | GUUUUAGAGCUAGAAAUAGCA | | SpCas9 |
| | | ACAG | | AGUUAAAAUAAGGCUAGUCCG | | |
| | | | | UUAUCAACUUGAAAAAGUGGC | | |
| | | | | ACCGAGUCGGUGCUsususu | | |
| hANGPTL3 | GA139 | TTCACCTC | 137 | ususcsACCUCUGUUAUAAAUGG | 315 | ABE/ |
| | | TGTTATAA | | GUUUUAGAGCUAGAAAUAGCA | | SpCas9 |
| | | ATGG | | AGUUAAAAUAAGGCUAGUCCG | | |
| | | | | UUAUCAACUUGAAAAAGUGGC | | |
| | | | | ACCGAGUCGGUGCUsususu | | |
| hANGPTL3 | GA140 | AACAGAG | 138 | asascsAGAGGUGAACAUACAAG | 316 | ABE/ |
| | | GTGAACAT | | GUUUUAGAGCUAGAAAUAGCA | | SpCas9 |
| | | ACAAG | | AGUUAAAAUAAGGCUAGUCCG | | |
| | | | | UUAUCAACUUGAAAAAGUGGC | | |
| | | | | ACCGAGUCGGUGCUsususu | | |
| hcANGPTL3 | GA141 | TTGAGAGT | 139 | ususgsAGAGUUGCUGGGUCUGA | 317 | ABE/ |
| | | TGCTGGGT | | GUUUUAGAGCUAGAAAUAGCA | | SpCas9 |
| | | CTGA | | AGUUAAAAUAAGGCUAGUCCG | | |
| | | | | UUAUCAACUUGAAAAAGUGGC | | |
| | | | | ACCGAGUCGGUGCUsususu | | |
| hcANGPTL3 | GA142 | TGAAAAA | 140 | usgsasAAAACUUGAGAGUUGCU | 318 | SpCas9 |
| | | CTTGAGAG | | GUUUUAGAGCUAGAAAUAGCA | | |
| | | TTGCT | | AGUUAAAAUAAGGCUAGUCCG | | |
| | | | | UUAUCAACUUGAAAAAGUGGC | | |
| | | | | ACCGAGUCGGUGCUsususu | | |
| hcANGPTL3 | GA143 | TTAATTCA | 141 | ususasAUUCAACAUCGAAUAGA | 319 | ABE/ |
| | | ACATCGAA | | GUUUUAGAGCUAGAAAUAGCA | | SpCas9 |
| | | TAGA | | AGUUAAAAUAAGGCUAGUCCG | | |
| | | | | UUAUCAACUUGAAAAAGUGGC | | |
| | | | | ACCGAGUCGGUGCUsususu | | |
| hANGPTL3 | GA144 | TTTGGGAG | 142 | usususGGGAGGCUUGAUGGUAA | 320 | ABE/ |
| | | GCTTGATG | | GUUUUAGAGCUAGAAAUAGCA | | SpCas9 |
| | | GTAA | | AGUUAAAAUAAGGCUAGUCCG | | |
| | | | | UUAUCAACUUGAAAAAGUGGC | | |
| | | | | ACCGAGUCGGUGCUsususu | | |
| hcANGPTL3 | GA145 | CATTATAT | 143 | csasusUAUAUUCAGGUAGUCCA | 321 | ABE/ |
| | | TCAGGTAG | | GUUUUAGAGCUAGAAAUAGCA | | SpCas9 |
| | | TCCA | | AGUUAAAAUAAGGCUAGUCCG | | |
| | | | | UUAUCAACUUGAAAAAGUGGC | | |
| | | | | ACCGAGUCGGUGCUsususu | | |
| hANGPTL3 | GA146 | TTGGGAGG | 144 | ususgsGGAGGCUUGAUGGUAAG | 322 | ABE/ |
| | | CTTGATGG | | GUUUUAGAGCUAGAAAUAGCA | | SpCas9 |
| | | TAAG | | AGUUAAAAUAAGGCUAGUCCG | | |
| | | | | UUAUCAACUUGAAAAAGUGGC | | |
| | | | | ACCGAGUCGGUGCUsususu | | |
| hANGPTL3 | GA147 | TTTTGGGA | 145 | usususUGGGAGGCUUGAUGGUA | 323 | ABE/ |
| | | GGCTTGAT | | GUUUUAGAGCUAGAAAUAGCA | | SpCas9 |
| | | GGTA | | AGUUAAAAUAAGGCUAGUCCG | | |
| | | | | UUAUCAACUUGAAAAAGUGGC | | |
| | | | | ACCGAGUCGGUGCUsususu | | |
| hcANGPTL3 | GA148 | ACAAAACT | 146 | ascsasAAACUUCAAUGAAACGUG | 324 | ABE/ |
| | | TCAATGAA | | UUUUAGAGCUAGAAAUAGCAA | | SpCas9 |
| | | ACGT | | GUUAAAAUAAGGCUAGUCCGU | | |
| | | | | UAUCAACUUGAAAAAGUGGCA | | |
| | | | | CCGAGUCGGUGCUsususu | | |
| hANGPTL3 | GA149 | TATGGTTT | 147 | usasusGGUUUUGGGAGGCUUGA | 325 | ABE/ |
| | | TGGGAGG | | GUUUUAGAGCUAGAAAUAGCA | | SpCas9 |
| | | CTTGA | | AGUUAAAAUAAGGCUAGUCCG | | |
| | | | | UUAUCAACUUGAAAAAGUGGC | | |
| | | | | ACCGAGUCGGUGCUsususu | | |
| hANGPTL3 | GA150 | ACTACAAA | 148 | ascsusACAAAUAUGGUUUUGGG | 326 | ABE/ |
| | | TATGGTTT | | GUUUUAGAGCUAGAAAUAGCA | | SpCas9 |
| | | TGGG | | AGUUAAAAUAAGGCUAGUCCG | | |
| | | | | UUAUCAACUUGAAAAAGUGGC | | |
| | | | | ACCGAGUCGGUGCUsususu | | |
| hcANGPTL3 | GA151 | GAGAACT | 149 | gsasgsAACUACAAAUAUGGUUU | 327 | ABE/ |
| | | ACAAATAT | | GUUUUAGAGCUAGAAAUAGCA | | SpCas9 |
| | | GGTTT | | AGUUAAAAUAAGGCUAGUCCG | | |
| | | | | UUAUCAACUUGAAAAAGUGGC | | |
| | | | | ACCGAGUCGGUGCUsususu | | |
| hANGPTL3 | GA152 | AGGACACT | 150 | asgsgsACACUUCAACUGUCCAGG | 328 | ABE/ |
| | | TCAACTGT | | UUUUAGAGCUAGAAAUAGCAA | | SpCas9 |
| | | CCAG | | GUUAAAAUAAGGCUAGUCCGU | | |
| | | | | UAUCAACUUGAAAAAGUGGCA | | |
| | | | | CCGAGUCGGUGCUsususu | | |
| hANGPTL3 | GA094/ | CTTTTCAG | 101 | csususUUCAGGAGAAUUUUGGU | 279 | ABE/ |
| | GA153 | GAGAATTT | | GUUUUAGAGCUAGAAAUAGCA | | SpCas9 |
| | | TGGT | | AGUUAAAAUAAGGCUAGUCCG | | |
| | | | | UUAUCAACUUGAAAAAGUGGC | | |
| | | | | ACCGAGUCGGUGCUsususu | | |
| hcPCSK9 | GA156 | GGTGCTAG | 66 | gsgsusGCUAGCCUUGCGUUCCGG | 2235 | SpCas9 |
| | | CCTTGCGT | | UUUUAGAGCUAGAAAUAGCAA | | |
| | | TCCG | | GUUAAAAUAAGGCUAGUCCGU | | |
| | | | | UAUCAACUUGAAAAAGUGGCA | | |
| | | | | CCGAGUCGGUGCUsususu | | |
| hcPCSK9 | GA157 | GCCGTCCT | 151 | gscscsGUCCUCCUCGGAACGCAG | 329 | SpCas9 |
| | | CCTCGGAA | | UUUUAGAGCUAGAAAUAGCAA | | |
| | | CGCA | | GUUAAAAUAAGGCUAGUCCGU | | |
| | | | | UAUCAACUUGAAAAAGUGGCA | | |
| | | | | CCGAGUCGGUGCUsususu | | |
| hcPCSK9 | GA158 | GCTAGCCT | 152 | gscsusAGCCUUGCGUUCCGAGGG | 330 | SpCas9 |
| | | TGCGTTCC | | UUUUAGAGCUAGAAAUAGCAA | | |
| | | GAGG | | GUUAAAAUAAGGCUAGUCCGU | | |
| | | | | UAUCAACUUGAAAAAGUGGCA | | |
| | | | | CCGAGUCGGUGCUsususu | | |
| hcPCSK9 | GA159 | GCGTTCCG | 153 | gscsgsUUCCGAGGAGGACGGCCG | 331 | SpCas9 |
| | | AGGAGGA | | UUUUAGAGCUAGAAAUAGCAA | | |
| | | CGGCC | | GUUAAAAUAAGGCUAGUCCGU | | |
| | | | | UAUCAACUUGAAAAAGUGGCA | | |
| | | | | CCGAGUCGGUGCUsususu | | |
| hcPCSK9 | GA160 | GCCTTGCG | 154 | gscscsUUGCGUUCCGAGGAGGA | 332 | SpCas9 |
| | | TTCCGAGG | | GUUUUAGAGCUAGAAAUAGCA | | |
| | | AGGA | | AGUUAAAAUAAGGCUAGUCCG | | |
| | | | | UUAUCAACUUGAAAAAGUGGC | | |
| | | | | ACCGAGUCGGUGCUsususu | | |
| hcPCSK9 | GA161 | GGACGAG | 155 | gsgsasCGAGGACGGCGACUACGG | 333 | SpCas9 |
| | | GACGGCG | | UUUUAGAGCUAGAAAUAGCAA | | |
| | | ACTACG | | GUUAAAAUAAGGCUAGUCCGU | | |
| | | | | UAUCAACUUGAAAAAGUGGCA | | |
| | | | | CCGAGUCGGUGCUsususu | | |
| hcPCSK9 | GA162 | GGACGGC | 156 | gsgsasCGGCGACUACGAGGAGCG | 334 | SpCas9 |
| | | GACTACGA | | UUUUAGAGCUAGAAAUAGCAA | | |
| | | GGAGC | | GUUAAAAUAAGGCUAGUCCGU | | |
| | | | | UAUCAACUUGAAAAAGUGGCA | | |
| | | | | CCGAGUCGGUGCUsususu | | |
| hcPCSK9 | GA163 | CGTCCTCG | 157 | csgsusCCUCGUCCUCCUGCGCAG | 335 | SpCas9 |
| | | TCCTCCTG | | UUUUAGAGCUAGAAAUAGCAA | | |
| | | CGCA | | GUUAAAAUAAGGCUAGUCCGU | | |
| | | | | UAUCAACUUGAAAAAGUGGCA | | |
| | | | | CCGAGUCGGUGCUsususu | | |
| hcPCSK9 | GA164 | GTCCTCGT | 158 | gsuscsCUCGUCCUCCUGCGCACG | 336 | SpCas9 |
| | | CCTCCTGC | | UUUUAGAGCUAGAAAUAGCAA | | |
| | | GCAC | | GUUAAAAUAAGGCUAGUCCGU | | |
| | | | | UAUCAACUUGAAAAAGUGGCA | | |
| | | | | CCGAGUCGGUGCUsususu | | |
| hcPCSK9 | GA165 | CCGTCAGC | 159 | cscsgsUCAGCUCCAGGCGGUCCG | 337 | SpCas9 |
| | | TCCAGGCG | | UUUUAGAGCUAGAAAUAGCAA | | |
| | | GTCC | | GUUAAAAUAAGGCUAGUCCGU | | |
| | | | | UAUCAACUUGAAAAAGUGGCA | | |
| | | | | CCGAGUCGGUGCUsususu | | |
| hcPCSK9 | GA166 | CGCCCGTG | 160 | csgscsCCGUGCGCAGGAGGACGG | 338 | SpCas9 |
| | | CGCAGGA | | UUUUAGAGCUAGAAAUAGCAA | | |
| | | GGACG | | GUUAAAAUAAGGCUAGUCCGU | | |
| | | | | UAUCAACUUGAAAAAGUGGCA | | |
| | | | | CCGAGUCGGUGCUsususu | | |
| hcPCSK9 | GA167 | TCAGCTCC | 161 | uscsasGCUCCAGGCGGUCCUGGG | 339 | SpCas9 |
| | | AGGCGGTC | | UUUUAGAGCUAGAAAUAGCAA | | |
| | | CTGG | | GUUAAAAUAAGGCUAGUCCGU | | |
| | | | | UAUCAACUUGAAAAAGUGGCA | | |
| | | | | CCGAGUCGGUGCUsususu | | |
| hcPCSK9 | GA168 | CTTGGCGC | 162 | csususGGCGCAGCGGUGGAAGG | 340 | SpCas9 |
| | | AGCGGTG | | GUUUUAGAGCUAGAAAUAGCA | | |
| | | GAAGG | | AGUUAAAAUAAGGCUAGUCCG | | |
| | | | | UUAUCAACUUGAAAAAGUGGC | | |
| | | | | ACCGAGUCGGUGCUsususu | | |
| hcPCSK9 | GA169 | CGTGCGCA | 163 | csgsusGCGCAGGAGGACGAGGA | 341 | SpCas9 |
| | | GGAGGAC | | GUUUUAGAGCUAGAAAUAGCA | | |
| | | GAGGA | | AGUUAAAAUAAGGCUAGUCCG | | |
| | | | | UUAUCAACUUGAAAAAGUGGC | | |
| | | | | ACCGAGUCGGUGCUsususu | | |
| hcPCSK9 | GA170 | CCAGGACC | 164 | cscsasGGACCGCCUGGAGCUGAG | 342 | SpCas9 |
| | | GCCTGGAG | | UUUUAGAGCUAGAAAUAGCAA | | |
| | | CTGA | | GUUAAAAUAAGGCUAGUCCGU | | |
| | | | | UAUCAACUUGAAAAAGUGGCA | | |
| | | | | CCGAGUCGGUGCUsususu | | |
| hcPCSK9 | GA171 | TCTTGGTG | 165 | uscsusUGGUGAGGUAUCCCCGG | 343 | SpCas9 |
| | | AGGTATCC | | GUUUUAGAGCUAGAAAUAGCA | | |
| | | CCGG | | AGUUAAAAUAAGGCUAGUCCG | | |
| | | | | UUAUCAACUUGAAAAAGUGGC | | |
| | | | | ACCGAGUCGGUGCUsususu | | |
| hcPCSK9 | GA172 | CAGTGCGC | 166 | csasgsUGCGCUCUGACUGCGAGG | 344 | SpCas9 |
| | | TCTGACTG | | UUUUAGAGCUAGAAAUAGCAA | | |
| | | CGAG | | GUUAAAAUAAGGCUAGUCCGU | | |
| | | | | UAUCAACUUGAAAAAGUGGCA | | |
| | | | | CCGAGUCGGUGCUsususu | | |
| hcPCSK9 | GA173 | CTTGGTGA | 167 | csususGGUGAGGUAUCCCCGGCG | 345 | SpCas9 |
| | | GGTATCCC | | UUUUAGAGCUAGAAAUAGCAA | | |
| | | CGGC | | GUUAAAAUAAGGCUAGUCCGU | | |
| | | | | UAUCAACUUGAAAAAGUGGCA | | |
| | | | | CCGAGUCGGUGCUsususu | | |
| hcPCSK9 | GA174 | GGATCTTG | 168 | gsgsasUCUUGGUGAGGUAUCCC | 346 | SpCas9 |
| | | GTGAGGTA | | GUUUUAGAGCUAGAAAUAGCA | | |
| | | TCCC | | AGUUAAAAUAAGGCUAGUCCG | | |
| | | | | UUAUCAACUUGAAAAAGUGGC | | |
| | | | | ACCGAGUCGGUGCUsususu | | |
| hcPCSK9 | GA175 | GAAGATG | 169 | gsasasGAUGAGUGGCGACCUGCG | 347 | SpCas9 |
| | | AGTGGCG | | UUUUAGAGCUAGAAAUAGCAA | | |
| | | ACCTGC | | GUUAAAAUAAGGCUAGUCCGU | | |
| | | | | UAUCAACUUGAAAAAGUGGCA | | |
| | | | | CCGAGUCGGUGCUsususu | | |
| hcPCSK9 | GA176 | AGCACCAC | 170 | asgscsACCACCACGUAGGUGCCG | 348 | SpCas9 |
| | | CACGTAGG | | UUUUAGAGCUAGAAAUAGCAA | | |
| | | TGCC | | GUUAAAAUAAGGCUAGUCCGU | | |
| | | | | UAUCAACUUGAAAAAGUGGCA | | |
| | | | | CCGAGUCGGUGCUsususu | | |
| hcPCSK9 | GA177 | GGTCGCCA | 171 | gsgsusCGCCACUCAUCUUCACCG | 349 | SpCas9 |
| | | CTCATCTT | | UUUUAGAGCUAGAAAUAGCAA | | |
| | | CACC | | GUUAAAAUAAGGCUAGUCCGU | | |
| | | | | UAUCAACUUGAAAAAGUGGCA | | |
| | | | | CCGAGUCGGUGCUsususu | | |
| hcPCSK9 | GA178 | CTCCTTCA | 172 | csuscsCUUCAGCACCACCACGUG | 350 | SpCas9 |
| | | GCACCACC | | UUUUAGAGCUAGAAAUAGCAA | | |
| | | ACGT | | GUUAAAAUAAGGCUAGUCCGU | | |
| | | | | UAUCAACUUGAAAAAGUGGCA | | |
| | | | | CCGAGUCGGUGCUsususu | | |
| hcPCSK9 | GA179 | GAGTGGC | 173 | gsasgsUGGCGACCUGCUGGAGCG | 351 | SpCas9 |
| | | GACCTGCT | | UUUUAGAGCUAGAAAUAGCAA | | |
| | | GGAGC | | GUUAAAAUAAGGCUAGUCCGU | | |
| | | | | UAUCAACUUGAAAAAGUGGCA | | |
| | | | | CCGAGUCGGUGCUsususu | | |
| hcPCSK9 | GA180 | GCGCACTG | 174 | gscsgsCACUGCCCGCCGCCUGCG | 352 | SpCas9 |
| | | CCCGCCGC | | UUUUAGAGCUAGAAAUAGCAA | | |
| | | CTGC | | GUUAAAAUAAGGCUAGUCCGU | | |
| | | | | UAUCAACUUGAAAAAGUGGCA | | |
| | | | | CCGAGUCGGUGCUsususu | | |
| hcPCSK9 | GA181 | GGCTTCCT | 175 | gsgscsUUCCUGGUGAAGAUGAG | 353 | SpCas9 |
| | | GGTGAAG | | GUUUUAGAGCUAGAAAUAGCA | | |
| | | ATGAG | | AGUUAAAAUAAGGCUAGUCCG | | |
| | | | | UUAUCAACUUGAAAAAGUGGC | | |
| | | | | ACCGAGUCGGUGCUsususu | | |
| hcPCSK9 | GA182 | CACCTACG | 176 | csascsCUACGUGGUGGUGCUGAG | 354 | SpCas9 |
| | | TGGTGGTG | | UUUUAGAGCUAGAAAUAGCAA | | |
| | | CTGA | | GUUAAAAUAAGGCUAGUCCGU | | |
| | | | | UAUCAACUUGAAAAAGUGGCA | | |
| | | | | CCGAGUCGGUGCUsususu | | |
| hcPCSK9 | GA183 | CTACGTGG | 177 | csusasCGUGGUGGUGCUGAAGG | 355 | SpCas9 |
| | | TGGTGCTG | | GUUUUAGAGCUAGAAAUAGCA | | |
| | | AAGG | | AGUUAAAAUAAGGCUAGUCCG | | |
| | | | | UUAUCAACUUGAAAAAGUGGC | | |
| | | | | ACCGAGUCGGUGCUsususu | | |
| hcPCSK9 | GA184 | ATGGAAG | 178 | asusgsGAAGACAUGCAGGAUCU | 356 | SpCas9 |
| | | ACATGCAG | | GUUUUAGAGCUAGAAAUAGCA | | |
| | | GATCT | | AGUUAAAAUAAGGCUAGUCCG | | |
| | | | | UUAUCAACUUGAAAAAGUGGC | | |
| | | | | ACCGAGUCGGUGCUsususu | | |
| hcPCSK9 | GA185 | AGACATGC | 179 | asgsasCAUGCAGGAUCUUGGUG | 357 | SpCas9 |
| | | AGGATCTT | | GUUUUAGAGCUAGAAAUAGCA | | |
| | | GGTG | | AGUUAAAAUAAGGCUAGUCCG | | |
| | | | | UUAUCAACUUGAAAAAGUGGC | | |
| | | | | ACCGAGUCGGUGCUsususu | | |
| hcPCSK9 | GA186 | CTCATCTT | 180 | csuscsAUCUUCACCAGGAAGCCG | 358 | SpCas9 |
| | | CACCAGG | | UUUUAGAGCUAGAAAUAGCAA | | |
| | | AAGCC | | GUUAAAAUAAGGCUAGUCCGU | | |
| | | | | UAUCAACUUGAAAAAGUGGCA | | |
| | | | | CCGAGUCGGUGCUsususu | | |
| hcPCSK9 | GA187 | CTCCTCGA | 181 | csuscsCUCGAUGUAGUCGACAUG | 359 | SpCas9 |
| | | TGTAGTCG | | UUUUAGAGCUAGAAAUAGCAA | | |
| | | ACAT | | GUUAAAAUAAGGCUAGUCCGU | | |
| | | | | UAUCAACUUGAAAAAGUGGCA | | |
| | | | | CCGAGUCGGUGCUsususu | | |
| hcPCSK9 | GA188 | TATTCATC | 182 | usasusUCAUCCGCCCGGUACCGG | 360 | SpCas9 |
| | | CGCCCGGT | | UUUUAGAGCUAGAAAUAGCAA | | |
| | | ACCG | | GUUAAAAUAAGGCUAGUCCGU | | |
| | | | | UAUCAACUUGAAAAAGUGGCA | | |
| | | | | CCGAGUCGGUGCUsususu | | |
| hcPCSK9 | GA189 | TCCTCGAT | 183 | uscscsUCGAUGUAGUCGACAUG | 361 | SpCas9 |
| | | GTAGTCGA | | GUUUUAGAGCUAGAAAUAGCA | | |
| | | CATG | | AGUUAAAAUAAGGCUAGUCCG | | |
| | | | | UUAUCAACUUGAAAAAGUGGC | | |
| | | | | ACCGAGUCGGUGCUsususu | | |
| hcPCSK9 | GA1900 | CCTCCTCG | 184 | cscsusCCUCGAUGUAGUCGACAG | 362 | SpCas9 |
| | | ATGTAGTC | | UUUUAGAGCUAGAAAUAGCAA | | |
| | | GACA | | GUUAAAAUAAGGCUAGUCCGU | | |
| | | | | UAUCAACUUGAAAAAGUGGCA | | |
| | | | | CCGAGUCGGUGCUsususu | | |
| hcPCSK9 | GA191 | GCCCCATG | 185 | gscscsCCAUGUCGACUACAUCGG | 363 | SpCas9 |
| | | TCGACTAC | | UUUUAGAGCUAGAAAUAGCAA | | |
| | | ATCG | | GUUAAAAUAAGGCUAGUCCGU | | |
| | | | | UAUCAACUUGAAAAAGUGGCA | | |
| | | | | CCGAGUCGGUGCUsususu | | |
| hcPCSK9 | GA192 | CCATGTCG | 186 | cscsasUGUCGACUACAUCGAGGG | 364 | SpCas9 |
| | | ACTACATC | | UUUUAGAGCUAGAAAUAGCAA | | |
| | | GAGG | | GUUAAAAUAAGGCUAGUCCGU | | |
| | | | | UAUCAACUUGAAAAAGUGGCA | | |
| | | | | CCGAGUCGGUGCUsususu | | |
| hcPCSK9 | GA193 | GGGGCTG | 187 | gsgsgsGCUGGUAUUCAUCCGCCG | 365 | SpCas9 |
| | | GTATTCAT | | UUUUAGAGCUAGAAAUAGCAA | | |
| | | CCGCC | | GUUAAAAUAAGGCUAGUCCGU | | |
| | | | | UAUCAACUUGAAAAAGUGGCA | | |
| | | | | CCGAGUCGGUGCUsususu | | |
| hcPCSK9 | GA194 | GTCGACAT | 188 | gsuscsGACAUGGGGCAACUUCA | 366 | SpCas9 |
| | | GGGGCAA | | GUUUUAGAGCUAGAAAUAGCA | | |
| | | CTTCA | | AGUUAAAAUAAGGCUAGUCCG | | |
| | | | | UUAUCAACUUGAAAAAGUGGC | | |
| | | | | ACCGAGUCGGUGCUsususu | | |
| hcPCSK9 | GA195 | ACCACCGG | 189 | ascscsACCGGGAAAUCGAGGGCG | 367 | SpCas9 |
| | | GAAATCG | | UUUUAGAGCUAGAAAUAGCAA | | |
| | | AGGGC | | GUUAAAAUAAGGCUAGUCCGU | | |
| | | | | UAUCAACUUGAAAAAGUGGCA | | |
| | | | | CCGAGUCGGUGCUsususu | | |
| hcPCSK9 | GA196 | GAGTGACC | 190 | gsasgsUGACCACCGGGAAAUCGG | 368 | SpCas9 |
| | | ACCGGGA | | UUUUAGAGCUAGAAAUAGCAA | | |
| | | AATCG | | GUUAAAAUAAGGCUAGUCCGU | | |
| | | | | UAUCAACUUGAAAAAGUGGCA | | |
| | | | | CCGAGUCGGUGCUsususu | | |
| hcPCSK9 | GA197 | AGTGACCA | 191 | asgsusGACCACCGGGAAAUCGAG | 369 | SpCas9 |
| | | CCGGGAA | | UUUUAGAGCUAGAAAUAGCAA | | |
| | | ATCGA | | GUUAAAAUAAGGCUAGUCCGU | | |
| | | | | UAUCAACUUGAAAAAGUGGCA | | |
| | | | | CCGAGUCGGUGCUsususu | | |
| hcPCSK9 | GA198 | CCACCGGG | 192 | cscsasCCGGGAAAUCGAGGGCAG | 370 | SpCas9 |
| | | AAATCGA | | UUUUAGAGCUAGAAAUAGCAA | | |
| | | GGGCA | | GUUAAAAUAAGGCUAGUCCGU | | |
| | | | | UAUCAACUUGAAAAAGUGGCA | | |
| | | | | CCGAGUCGGUGCUsususu | | |
| hcPCSK9 | GA199 | GAAGCGG | 193 | gsasasGCGGGUCCCGUCCUCCUG | 371 | SpCas9 |
| | | GTCCCGTC | | UUUUAGAGCUAGAAAUAGCAA | | |
| | | CTCCT | | GUUAAAAUAAGGCUAGUCCGU | | |
| | | | | UAUCAACUUGAAAAAGUGGCA | | |
| | | | | CCGAGUCGGUGCUsususu | | |
| hcPCSK9 | GA200 | CTAGGAG | 194 | csusasGGAGAUACACCUCCACCG | 372 | SpCas9 |
| | | ATACACCT | | UUUUAGAGCUAGAAAUAGCAA | | |
| | | CCACC | | GUUAAAAUAAGGCUAGUCCGU | | |
| | | | | UAUCAACUUGAAAAAGUGGCA | | |
| | | | | CCGAGUCGGUGCUsususu | | |
| hcPCSK9 | GA201 | CAGCATAC | 195 | csasgsCAUACAGAGUGACCACCG | 373 | SpCas9 |
| | | AGAGTGA | | UUUUAGAGCUAGAAAUAGCAA | | |
| | | CCACC | | GUUAAAAUAAGGCUAGUCCGU | | |
| | | | | UAUCAACUUGAAAAAGUGGCA | | |
| | | | | CCGAGUCGGUGCUsususu | | |
| hcPCSK9 | GA202 | AAGCGGG | 196 | asasgsCGGGUCCCGUCCUCCUCG | 374 | SpCas9 |
| | | TCCCGTCC | | UUUUAGAGCUAGAAAUAGCAA | | |
| | | TCCTC | | GUUAAAAUAAGGCUAGUCCGU | | |
| | | | | UAUCAACUUGAAAAAGUGGCA | | |
| | | | | CCGAGUCGGUGCUsususu | | |
| hcPCSK9 | GA203 | TGACCCTG | 197 | usgsasCCCUGCCCUCGAUUUCCG | 375 | SpCas9 |
| | | CCCTCGAT | | UUUUAGAGCUAGAAAUAGCAA | | |
| | | TTCC | | GUUAAAAUAAGGCUAGUCCGU | | |
| | | | | UAUCAACUUGAAAAAGUGGCA | | |
| | | | | CCGAGUCGGUGCUsususu | | |
| hcPCSK9 | GA204 | CACTCTGT | 198 | csascsUCUGUAUGCUGGUGUCUG | 376 | SpCas9 |
| | | ATGCTGGT | | UUUUAGAGCUAGAAAUAGCAA | | |
| | | GTCT | | GUUAAAAUAAGGCUAGUCCGU | | |
| | | | | UAUCAACUUGAAAAAGUGGCA | | |
| | | | | CCGAGUCGGUGCUsususu | | |
| hcPCSK9 | GA205 | CCCTGCCC | 199 | cscscsUGCCCUCGAUUUCCCGGG | 377 | SpCas9 |
| | | TCGATTTC | | UUUUAGAGCUAGAAAUAGCAA | | |
| | | CCGG | | GUUAAAAUAAGGCUAGUCCGU | | |
| | | | | UAUCAACUUGAAAAAGUGGCA | | |
| | | | | CCGAGUCGGUGCUsususu | | |
| hcPCSK9 | GA206 | CCGGTGGT | 200 | cscsgsGUGGUCACUCUGUAUGCG | 378 | SpCas9 |
| | | CACTCTGT | | UUUUAGAGCUAGAAAUAGCAA | | |
| | | ATGC | | GUUAAAAUAAGGCUAGUCCGU | | |
| | | | | UAUCAACUUGAAAAAGUGGCA | | |
| | | | | CCGAGUCGGUGCUsususu | | |
| hcPCSK9 | GA207 | GGAAATC | 201 | gsgsasAAUCGAGGGCAGGGUCA | 379 | SpCas9 |
| | | GAGGGCA | | GUUUUAGAGCUAGAAAUAGCA | | |
| | | GGGTCA | | AGUUAAAAUAAGGCUAGUCCG | | |
| | | | | UUAUCAACUUGAAAAAGUGGC | | |
| | | | | ACCGAGUCGGUGCUsususu | | |
| hcPCSK9 | GA208 | CCAGCATA | 202 | cscsasGCAUACAGAGUGACCACG | 380 | SpCas9 |
| | | CAGAGTG | | UUUUAGAGCUAGAAAUAGCAA | | |
| | | ACCAC | | GUUAAAAUAAGGCUAGUCCGU | | |
| | | | | UAUCAACUUGAAAAAGUGGCA | | |
| | | | | CCGAGUCGGUGCUsususu | | |
| hcPCSK9 | GA209 | CTTGGCAG | 203 | csususGGCAGUUGAGCACGCGCG | 381 | SpCas9 |
| | | TTGAGCAC | | UUUUAGAGCUAGAAAUAGCAA | | |
| | | GCGC | | GUUAAAAUAAGGCUAGUCCGU | | |
| | | | | UAUCAACUUGAAAAAGUGGCA | | |
| | | | | CCGAGUCGGUGCUsususu | | |
| hcPCSK9 | GA210 | CTGCGCGT | 204 | csusgsCGCGUGCUCAACUGCCAG | 382 | SpCas9 |
| | | GCTCAACT | | UUUUAGAGCUAGAAAUAGCAA | | |
| | | GCCA | | GUUAAAAUAAGGCUAGUCCGU | | |
| | | | | UAUCAACUUGAAAAAGUGGCA | | |
| | | | | CCGAGUCGGUGCUsususu | | |
| hcPCSK9 | GA211 | TGCGCGTG | 205 | usgscsGCGUGCUCAACUGCCAAG | 383 | SpCas9 |
| | | CTCAACTG | | UUUUAGAGCUAGAAAUAGCAA | | |
| | | CCAA | | GUUAAAAUAAGGCUAGUCCGU | | |
| | | | | UAUCAACUUGAAAAAGUGGCA | | |
| | | | | CCGAGUCGGUGCUsususu | | |
| hcPCSK9 | GA212 | CGGGATGC | 206 | csgsgsGAUGCCGGCGUGGCCAAG | 384 | SpCas9 |
| | | CGGCGTGG | | UUUUAGAGCUAGAAAUAGCAA | | |
| | | CCAA | | GUUAAAAUAAGGCUAGUCCGU | | |
| | | | | UAUCAACUUGAAAAAGUGGCA | | |
| | | | | CCGAGUCGGUGCUsususu | | |
| hcPCSK9 | GA213 | CGTGCTCA | 207 | csgsusGCUCAACUGCCAAGGGAG | 385 | SpCas9 |
| | | ACTGCCAA | | UUUUAGAGCUAGAAAUAGCAA | | |
| | | GGGA | | GUUAAAAUAAGGCUAGUCCGU | | |
| | | | | UAUCAACUUGAAAAAGUGGCA | | |
| | | | | CCGAGUCGGUGCUsususu | | |
| hcPCSK9 | GA214 | CCTTGGCC | 208 | cscsusUGGCCACGCCGGCAUCCG | 386 | SpCas9 |
| | | ACGCCGGC | | UUUUAGAGCUAGAAAUAGCAA | | |
| | | ATCC | | GUUAAAAUAAGGCUAGUCCGU | | |
| | | | | UAUCAACUUGAAAAAGUGGCA | | |
| | | | | CCGAGUCGGUGCUsususu | | |
| hcPCSK9 | GA215 | CAGCGGCC | 209 | csasgsCGGCCGGGAUGCCGGCGG | 387 | SpCas9 |
| | | GGGATGCC | | UUUUAGAGCUAGAAAUAGCAA | | |
| | | GGCG | | GUUAAAAUAAGGCUAGUCCGU | | |
| | | | | UAUCAACUUGAAAAAGUGGCA | | |
| | | | | CCGAGUCGGUGCUsususu | | |
| hcPCSK9 | GA216 | CCGGGATG | 210 | cscsgsGGAUGCCGGCGUGGCCAG | 388 | SpCas9 |
| | | CCGGCGTG | | UUUUAGAGCUAGAAAUAGCAA | | |
| | | GCCA | | GUUAAAAUAAGGCUAGUCCGU | | |
| | | | | UAUCAACUUGAAAAAGUGGCA | | |
| | | | | CCGAGUCGGUGCUsususu | | |
| hcPCSK9 | GA217 | GTGGTCAG | 211 | gsusgsGUCAGCGGCCGGGAUGC | 389 | SpCas9 |
| | | CGGCCGG | | GUUUUAGAGCUAGAAAUAGCA | | |
| | | GATGC | | AGUUAAAAUAAGGCUAGUCCG | | |
| | | | | UUAUCAACUUGAAAAAGUGGC | | |
| | | | | ACCGAGUCGGUGCUsususu | | |
| hcPCSK9 | GA218 | CGCTGACC | 212 | csgscsUGACCACCCCUGCCAGGG | 390 | SpCas9 |
| | | ACCCCTGC | | UUUUAGAGCUAGAAAUAGCAA | | |
| | | CAGG | | GUUAAAAUAAGGCUAGUCCGU | | |
| | | | | UAUCAACUUGAAAAAGUGGCA | | |
| | | | | CCGAGUCGGUGCUsususu | | |
| hcPCSK9 | GA219 | GGCAGGG | 213 | gsgscsAGGGGUGGUCAGCGGCC | 391 | SpCas9 |
| | | GTGGTCAG | | GUUUUAGAGCUAGAAAUAGCA | | |
| | | CGGCC | | AGUUAAAAUAAGGCUAGUCCG | | |
| | | | | UUAUCAACUUGAAAAAGUGGC | | |
| | | | | ACCGAGUCGGUGCUsususu | | |
| hcPCSK9 | GA220 | GTGCTCAA | 214 | gsusgsCUCAACUGCCAAGGGAA | 392 | SpCas9 |
| | | CTGCCAAG | | GUUUUAGAGCUAGAAAUAGCA | | |
| | | GGAA | | AGUUAAAAUAAGGCUAGUCCG | | |
| | | | | UUAUCAACUUGAAAAAGUGGC | | |
| | | | | ACCGAGUCGGUGCUsususu | | |
| hPCSK9 | GA221 | TCATGGCA | 215 | uscsasUGGCACCCACCUGGCAGG | 393 | SpCas9 |
| | | CCCACCTG | | UUUUAGAGCUAGAAAUAGCAA | | |
| | | GCAG | | GUUAAAAUAAGGCUAGUCCGU | | |
| | | | | UAUCAACUUGAAAAAGUGGCA | | |
| | | | | CCGAGUCGGUGCUsususu | | |
| hcPCSK9 | GA222 | TGGCAGG | 216 | usgsgsCAGGGGUGGUCAGCGGC | 394 | SpCas9 |
| | | GGTGGTCA | | GUUUUAGAGCUAGAAAUAGCA | | |
| | | GCGGC | | AGUUAAAAUAAGGCUAGUCCG | | |
| | | | | UUAUCAACUUGAAAAAGUGGC | | |
| | | | | ACCGAGUCGGUGCUsususu | | |
| hcPCSK9 | GA223 | GCTGACCA | 217 | gscsusGACCACCCCUGCCAGGUG | 395 | SpCas9 |
| | | CCCCTGCC | | UUUUAGAGCUAGAAAUAGCAA | | |
| | | AGGT | | GUUAAAAUAAGGCUAGUCCGU | | |
| | | | | UAUCAACUUGAAAAAGUGGCA | | |
| | | | | CCGAGUCGGUGCUsususu | | |
| hcPCSK9 | GA224 | GGCCGCTG | 218 | gsgscsCGCUGACCACCCCUGCCG | 396 | SpCas9 |
| | | ACCACCCC | | UUUUAGAGCUAGAAAUAGCAA | | |
| | | TGCC | | GUUAAAAUAAGGCUAGUCCGU | | |
| | | | | UAUCAACUUGAAAAAGUGGCA | | |
| | | | | CCGAGUCGGUGCUsususu | | |
| hcPCSK9 | GA225 | GGCATCGT | 219 | gsgscsAUCGUCCCGGAAGUUGCG | 397 | SpCas9 |
| | | CCCGGAA | | UUUUAGAGCUAGAAAUAGCAA | | |
| | | GTTGC | | GUUAAAAUAAGGCUAGUCCGU | | |
| | | | | UAUCAACUUGAAAAAGUGGCA | | |
| | | | | CCGAGUCGGUGCUsususu | | |
| hcPCSK9 | GA226 | GGCTTTTC | 220 | gsgscsUUUUCCGAAUAAACUCCG | 398 | SpCas9 |
| | | CGAATAA | | UUUUAGAGCUAGAAAUAGCAA | | |
| | | ACTCC | | GUUAAAAUAAGGCUAGUCCGU | | |
| | | | | UAUCAACUUGAAAAAGUGGCA | | |
| | | | | CCGAGUCGGUGCUsususu | | |
| hcPCSK9 | GA227 | GTCCCGGA | 221 | gsuscsCCGGAAGUUGCCGGCAGG | 399 | SpCas9 |
| | | AGTTGCCG | | UUUUAGAGCUAGAAAUAGCAA | | |
| | | GCAG | | GUUAAAAUAAGGCUAGUCCGU | | |
| | | | | UAUCAACUUGAAAAAGUGGCA | | |
| | | | | CCGAGUCGGUGCUsususu | | |
| hcPCSK9 | GA228 | CGGCTGTA | 222 | csgsgsCUGUACCCACCCGCCAGG | 400 | SpCas9 |
| | | CCCACCCG | | UUUUAGAGCUAGAAAUAGCAA | | |
| | | CCAG | | GUUAAAAUAAGGCUAGUCCGU | | |
| | | | | UAUCAACUUGAAAAAGUGGCA | | |
| | | | | CCGAGUCGGUGCUsususu | | |
| hcPCSK9 | GA229 | GTCGTGCT | 223 | gsuscsGUGCUGGUCACCGCUGCG | 401 | SpCas9 |
| | | GGTCACCG | | UUUUAGAGCUAGAAAUAGCAA | | |
| | | CTGC | | GUUAAAAUAAGGCUAGUCCGU | | |
| | | | | UAUCAACUUGAAAAAGUGGCA | | |
| | | | | CCGAGUCGGUGCUsususu | | |
| hcPCSK9 | GA230 | AGTAGAG | 224 | asgsusAGAGGCAGGCAUCGUCCG | 402 | SpCas9 |
| | | GCAGGCAT | | UUUUAGAGCUAGAAAUAGCAA | | |
| | | CGTCC | | GUUAAAAUAAGGCUAGUCCGU | | |
| | | | | UAUCAACUUGAAAAAGUGGCA | | |
| | | | | CCGAGUCGGUGCUsususu | | |
| hcPCSK9 | GA231 | TCCGAATA | 225 | uscscsGAAUAAACUCCAGGCCUG | 403 | SpCas9 |
| | | AACTCCAG | | UUUUAGAGCUAGAAAUAGCAA | | |
| | | GCCT | | GUUAAAAUAAGGCUAGUCCGU | | |
| | | | | UAUCAACUUGAAAAAGUGGCA | | |
| | | | | CCGAGUCGGUGCUsususu | | |
| hcPCSK9 | GA232 | GTTTATTC | 226 | gsususUAUUCGGAAAAGCCAGC | 404 | SpCas9 |
| | | GGAAAAG | | GUUUUAGAGCUAGAAAUAGCA | | |
| | | CCAGC | | AGUUAAAAUAAGGCUAGUCCG | | |
| | | | | UUAUCAACUUGAAAAAGUGGC | | |
| | | | | ACCGAGUCGGUGCUsususu | | |
| hPCSK9 | GA233 | GCGGCTGT | 227 | gscsgsGCUGUACCCACCCGCCAG | 405 | SpCas9 |
| | | ACCCACCC | | UUUUAGAGCUAGAAAUAGCAA | | |
| | | GCCA | | GUUAAAAUAAGGCUAGUCCGU | | |
| | | | | UAUCAACUUGAAAAAGUGGCA | | |
| | | | | CCGAGUCGGUGCUsususu | | |
| hcPCSK9 | GA235 | CACCGCTG | 228 | csascsCGCUGCCGGCAACUUCCG | 406 | SpCas9 |
| | | CCGGCAAC | | UUUUAGAGCUAGAAAUAGCAA | | |
| | | TTCC | | GUUAAAAUAAGGCUAGUCCGU | | |
| | | | | UAUCAACUUGAAAAAGUGGCA | | |
| | | | | CCGAGUCGGUGCUsususu | | |
| hcPCSK9 | GA236 | AGCCCTCG | 229 | asgscsCCUCGCCAGGCGCUGGCG | 407 | SpCas9 |
| | | CCAGGCGC | | UUUUAGAGCUAGAAAUAGCAA | | |
| | | TGGC | | GUUAAAAUAAGGCUAGUCCGU | | |
| | | | | UAUCAACUUGAAAAAGUGGCA | | |
| | | | | CCGAGUCGGUGCUsususu | | |
| hcPCSK9 | GA237 | CAACGCCG | 230 | csasasCGCCGCCUGCCAGCGCCG | 408 | SpCas9 |
| | | CCTGCCAG | | UUUUAGAGCUAGAAAUAGCAA | | |
| | | CGCC | | GUUAAAAUAAGGCUAGUCCGU | | |
| | | | | UAUCAACUUGAAAAAGUGGCA | | |
| | | | | CCGAGUCGGUGCUsususu | | |
| hcPCSK9 | GA238 | GCACGACC | 231 | gscsasCGACCCCAGCCCUCGCCG | 409 | SpCas9 |
| | | CCAGCCCT | | UUUUAGAGCUAGAAAUAGCAA | | |
| | | CGCC | | GUUAAAAUAAGGCUAGUCCGU | | |
| | | | | UAUCAACUUGAAAAAGUGGCA | | |
| | | | | CCGAGUCGGUGCUsususu | | |
| hcPCSK9 | GA239 | CCGCCTGC | 232 | cscsgsCCUGCCAGCGCCUGGCGG | 410 | SpCas9 |
| | | CAGCGCCT | | UUUUAGAGCUAGAAAUAGCAA | | |
| | | GGCG | | GUUAAAAUAAGGCUAGUCCGU | | |
| | | | | UAUCAACUUGAAAAAGUGGCA | | |
| | | | | CCGAGUCGGUGCUsususu | | |
| hcPCSK9 | GA240 | TGCCAGCG | 233 | usgscsCAGCGCCUGGCGAGGGCG | 411 | SpCas9 |
| | | CCTGGCGA | | UUUUAGAGCUAGAAAUAGCAA | | |
| | | GGGC | | GUUAAAAUAAGGCUAGUCCGU | | |
| | | | | UAUCAACUUGAAAAAGUGGCA | | |
| | | | | CCGAGUCGGUGCUsususu | | |
| hcPCSK9 | GA241 | TGCTGCTG | 234 | usgscsUGCUGCCCCUGGCGGGUG | 412 | SpCas9 |
| | | CCCCTGGC | | UUUUAGAGCUAGAAAUAGCAA | | |
| | | GGGT | | GUUAAAAUAAGGCUAGUCCGU | | |
| | | | | UAUCAACUUGAAAAAGUGGCA | | |
| | | | | CCGAGUCGGUGCUsususu | | |
| hcPCSK9 | GA242 | TCACCGCT | 235 | uscsasCCGCUGCCGGCAACUUCG | 413 | SpCas9 |
| | | GCCGGCA | | UUUUAGAGCUAGAAAUAGCAA | | |
| | | ACTTC | | GUUAAAAUAAGGCUAGUCCGU | | |
| | | | | UAUCAACUUGAAAAAGUGGCA | | |
| | | | | CCGAGUCGGUGCUsususu | | |
| hcPCSK9 | GA243 | GGCGAGG | 236 | gsgscsGAGGGCUGGGGUCGUGC | 414 | SpCas9 |
| | | GCTGGGGT | | GUUUUAGAGCUAGAAAUAGCA | | |
| | | CGTGC | | AGUUAAAAUAAGGCUAGUCCG | | |
| | | | | UUAUCAACUUGAAAAAGUGGC | | |
| | | | | ACCGAGUCGGUGCUsususu | | |
| hcPCSK9 | GA244 | TTCCGAAT | 237 | ususcsCGAAUAAACUCCAGGCCG | 415 | SpCas9 |
| | | AAACTCCA | | UUUUAGAGCUAGAAAUAGCAA | | |
| | | GGCC | | GUUAAAAUAAGGCUAGUCCGU | | |
| | | | | UAUCAACUUGAAAAAGUGGCA | | |
| | | | | CCGAGUCGGUGCUsususu | | |
| hcPCSK9 | GA245 | GTGCTGCT | 238 | gsusgsCUGCUGCCCCUGGCGGGG | 416 | SpCas9 |
| | | GCCCCTGG | | UUUUAGAGCUAGAAAUAGCAA | | |
| | | CGGG | | GUUAAAAUAAGGCUAGUCCGU | | |
| | | | | UAUCAACUUGAAAAAGUGGCA | | |
| | | | | CCGAGUCGGUGCUsususu | | |
| hcPCSK9 | GA246 | GCCAGCGC | 239 | gscscsAGCGCCUGGCGAGGGCUG | 417 | SpCas9 |
| | | CTGGCGAG | | UUUUAGAGCUAGAAAUAGCAA | | |
| | | GGCT | | GUUAAAAUAAGGCUAGUCCGU | | |
| | | | | UAUCAACUUGAAAAAGUGGCA | | |
| | | | | CCGAGUCGGUGCUsususu | | |
| hcPCSK9 | GA247 | CCTCGCCA | 240 | cscsusCGCCAGGCGCUGGCAGGG | 418 | SpCas9 |
| | | GGCGCTGG | | UUUUAGAGCUAGAAAUAGCAA | | |
| | | CAGG | | GUUAAAAUAAGGCUAGUCCGU | | |
| | | | | UAUCAACUUGAAAAAGUGGCA | | |
| | | | | CCGAGUCGGUGCUsususu | | |
| hcPCSK9 | GA248 | GGTGCTAG | 66 | gsgsusG(cPACE)UAGCCUUGCGU | 419 | SpCas9 |
| | | CCTTGCGT | | UCCGGUUUUAGAgcuagaaauagcA | | |
| | | TCCG | | AGUUAAAAUAAGGCUAGUCCG | | |
| | | | | UUAUCAacuugaaaaaguggcaccgaguc | | |
| | | | | ggugcusususu | | |
| hcPCSK9 | GA249 | GGTGCTAG | 66 | gsgsusGCUAGCC(uPACE)UGCGU | 420 | SpCas9 |
| | | CCTTGCGT | | UCCGGUUUUAGAgcuagaaauagcA | | |
| | | TCCG | | AGUUAAAAUAAGGCUAGUCCG | | |
| | | | | UUAUCAacuugaaaaaguggcaccgaguc | | |
| | | | | ggugcusususu | | |
| hcPCSK9 | GA250 | GGTGCTAG | 66 | gsgsusGcUAGCCUUGCGUUCCGG | 2246 | SpCas9 |
| | | CCTTGCGT | | UUUUAGAgcuagaaauagcAAGUUA | | |
| | | TCCG | | AAAUAAGGCUAGUCCGUUAUC | | |
| | | | | Aacuugaaaaaguggcaccgagucggugcusu | | |
| | | | | susu | | |
| hcPCSK9 | GA251 | GGTGCTAG | 66 | gsgsusGCUAGCCuUGCGUUCCGG | 2247 | SpCas9 |
| | | CCTTGCGT | | UUUUAGAgcuagaaauagcAAGUUA | | |
| | | TCCG | | AAAUAAGGCUAGUCCGUUAUC | | |
| | | | | Aacuugaaaaaguggcaccgagucggugcusu | | |
| | | | | susu | | |
| hcPCSK9 | GA253 | GGTGCTAG | 66 | gsgsusG(cPACE)UAGCCUUGCGU | 2248 | SpCas9 |
| | | CCTTGCGT | | UCCGgUUUUAGagcuagaaauagcaaG | | |
| | | TCCG | | UUaAaAuAaggcuaGUccGUUAucA | | |
| | | | | AcuugaaaaagugGcaccgagucggugcusu | | |
| | | | | susu | | |
| hcPCSK9 | GA254 | GGTGCTAG | 66 | gsgsusGCUAGCC(uPACE)UGCGU | 2249 | SpCas9 |
| | | CCTTGCGT | | UCCGgUUUUAGagcuagaaauagcaaG | | |
| | | TCCG | | UUaAaAuAaggcuaGUccGUUAucA | | |
| | | | | AcuugaaaaagugGcaccgagucggugcusu | | |
| | | | | susu | | |
| mPCSK9 | GA255 | CCCATACC | 69 | cscscsAUACCUUGGAGCAACGGg | 421 | ABE |
| | | TTGGAGCA | | UUUUAGagcuaGaaauagcaaGUUaAa | | |
| | | ACGG | | AuAaggCUaGUCcGUUAucAAcuuG | | |
| | | | | aaaaaguGgcaccgAgUCggugcusususu | | |
| mPCSK9 | GA256 | CCCATACC | 69 | cscscsAUACCUUGGAGCAACGGg | 2250 | ABE |
| | | TTGGAGCA | | UUUUAGagcuagaaauagcaaGUUaAa | | |
| | | ACGG | | AuAaggcuaGUccGUUAucAAcuugaa | | |
| | | | | aaagugGcaccgagucggugcusususu | | |
| mPCSK9 | GA257 | CCCATACC | 69 | cscscsAUACCUUGGAGCAACGGg | 2251 | ABE |
| | | TTGGAGCA | | UUUUAGagcuaGaaauagcaaGUUaAa | | |
| | | ACGG | | AuAaggcuaGUccGUUAucAAcuuGa | | |
| | | | | aaaagugGcaccgagucggugcusususu | | |
| mANGPTL3 | GA258 | GAGATACC | 241 | gsasgsAUACCUGAGUAACUUUCg | 422 | ABE |
| | | TGAGTAAC | | UUUUAGagcuaGaaauagcaaGUUaAa | | |
| | | TTTC | | AuAaggCUaGUCcGUUAucAAcuuG | | |
| | | | | aaaaaguGgcaccgAgUCggugcusususu | | |
| mANGPTL3 | GA259 | GAGATACC | 241 | gsasgsAUACCUGAGUAACUUUCg | 2252 | ABE |
| | | TGAGTAAC | | UUUUAGagcuagaaauagcaaGUUaAa | | |
| | | TTTC | | AuAaggcuaGUccGUUAucAAcuugaa | | |
| | | | | aaagugGcaccgagucggugcusususu | | |
| mANGPTL3 | GA260 | GAGATACC | 241 | gsasgsAUACCUGAGUAACUUUCg | 2253 | ABE |
| | | TGAGTAAC | | UUUUAGagcuaGaaauagcaaGUUaAa | | |
| | | TTTC | | AuAaggcuaGUccGUUAucAAcuuGa | | |
| | | | | aaaagugGcaccgagucggugcusususu | | |
| hcANGPTL3 | GA276 | ACGTGGG | 242 | ascsgsUGGGAGAACUACAAAUA | 423 | ABE |
| | | AGAACTAC | | GUUUUAGAGCUAGAAAUAGCA | | |
| | | AAATA | | AGUUAAAAUAAGGCUAGUCCG | | |
| | | | | UUAUCAACUUGAAAAAGUGGC | | |
| | | | | ACCGAGUCGGUGCUsususu | | |
| hcANGPTL3 | GA277 | CGATGTTG | 243 | csgsasUGUUGAAUUAAUGUCCA | 424 | ABE |
| | | AATTAATG | | GUUUUAGAGCUAGAAAUAGCA | | |
| | | TCCA | | AGUUAAAAUAAGGCUAGUCCG | | |
| | | | | UUAUCAACUUGAAAAAGUGGC | | |
| | | | | ACCGAGUCGGUGCUsususu | | |
| hcANGPTL3 | GA278 | CACAAAA | 244 | csascsAAAACUUCAAUGAAACGG | 425 | ABE |
| | | CTTCAATG | | UUUUAGAGCUAGAAAUAGCAA | | |
| | | AAACG | | GUUAAAAUAAGGCUAGUCCGU | | |
| | | | | UAUCAACUUGAAAAAGUGGCA | | |
| | | | | CCGAGUCGGUGCUsususu | | |
| hcANGPTL3 | GA279 | TACGAATT | 245 | usascsGAAUUGAGUUGGAAGAC | 426 | ABE |
| | | GAGTTGGA | | GUUUUAGAGCUAGAAAUAGCA | | |
| | | AGAC | | AGUUAAAAUAAGGCUAGUCCG | | |
| | | | | UUAUCAACUUGAAAAAGUGGC | | |
| | | | | ACCGAGUCGGUGCUsususu | | |
| hcANGPTL3 | GA284 | CTATGGAG | 246 | csusasUGGAGUAUAUCUUCUCU | 427 | ABE |
| | | TATATCTT | | GUUUUAGAGCUAGAAAUAGCA | | |
| | | CTCT | | AGUUAAAAUAAGGCUAGUCCG | | |
| | | | | UUAUCAACUUGAAAAAGUGGC | | |
| | | | | ACCGAGUCGGUGCUsususu | | |
| hcPCSK9 | GA343 | CCCGCACC | 13 | cscscsGCACCUUGGCGCAGCGGG | 2254 | ABE |
| | | TTGGCGCA | | UUUUAGAGCUAGAAAUAGCAA | | |
| | | GCGG | | GUUAAAAUAAGGCUAGUCCGU | | |
| | | | | UAUCAACUUGAAAAAGUGGCA | | |
| | | | | CCGAGUCGGUGCUsususu | | |
| CANGPTL3 | GA344 | AAGATACC | 14 | asasgsAUACCUGAAUAACUCUCG | 2255 | ABE |
| | | TGAATAAC | | UUUUAGAGCUAGAAAUAGCAA | | |
| | | TCTC | | GUUAAAAUAAGGCUAGUCCGU | | |
| | | | | UAUCAACUUGAAAAAGUGGCA | | |
| | | | | CCGAGUCGGUGCUsususu | | |
| hcPCSK9 | GA346 | CCCGCACC | 13 | cscscsGCACCUUGGCGCAGCGGg | 2256 | ABE |
| | | TTGGCGCA | | UUUUAGagcuaGaaauagcaaGUUaAa | | |
| | | GCGG | | AuAaggcuaGUccGUUAucAAcuuGa | | |
| | | | | aaaagugGcaccgagucggugcusususu | | |
| CANGPTL3 | GA347 | AAGATACC | 14 | asasgsAUACCUGAAUAACUCUCg | 2257 | ABE |
| | | TGAATAAC | | UUUUAGagcuaGaaauagcaaGUUaAa | | |
| | | TCTC | | AuAaggcuaGUccGUUAucAAcuuGa | | |
| | | | | aaaagugGcaccgagucggugcusususu | | |
| mANGPTL3 | GA349 | GAGATACC | 241 | gsasgsAUACCUGAGUAACUUUC | 2258 | ABE |
| | | TGAGTAAC | | GUUUUAGAgcuagaaauagcAAGUU | | |
| | | TTTC | | AAAAUAAGGCUAGUCCGUUAU | | |
| | | | | CAacuugaaaaaguggcaccgagucggugcu | | |
| | | | | sususu | | |
| mANGPTL3 | GA353 | GAGATACC | 241 | gsasgsAUACCUGAGUAACUUUC | 2259 | ABE |
| | | TGAGTAAC | | GUUUUAGAGCUAGAAAUAGCA | | |
| | | TTTC | | AGUUAAAAUAAGGCUAGUCCG | | |
| | | | | UUAUCAACUUGAAAAAGUGGC | | |
| | | | | ACCGAGUCGGUGCUsususu | | |
| hcPCSK9 | GA375 | CCCGCACC | 13 | cscscsGCACCUUGGCGCAGCGGg | 428 | ABE |
| | | TTGGCGCA | | UUUUAGagcuagaaauagcaaGUUaAa | | |
| | | GCGG | | AuAaggcuaGUccGUUAacAAcgggaa | | |
| | | | | accgugGcaccgagucggugcusususu | | |
| hcPCSK9 | GA376 | CCCGCACC | 13 | cscscsdGCdACdCUdUGdGCdGCdA | 429 | ABE |
| | | TTGGCGCA | | GdCGdGgUUUUAGagcuaGaaauagc | | |
| | | GCGG | | aaGUUaAaAuAaggcuaGUccGUUAu | | |
| | | | | cAAcuuGaaaaagugGcaccgagucggugc | | |
| | | | | usususu | | |
| hcPCSK9 | GA377 | CCCGCACC | 13 | cscscsGdCAdCCdUUdGGdCGdCAd | 430 | ABE |
| | | TTGGCGCA | | GCdGGgUUUUAGagcuaGaaauagcaa | | |
| | | GCGG | | GUUaAaAuAaggcuaGUccGUUAuc | | |
| | | | | AAcuuGaaaaagugGcaccgagucggugcu | | |
| | | | | sususu | | |
| hcPCSK9 | GA380 | CCCGCACC | 13 | cscscsGdCACCUUGGCGdCAGCG | 431 | ABE |
| | | TTGGCGCA | | GgUUUUAGagcuaGaaauagcaaGUUa | | |
| | | GCGG | | AaAuAaggcuaGUccGUUAucAAcuu | | |
| | | | | GaaaaagugGcaccgagucggugcusususu | | |
| hcPCSK9 | GA381 | CCCGCACC | 13 | cscscsGCdACCUUGGCGCdAGCG | 432 | ABE |
| | | TTGGCGCA | | GgUUUUAGagcuaGaaauagcaaGUUa | | |
| | | GCGG | | AaAuAaggcuaGUccGUUAucAAcuu | | |
| | | | | GaaaaagugGcaccgagucggugcusususu | | |
| hcPCSK9 | GA382 | CCCGCACC | 13 | cscscsGCACCUdUGGdCGCAGdCG | 433 | ABE |
| | | TTGGCGCA | | GgUUUUAGagcuaGaaauagcaaGUUa | | |
| | | GCGG | | AaAuAaggcuaGUccGUUAucAAcuu | | |
| | | | | GaaaaagugGcaccgagucggugcusususu | | |
| hcPCSK9 | GA383 | CCCGCACC | 13 | cscscsGCACCUUdGGCdGCAGCdG | 434 | ABE |
| | | TTGGCGCA | | GgUUUUAGagcuaGaaauagcaaGUUa | | |
| | | GCGG | | AaAuAaggcuaGUccGUUAucAAcuu | | |
| | | | | GaaaaagugGcaccgagucggugcusususu | | |
| hcPCSK9 | GA384 | CCCGCACC | 13 | cscscsdGdCdACCdUdUGGdCGCAd | 435 | ABE |
| | | TTGGCGCA | | GCGdGgUUUUAGagcuaGaaauagcaa | | |
| | | GCGG | | GUUaAaAuAaggcuaGUccGUUAuc | | |
| | | | | AAcuuGaaaaagugGcaccgagucggugcu | | |
| | | | | sususu | | |
| hcPCSK9 | GA385 | CCCGCACC | 13 | cscscsGCACCUUGGCGCAGCGGg | 11 | ABE |
| | | TTGGCGCA | | UUUUAGagcuagaaauagcaaGUUaAa | | |
| | | GCGG | | AuAaggcuaGUccGUUAucAAcuugaa | | |
| | | | | aaagugGcaccgagucggugcusususuuuu | | |
| hcPCSK9 | GA386 | CCCGCACC | 13 | cscscsGCACCUUGGCGCAGCGGg | 2260 | ABE |
| | | TTGGCGCA | | UUUUAGagcuagaaauagcaaGUUaAa | | |
| | | GCGG | | AuAaggcuaGUccGUUAucAAcuugaa | | |
| | | | | aaagugGcaccgagucggugcusususuuUu | | |
| hcPCSK9 | GA387 | CCCGCACC | 13 | cscscsGCACCUUGGCGCAGCGgU | 436 | ABE |
| | | TTGGCGCA | | UUUAGagcuaGaaauagcaaGUUaAaA | | |
| | | GCGG | | uAaggcuaGUccGUUAucAAcuuGaaa | | |
| | | | | aaaaguggcaccgagucggugcusususu | | |
| hcPCSK9 | GA388 | CCCGCACC | 13 | cscscsGCACCUUGGCGCAGCGGg | 2261 | ABE |
| | | TTGGCGCA | | UUUUAGagcuagaaauagcaaGUUaAa | | |
| | | GCGG | | AuAaggcuaGUCcGUUAucAAcuuga | | |
| | | | | aaaaguggcaccgagucggugcusususu | | |
| hcPCSK9 | GA389 | CCCGCACC | 13 | cscscsGCACCUUGGCGCAGCGGg | 2262 | ABE |
| | | TTGGCGCA | | UUUUAGagcuagaaauagcaaGUUaAa | | |
| | | GCGG | | AuAaggcuaGuCcGUUaucAAcuugaa | | |
| | | | | aaaguggcaccgagucggugcusususu | | |
| hcPCSK9 | GA391 | CCGCACCT | 247 | cscsGCACCUUGGCGCAGCGGgU | 437 | ABE |
| | | TGGCGCAG | | UUUAGagcuaGaaauagcaaGUUaAaA | | |
| | | CGG | | uAaggcuaGUccGUUAucAAcuuGaaa | | |
| | | | | aagugGcaccgagucggugcusususu | | |
| hANGPTL3 | GA441 | AAGATACC | 15 | asasgsAUACCUGAAUAACCCUCg | 2263 | ABE |
| | | TGAATAAC | | UUUUAGagcuaGaaauagcaaGUUaAa | | |
| | | CCTC | | AuAaggcuaGUccGUUAucAAcuuGa | | |
| | | | | aaaagugGcaccgagucggugcusususu | | |
| hANGPTL3 | GA442 | AAGATACC | 15 | asasgsAUACCUGAAUAACCCUCg | 438 | ABE |
| | | TGAATAAC | | UUUUAGagcuaGaaauagcaaGUUaAa | | |
| | | CCTC | | AuAaggcuaGUccGUUAucAAcuuGa | | |
| | | | | aaaagugGcaccgagucggugcusususuUU | | |
| | | | | u | | |
| hANGPTL3 | GA472 | AAGATACC | 15 | asasisAUACCUGAAUAACCCUCg | 439 | ABE |
| | | TGAATAAC | | UUUUAGagcuaGaaauagcaaGUUaAa | | |
| | | CCTC | | AuAaggcuaGUccGUUAucAAcuuGa | | |
| | | | | aaaagugGcaccgagucggugcusususu | | |
| hANGPTL3 | GA473 | AAGATACC | 15 | asasisAUACCUIAAUAACCCUCgU | 440 | ABE |
| | | TGAATAAC | | UUUAGagcuaGaaauagcaaGUUaAaA | | |
| | | CCTC | | uAaggcuaGUccGUUAucAAcuuGaaa | | |
| | | | | aagugGcaccgagucggugcusususu | | |
| hANGPTL3 | GA474 | AAGATACC | 15 | asasgsAUACCUIAAUAACCCUCgU | 441 | ABE |
| | | TGAATAAC | | UUUAGagcuaGaaauagcaaGUUaAaA | | |
| | | CCTC | | uAaggcuaGUccGUUAucAAcuuGaaa | | |
| | | | | aagugGcaccgagucggugcusususu | | |
| hANGPTL3 | GA475 | AGATACCT | 248 | asgsasUACCUGAAUAACCCUCgU | 442 | ABE |
| PL3 | | GAATAACC | | UUUAGagcuaGaaauagcaaGUUaAaA | | |
| | | CTC | | uAaggcuaGUccGUUAucAAcuuGaaa | | |
| | | | | aagugGcaccgagucggugcusususu | | |
| hANGPTL3 | GA476 | GATACCTG | 249 | gsasUACCUGAAUAACCCUCgUU | 443 | ABE |
| | | AATAACCC | | UUAGagcuaGaaauagcaaGUUaAaAu | | |
| | | TC | | AaggcuaGUccGUUAucAAcuuGaaaa | | |
| | | | | agugGcaccgagucggugcusususu | | |
| hANGPTL3 | GA477 | ATACCTGA | 250 | asusACCUGAAUAACCCUCgUUU | 444 | ABE |
| | | ATAACCCT | | UAGagcuaGaaauagcaaGUUaAaAuA | | |
| | | C | | aggcuaGUccGUUAucAAcuuGaaaaag | | |
| | | | | ugGcaccgagucggugcusususu | | |
| hANGPTL3 | GA547 | AAGATACC | 14 | asasgsAUACCUGAAUAACUCUCg | 445 | ABE |
| | | TGAATAAC | | UUUUAGagcuaGaaauagcaaGUUaAa | | |
| | | TCTC | | AuAaggcuaGUccGUUAucAAcuuGa | | |
| | | | | aaaaguggcaccgagucggugcusususuUU | | |
| | | | | u | | |
| mPCSK9 | GA010 | GGCTGATG | 251 | 5′gsgscsUGAUGAGGCCGCACAU | 446 | SpCas9 |
| | | AGGCCGC | | GGUUUUAGAgcuagaaauagcAAGU | | |
| | | ACATG | | UAAAAUAAGGCUAGUCCGUUA | | |
| | | | | UCAacuugaaaaaguggcaccgagucggugc | | |
| | | | | usususu-3 | | |
| mPCSK9 | GA011 | GGCTGATG | 251 | 5′gsgscsUGAUGAGGCCGCACAU | 446 | SpCas9 |
| | | AGGCCGC | | GGUUUUAGAgcuagaaauagcAAGU | | |
| | | ACATG | | UAAAAUAAGGCUAGUCCGUUA | | |
| | | | | UCAacuugaaaaaguggcaccgagucggugc | | |
| | | | | usususu-3′ | | |
| hcANGPTL3 | GA016 | GGCCTCCT | 107 | 5′gsgscsCUCCUUCAGUUGGGAC | 2264 | SpCas9 |
| GPTL3 | | TCAGTTGG | | AGUUUUAGAgcuagaaauagcAAGU | | |
| | | GACA | | UAAAAUAAGGCUAGUCCGUUA | | |
| | | | | UCAacuugaaaaaguggcaccgagucggugc | | |
| | | | | usususu-3′ | | |
| hcANGPTL3 | GA017 | GCCAATGG | 109 | 5′gscscsAAUGGCCUCCUUCAGU | 2265 | SpCas9 |
| GPTL3 | | CCTCCTTC | | UGUUUUAGAgcuagaaauagcAAGU | | |
| | | AGTT | | UAAAAUAAGGCUAGUCCGUUA | | |
| | | | | UCAacuugaaaaaguggcaccgagucggugc | | |
| | | | | usususu-3′ | | |
| hcPCSK9 | GA395 | TCAGCTCC | 161 | 5′uscsasGCUCCAGGCGGUCCUGG | 447 | SpCas9 |
| | | AGGCGGTC | | gUUUUAGagcuaGaaauagcaaGUUaA | | |
| | | CTGG | | aAuAaggcuaGUccGUUAucAAcuuG | | |
| | | | | aaaaagugGcaccgagucggugcusususuuu | | |
| | | | | u-3′ | | |
| hcPCSK9 | GA396 | TCAGCTCC | 161 | 5′uscsasGCUCCAGGCGGUCCUGG | 448 | SpCas9 |
| | | AGGCGGTC | | gUUUUAGagcuaGaaauagcaaGUUsa | | |
| | | CTGG | | AaAuAaggcuaGUccGUUAucAAcuu | | |
| | | | | GaaaaagugGcaccgagucggugcusususu | | |
| | | | | uuu-3′ | | |
| hcPCSK9 | GA397 | TCAGCTCC | 161 | 5′uscsasGCUCCAGGCGGUCCUGG | 449 | SpCas9 |
| | | AGGCGGTC | | gUUUUAGagcuaGaaauagcaaGUUaA | | |
| | | CTGG | | aAuAaggcuaGUccGUUsAucAAcuu | | |
| | | | | GaaaaagugGcaccgagucggugcusususu | | |
| | | | | uuu-3′ | | |
| hcPCSK9 | GA398 | TCAGCTCC | 161 | 5′uscsasGCUCCAGGCGGUCCUGG | 2266 | SpCas9 |
| | | AGGCGGTC | | gUUUUAGagcuagaaauagcaaGUUaA | | |
| | | CTGG | | aAuAaggcuaGUCcGUUAucAAcuug | | |
| | | | | aaaaaguggcaccgagucggugcusususuuu | | |
| | | | | u-3′ | | |
| hcPCSK9 | GA399 | TCAGCTCC | 161 | 5′uscsasGCUCCAGGCGGUCCUGG | 2267 | SpCas9 |
| | | AGGCGGTC | | gUUUUAGagcuagaaauagcaaGUUaA | | |
| | | CTGG | | aAuAaggcuaGuCcGUUaucAAcuuga | | |
| | | | | aaaaguggcaccgagucggugcusususuuuu- | | |
| | | | | 3′ | | |
| hcPCSK9 | GA400 | TCAGCTCC | 161 | 5′uscsasGCUCCAGGCGGUCCUGG | 2268 | SpCas9 |
| | | AGGCGGTC | | gUUUuagagcuagaaauagcaaGUUaAa | | |
| | | CTGG | | AuaaggcuaGuccgUUaucaacuugaaaaa | | |
| | | | | guggcaccgagucggugcusususuuuu-3′ | | |
| hcPCSK9 | GA401 | TCAGCTCC | 161 | 5′uscsasGCUCCAGGCGGUCCUGG | 2269 | SpCas9 |
| | | AGGCGGTC | | gUUUUAGagcuagaaauagcaaGUUaA | | |
| | | CTGG | | aAuAaggcuaGUccGUUAucAAcuuga | | |
| | | | | aaaagugGcaccgagucggugcusususuuuu- | | |
| | | | | 3′ | | |
| hcPCSK9 | GA402 | TCAGCTCC | 161 | 5′uscsasGCUCCAGGCGGUCCUGG | 2270 | SpCas9 |
| | | AGGCGGTC | | gUUUUAGagcuaGaaauagcaaGUUaA | | |
| | | | | aAuAaggcuaGUccGUUAucAAcuuG | | |
| | | CTGG | | aaaaagugGcaccgagucggugcusususuu | | |
| | | | | Uu-3′ | | |
| hcPCSK9 | GA403 | TCAGCTCC | 161 | 5′uscsasGCUCCAGGCGGUCCUGG | 2271 | SpCas9 |
| | | AGGCGGTC | | gUUUUAGagcuaGaaauagcaaGUUsa | | |
| | | CTGG | | AaAuAaggcuaGUccGUUAucAAcuu | | |
| | | | | GaaaaagugGcaccgagucggugcusususu | | |
| | | | | uUu-3′ | | |
| hcPCSK9 | GA404 | TCAGCTCC | 161 | 5′uscsasGCUCCAGGCGGUCCUGG | 2272 | SpCas9 |
| | | AGGCGGTC | | gUUUUAGagcuaGaaauagcaaGUUaA | | |
| | | CTGG | | aAuAaggcuaGUccGUUsAucAAcuu | | |
| | | | | GaaaaagugGcaccgagucggugcusususu | | |
| | | | | uUu-3′ | | |
| hcPCSK9 | GA405 | TCAGCTCC | 161 | 5′uscsasGCUCCAGGCGGUCCUGG | 2273 | SpCas9 |
| | | AGGCGGTC | | gUUUUAGagcuagaaauagcaaGUUaA | | |
| | | CTGG | | aAuAaggcuaGUCcGUUAucAAcuug | | |
| | | | | aaaaaguggcaccgagucggugcusususuuU | | |
| | | | | u-3′ | | |
| hcPCSK9 | GA406 | TCAGCTCC | 161 | 5′uscsasGCUCCAGGCGGUCCUGG | 2274 | SpCas9 |
| | | AGGCGGTC | | gUUUUAGagcuagaaauagcaaGUUaA | | |
| | | CTGG | | aAuAaggcuaGuCcGUUaucAAcuuga | | |
| | | | | aaaaaguggcaccgagucggugcusususuuUu- | | |
| | | | | 3′ | | |
| hcPCSK9 | GA407 | TCAGCTCC | 161 | 5′uscsasGCUCCAGGCGGUCCUGG | 2275 | SpCas9 |
| | | AGGCGGTC | | gUUUuagagcuagaaauagcaaGUUaAa | | |
| | | CTGG | | AuaaggcuaGuccgUUaucaacuugaaaaa | | |
| | | | | guggcaccgagucggugcusususuuUu-3′ | | |
| hcPCSK9 | GA408 | TCAGCTCC | 161 | 5′uscsasGCUCCAGGCGGUCCUGG | 2276 | SpCas9 |
| | | AGGCGGTC | | gUUUUAGagcuagaaauagcaaGUUaA | | |
| | | CTGG | | aAuAaggcuaGUccGUUAucAAcuuga | | |
| | | | | aaaagugGcaccgagucggugcusususuuU | | |
| | | | | u-3′ | | |
| hcPCSK9 | GA409 | TCAGCTCC | 161 | 5′uscsasG(C- | 450 | SpCas9 |
| | | AGGCGGTC | | PACE)UCCAGGCGGUCCUGGgU | | |
| | | CTGG | | UUUAGagcuagaaauagcaaGUUaAaA | | |
| | | | | uAaggcuaGUccGUUAucAAcuugaaa | | |
| | | | | aagugGcaccgagucggugcusususu-3′ | | |
| hcPCSK9 | GA410 | TCAGCTCC | 161 | 5′uscsasGCUCCAG(G- | 451 | SpCas9 |
| | | AGGCGGTC | | PACE)CGGUCCUGGgUUUUAGag | | |
| | | CTGG | | cuagaaauagcaaGUUaAaAuAaggcuaG | | |
| | | | | UccGUUAucAAcuugaaaaagugGcacc | | |
| | | | | gagucggugcusususu-3′ | | |
| hcPCSK9 | GA439 | CCCGCACC | 13 | 5′cscscsGCACCUUGGCGCAGCGG | 2277 | ABE |
| | | TTGGCGCA | | gUUUUAGagcuaGaaauagcaaGUUaA | | |
| | | GCGG | | aAuAaggcuaGUccGUUAucAAcuuG | | |
| | | | | aaaaagugGcaccgagucggugcusususuU | | |
| | | | | Uu-3′ | | |
| hcPCSK9 | GA440 | CCCGCACC | 13 | 5′cscscsGCACCUUGGCGCAGCGG | 2278 | ABE |
| | | TTGGCGCA | | gUUUUAGagcuagaaauagcaaGUUaA | | |
| | | GCGG | | aAuAaggcuaGUccGUUAucAAcuuga | | |
| | | | | aaaagugGcaccgagucggugcusususuUU | | |
| | | | | u-3′ | | |
| hcPCSK9 | GA234 | CGCCTGCC | 252 | csgscsCUGCCAGCGCCUGGCGAG | 452 | SpCas9 |
| | | AGCGCCTG | | UUUUAGAGCUAGAAAUAGCAA | | |
| | | GCGA | | GUUAAAAUAAGGCUAGUCCGU | | |
| | | | | UAUCAACUUGAAAAAGUGGCA | | |
| | | | | CCGAGUCGGUGCUsususu | | |
| hcANGPTL3 | GA261 | TGAAGAA | 126 | 5′usgsasAGAAAGGGAGUAGUUC | 2279 | SpCas9 |
| | | AGGGAGT | | UgUUUUAGagcuagaaauagcaaGUUa | | |
| | | AGTTCT | | AaAuAaggcuaGUccGUUAucAAcuu | | |
| | | | | gaaaaagugGcaccgagucggugcusususu- | | |
| | | | | 3′ | | |
| hcANGPTL3 | GA262 | CATTATAT | 143 | 5′csasusUAUAUUCAGGUAGUCC | 2280 | SpCas9 |
| | | TCAGGTAG | | AgUUUUAGagcuagaaauagcaaGUUa | | |
| | | TCCA | | AaAuAaggcuaGUccGUUAucAAcuu | | |
| | | | | gaaaaagugGcaccgagucggugcusususu- | | |
| | | | | 3′ | | |
| hcANGPTL3 | GA263 | ACAAAACT | 146 | 5′ascsasAAACUUCAAUGAAACG | 2281 | SpCas9 |
| | | TCAATGAA | | UgUUUUAGagcuagaaauagcaaGUUa | | |
| | | ACGT | | AaAuAaggcuaGUccGUUAucAAcuu | | |
| | | | | gaaaaagugGcaccgagucggugcusususu- | | |
| | | | | 3′ | | |
| hcANGPTL3 | GA264 | GCCAATGG | 109 | 5′gscscsAAUGGCCUCCUUCAGU | 2282 | SpCas9 |
| | | CCTCCTTC | | UgUUUUAGagcuagaaauagcaaGUUa | | |
| | | AGTT | | AaAuAaggcuaGUccGUUAucAAcuu | | |
| | | | | gaaaaagugGcaccgagucggugcusususu- | | |
| | | | | 3′ | | |
| hcANGPTL3 | GA265 | GCCAATGG | 109 | 5′gscscsAAUGGCCUCCUUCAGU | 2283 | SpCas9 |
| | | CCTCCTTC | | UgUUUUAGagcuaGaaauagcaaGUUa | | |
| | | AGTT | | AaAuAaggCUaGUCcGUUAucAAcu | | |
| | | | | uGaaaaaguGgcaccgAgUCggugcususu | | |
| | | | | su-3′ | | |
| hcPCSK9 | GA266 | TCAGCTCC | 161 | 5′uscsasGCUCCAGGCGGUCCUGG | 2284 | SpCas9 |
| | | AGGCGGTC | | gUUUUAGagcuagaaauagcaaGUUaA | | |
| | | CTGG | | aAuAaggcuaGUccGUUAucAAcuuga | | |
| | | | | aaaagugGcaccgagucggugcusususu-3′ | | |
| hcPCSK9 | GA267 | GCCCCATG | 185 | 5′gscscsCCAUGUCGACUACAUCG | 2285 | SpCas9 |
| | | TCGACTAC | | gUUUUAGagcuagaaauagcaaGUUaA | | |
| | | ATCG | | aAuAaggcuaGUccGUUAucAAcuuga | | |
| | | | | aaaagugGcaccgagucggugcusususu-3′ | | |
| hcPCSK9 | GA268 | GGGGCTG | 187 | 5′gsgsgsGCUGGUAUUCAUCCGC | 2286 | SpCas9 |
| | | GTATTCAT | | CgUUUUAGagcuagaaauagcaaGUUa | | |
| | | CCGCC | | AaAuAaggcuaGUccGUUAucAAcuu | | |
| | | | | gaaaaagugGcaccgagucggugcusususu- | | |
| | | | | 3′ | | |
| hcPCSK9 | GA269 | CTAGGAG | 194 | 5′csusasGGAGAUACACCUCCACC | 2287 | SpCas9 |
| | | ATACACCT | | gUUUUAGagcuagaaauagcaaGUUaA | | |
| | | CCACC | | aAuAaggcuaGUccGUUAucAAcuuga | | |
| | | | | aaaagugGcaccgagucggugcusususu-3′ | | |
| hcPCSK9 | GA270 | CTGCGCGT | 204 | 5′csusgsCGCGUGCUCAACUGCCA | 2288 | SpCas9 |
| | | GCTCAACT | | gUUUUAGagcuagaaauagcaaGUUaA | | |
| | | GCCA | | aAuAaggcuaGUccGUUAucAAcuuga | | |
| | | | | aaaagugGcaccgagucggugcusususu-3′ | | |
| hcPCSK9 | GA271 | CGGGATGC | 206 | 5′csgsgsGAUGCCGGCGUGGCCA | 2289 | SpCas9 |
| | | CGGCGTGG | | AgUUUUAGagcuagaaauagcaaGUUa | | |
| | | CCAA | | AaAuAaggcuaGUccGUUAucAAcuu | | |
| | | | | gaaaaagugGcaccgagucggugcusususu- | | |
| | | | | 3′ | | |
| hcPCSK9 | GA272 | CGCTGACC | 212 | 5′csgscsUGACCACCCCUGCCAGG | 2290 | SpCas9 |
| | | ACCCCTGC | | gUUUUAGagcuagaaauagcaaGUUaA | | |
| | | CAGG | | aAuAaggcuaGUccGUUAucAAcuuga | | |
| | | | | aaaagugGcaccgagucggugcusususu-3′ | | |
| mPCSK9 | GA292 | cccatacCTTG | 69 | 5′cscscsAUACCUUGGAGCAACG | 2291 | ABE |
| | | GAGCAAC | | GGUUUUAGAGCUAGAAAUAGC | | |
| | | GG | | AAGUUAAAAUAAGGCUAGUCC | | |
| | | | | GUUAUCAACUUGAAAAAGUGG | | |
| | | | | CACCGAGUCGGUGCUsususu-3′ | | |

[0696] As used in Table 1 above, Table 23, and Table 24, in the Protospacer: uppercase nucleotides (A, G, C, I and T) indicate 2′-deoxyribonucleotides, adenine, guanine, cytosine, inosine, and thymine, respectively; in Guide RNA sequence: uppercase nucleotides (A, C, G, I and U) indicate ribonucleotides, adenine, guanine, cytosine, inosine, and uracil, respectively and lowercase nucleotides (a, g, c, i and u) indicate 2′-O-methylribonucleotide (2′-OMe) unless otherwise specified. It is understood that the DNA protospacer is converted to RNA or RNA-equivalent in the guide RNA design except when other modifications including 2′-deoxyribonucleotides are introduced into the spacer section of the single guide RNA; s: phosphorothioate (PS), X=ribonebularine; x=2′-O-methylnebularine; dX=2′-deoxynebularine; 5′-NNN-3′ indicates uniform A, C, G, I, U, dA, dG, dC, dI, T, X, x, dX, and combinations thereof. 5′-nnn-3′ indicates uniform a, c, g, i, u, dA, dG, dC or T, x, dX, and combinations thereof. mANGPTL3: mouse ANGPTL3; hANGPTL3: human ANGPTL3; cANGPTL3: cynomolgus ANGPTL3; mcANGPTL3: mouse, cynomolgus cross-reactive ANGPTL3; hcANGPTL3: human, cynomolgus cross-reactive ANGPTL3; mPCSK9: mouse PCSK9; hPCSK9: human PCSK9; cPCSK9: cynomolgus PCSK9; mcPCSK9: mouse, cynomolgus cross-reactive PCSK9; hcPCSK9: human, cynomolgus cross-reactive PCSK9; hcAPOC3: human, cynomolgus cross-reactive APOC3. As disclosed herein, the nucleotide sequences and modification patterns encompass all length, structure, and type of RNAs or fragments thereof, CRISPR guide RNAs, e.g. sgRNAs, dual guide RNAs, or mRNAs. For example, nucleotide sequences and modification patterns as described in the Table above may indicate RNA sequences and modification patterns in a single guide RNA, a dual guide RNA, a nuclease mRNA, or any fragment or segment thereof. In Table 23, u′ indicates N1-methylpseudouridine.

### Example 2. PCSK9 and ANGPTL3 Cas9 Editing In Vitro

[0697] In set of experiments, PCSK9 gRNAs were co-transfected with an equivalent amount (1:1 ratio by weight) of in vitro transcribed commercially available SpCas9 mRNA MS002 purchased from TriLink Biotechnologies into primary human hepatocytes at 2500, 500, or 100 ng/RNA/mL and processed as described in detailed methods. Extracted genomic DNA was analyzed for gene editing at the target site with next-generation sequencing of PCR amplicons generated around the target sites. Samples were prepared using the Nextera XT DNA library preparation kit (Illumina) according to the manufacturer's protocol. Briefly, two rounds of PCR were performed first to amplify the region of interest and second to add DNA sequences required for next generation sequencing and sample identification to the initial product. The final amplicon was sequenced on the Illumina MiSeq instrument according to the manufacturer's protocol. A wide range of editing activities (Table 2) were observed. In a second set of experiments, ANGPTL3 gRNAs were co-transfected with an equivalent amount of in vitro transcribed SpCas9 mRNA (1:1 ratio by weight) into primary human hepatocytes and processed and analyzed similarly (Table 3).

TABLE 2
PCSK9 gRNA/SpCas9 editing in primary hepatocytes

| | | | Human Primary | | | Cyno Primary | | |
|---|---|---|---|---|---|---|---|---|
| | | SEQ | Hepatocyte | | | Hepatocyte | | |
| | Protospacer | ID | Editing % | | | Editing % | | |
| gRNA | (5′-3′) | NO: | 2500 | 500 | 100 | 2500 | 500 | 100 |
| GA156 | GGTGCTAGCCT | 66 | 26.34 | 6.22 | 1.48 | 33.94 | 14.31 | 2.34 |
| | TGCGTTCCG | | | | | | | |
| GA157 | GCCGTCCTCCT | 151 | 10.03 | 2.82 | 0.62 | 13.78 | 2.93 | 0.78 |
| | CGGAACGCA | | | | | | | |
| GA158 | GCTAGCCTTGC | 152 | 37.94 | 6.55 | 2 | 18.27 | 4.42 | 1.04 |
| | GTTCCGAGG | | | | | | | |
| GA159 | GCGTTCCGAGG | 153 | 14.68 | 3.74 | 1.35 | 12.21 | 3.69 | 1.19 |
| | AGGACGGCC | | | | | | | |
| GA160 | GCCTTGCGTTC | 154 | 23.3 | 5.58 | 1.19 | 23.15 | 6.60 | 1.38 |
| | CGAGGAGGA | | | | | | | |
| GA161 | GGACGAGGAC | 155 | 35.08 | 8.74 | 3.65 | 48.24 | 14.98 | 4.52 |
| | GGCGACTACG | | | | | | | |
| GA162 | GGACGGCGAC | 156 | 42.8 | 12.97 | 2.14 | 28.26 | 11.18 | 1.62 |
| | TACGAGGAGC | | | | | | | |
| GA163 | CGTCCTCGTCC | 157 | 29.32 | 9.2 | 2.31 | 49.50 | 17.69 | 5.99 |
| | TCCTGCGCA | | | | | | | |
| GA164 | GTCCTCGTCCT | 158 | 25.77 | 11.12 | 2.68 | 34.89 | 13.96 | 2.75 |
| | CCTGCGCAC | | | | | | | |
| GA165 | CCGTCAGCTCC | 159 | 40.27 | 22.3 | 4.99 | 35.57 | 18.00 | 5.43 |
| | AGGCGGTCC | | | | | | | |
| GA166 | CGCCCGTGCGC | 160 | 36.89 | 10.99 | 2.89 | 44.77 | 14.39 | 3.93 |
| | AGGAGGACG | | | | | | | |
| GA167 | TCAGCTCCAGG | 161 | 53.71 | 25.87 | 8.2 | 66.07 | 35.98 | 11.98 |
| | CGGTCCTGG | | | | | | | |
| GA168 | CTTGGCGCAGC | 162 | 54.99 | 25.77 | ND | 41.49 | 15.90 | 4.75 |
| | GGTGGAAGG | | | | | | | |
| GA169 | CGTGCGCAGG | 163 | 46.65 | 15.15 | 5.49 | 42.38 | 18.28 | 3.45 |
| | AGGACGAGGA | | | | | | | |
| GA170 | CCAGGACCGC | 164 | 31.35 | 15.84 | 2.9 | 23.17 | 11.48 | 4.03 |
| | CTGGAGCTGA | | | | | | | |
| GA171 | TCTTGGTGAGG | 165 | 31.75 | 9.38 | 2.37 | 27.79 | 9.06 | 1.29 |
| | TATCCCCGG | | | | | | | |
| GA172 | CAGTGCGCTCT | 166 | 14.01 | 3.52 | 0.32 | 15.58 | 2.11 | 0.51 |
| | GACTGCGAG | | | | | | | |
| GA173 | CTTGGTGAGGT | 167 | 23.38 | 3.94 | 0.69 | 35.03 | 8.70 | 2.06 |
| | ATCCCCGGC | | | | | | | |
| GA174 | GGATCTTGGTG | 168 | 14.74 | 5.24 | 1.18 | 18.65 | 4.88 | 1.60 |
| | AGGTATCCC | | | | | | | |
| GA175 | GAAGATGAGT | 169 | 24.81 | 7.53 | 1.55 | 44.77 | 12.37 | 1.45 |
| | GGCGACCTGC | | | | | | | |
| GA176 | AGCACCACCA | 170 | 4.98 | 1.26 | 0.36 | 22.65 | 8.11 | 2.11 |
| | CGTAGGTGCC | | | | | | | |
| GA177 | GGTCGCCACTC | 171 | 12.57 | 2.67 | 0.65 | 15.91 | 4.68 | 0.38 |
| | ATCTTCACC | | | | | | | |
| GA178 | CTCCTTCAGCA | 172 | 18.29 | 5.43 | 1.26 | 25.22 | 5.78 | 2.21 |
| | CCACCACGT | | | | | | | |
| GA179 | GAGTGGCGAC | 173 | 21.87 | 6 | 1.29 | 12.94 | 4.21 | 1.06 |
| | CTGCTGGAGC | | | | | | | |
| GA180 | GCGCACTGCCC | 174 | 17.16 | 2.22 | 0.22 | 14.12 | 2.45 | 0.91 |
| | GCCGCCTGC | | | | | | | |
| GA181 | GGCTTCCTGGT | 175 | ND | ND | 28.87 | 45.12 | 15.43 | 3.66 |
| | GAAGATGAG | | | | | | | |
| GA182 | CACCTACGTGG | 176 | 17.44 | 4.49 | 0.95 | 22.89 | 6.14 | 1.55 |
| | TGGTGCTGA | | | | | | | |
| GA183 | CTACGTGGTGG | 177 | 32.35 | 9.89 | 2.21 | 39.56 | 15.99 | 2.87 |
| | TGCTGAAGG | | | | | | | |
| GA184 | ATGGAAGACA | 178 | 29.55 | 8.29 | 2.65 | 31.87 | 10.54 | 2.90 |
| | TGCAGGATCT | | | | | | | |
| GA185 | AGACATGCAG | 179 | 27.98 | 10.91 | 1.6 | 20.29 | 7.75 | 1.14 |
| | GATCTTGGTG | | | | | | | |
| GA186 | CTCATCTTCAC | 180 | 12.01 | 3.57 | 0.79 | 33.48 | 7.59 | 1.96 |
| | CAGGAAGCC | | | | | | | |
| GA187 | CTCCTCGATGT | 181 | ND | 6.47 | 2.44 | 29.24 | 12.30 | 3.77 |
| | AGTCGACAT | | | | | | | |
| GA188 | TATTCATCCGC | 182 | 41.02 | 15.38 | 4.21 | 0.06 | 0.01 | 0.01 |
| | CCGGTACCG | | | | | | | |
| GA189 | TCCTCGATGTA | 183 | 31.23 | 8.94 | 1.76 | 41.70 | 15.58 | 3.30 |
| | GTCGACATG | | | | | | | |
| GA190 | CCTCCTCGATG | 184 | 25.39 | 9.73 | 2.78 | 26.78 | 5.53 | 1.17 |
| | TAGTCGACA | | | | | | | |
| GA191 | GCCCCATGTCG | 185 | 34.6 | 12.2 | 3 | 51.79 | 26.79 | 5.46 |
| | ACTACATCG | | | | | | | |
| GA192 | CCATGTCGACT | 186 | 16.7 | 6.02 | 1.14 | 10.26 | 1.50 | 0.60 |
| | ACATCGAGG | | | | | | | |
| GA193 | GGGGCTGGTAT | 187 | 35.77 | 15.68 | 3.92 | 52.89 | 32.02 | 8.70 |
| | TCATCCGCC | | | | | | | |
| GA194 | GTCGACATGG | 188 | 32.97 | 12.39 | 2.32 | 30.91 | 9.49 | 2.38 |
| | GGCAACTTCA | | | | | | | |
| GA195 | ACCACCGGGA | 189 | 12.57 | 13.3 | 3.58 | 18.78 | 4.77 | 0.69 |
| | AATCGAGGGC | | | | | | | |
| GA196 | GAGTGACCAC | 190 | 17.19 | 2.9 | 0.75 | 27.79 | 3.4 | 1.09 |
| | CGGGAAATCG | | | | | | | |
| GA197 | AGTGACCACC | 191 | 15.03 | 3.29 | 1.22 | 18.21 | 3.89 | 0.9 |
| | GGGAAATCGA | | | | | | | |
| GA198 | CCACCGGGAA | 192 | 30.93 | 10.58 | 0.04 | 49 | 16.15 | 3.53 |
| | ATCGAGGGCA | | | | | | | |
| GA199 | GAAGCGGGTC | 193 | 29.95 | 6.89 | 1.17 | 45.32 | 15.11 | 3.07 |
| | CCGTCCTCCT | | | | | | | |
| GA200 | CTAGGAGATA | 194 | 5.31 | 8.68 | 3.8 | 54.36 | 20.51 | 5.15 |
| | CACCTCCACC | | | | | | | |
| GA201 | CAGCATACAG | 195 | 31.51 | 12.92 | 3.29 | 44.01 | 14.37 | 4.33 |
| | AGTGACCACC | | | | | | | |
| GA202 | AAGCGGGTCC | 196 | 34.75 | 10.75 | 2.54 | 31.13 | 8.91 | 1.54 |
| | CGTCCTCCTC | | | | | | | |
| GA203 | TGACCCTGCCC | 197 | 37.02 | 12.76 | 2.57 | 32.85 | 10.49 | 3.66 |
| | TCGATTTCC | | | | | | | |
| GA204 | CACTCTGTATG | 198 | 24.98 | 8.98 | 1.27 | 19.37 | 5.27 | 0.91 |
| | CTGGTGTCT | | | | | | | |
| GA205 | CCCTGCCCTCG | 199 | 38.04 | 12.42 | 3.74 | 36.43 | 12.04 | 3.01 |
| | ATTTCCCGG | | | | | | | |
| GA206 | CCGGTGGTCAC | 200 | 20.73 | 2.7 | 0.85 | 16.9 | 2.73 | 0.84 |
| | TCTGTATGC | | | | | | | |
| GA207 | GGAAATCGAG | 201 | 20.79 | 3.46 | 0.84 | 19.16 | 2.72 | 1.05 |
| | GGCAGGGTCA | | | | | | | |
| GA208 | CCAGCATACA | 202 | 25.76 | 5.72 | 1.38 | 25.07 | 6.01 | 1.15 |
| | GAGTGACCAC | | | | | | | |
| GA209 | CTTGGCAGTTG | 203 | 33.23 | 8.76 | 0.02 | 40.78 | 13.96 | 3.59 |
| | AGCACGCGC | | | | | | | |
| GA210 | CTGCGCGTGCT | 204 | 14.3 | 5.86 | 0.04 | 54.88 | 19.72 | 4.5 |
| | CAACTGCCA | | | | | | | |
| GA211 | TGCGCGTGCTC | 205 | 38.07 | 10.29 | 1.31 | 28.63 | 8.3 | 1.01 |
| | AACTGCCAA | | | | | | | |
| GA212 | CGGGATGCCG | 206 | 12.45 | 5.59 | 1.17 | 54.89 | 16.53 | 1.96 |
| | GCGTGGCCAA | | | | | | | |
| GA213 | CGTGCTCAACT | 207 | 24.28 | 8.77 | 2.17 | 45.22 | 16.35 | 2.73 |
| | GCCAAGGGA | | | | | | | |
| GA214 | CCTTGGCCACG | 208 | 22.92 | 6.28 | 1.94 | 50.35 | 14.84 | 3.06 |
| | CCGGCATCC | | | | | | | |
| GA215 | CAGCGGCCGG | 209 | 4.94 | 1.01 | 0.13 | 7.52 | 1.07 | |
| | GATGCCGGCG | | | | | | | |
| GA216 | CCGGGATGCC | 210 | 14.65 | 3.7 | 0.95 | 37.79 | 4.97 | 1.77 |
| | GGCGTGGCCA | | | | | | | |
| GA217 | GTGGTCAGCG | 211 | 15.31 | 2.75 | 0.77 | 39.21 | 10.2 | 2.6 |
| | GCCGGGATGC | | | | | | | |
| GA218 | CGCTGACCACC | 212 | 31.71 | 8.96 | 3.81 | 58.66 | 19.95 | 5.42 |
| | CCTGCCAGG | | | | | | | |
| GA219 | GGCAGGGGTG | 213 | 15.97 | 4.57 | 1.28 | 48.67 | 11.89 | 0.35 |
| | GTCAGCGGCC | | | | | | | |
| GA220 | GTGCTCAACTG | 214 | 21.87 | 9.12 | 2.17 | 45.17 | 12.39 | 3.13 |
| | CCAAGGGAA | | | | | | | |
| GA221 | TCATGGCACCC | 215 | 29.35 | 7.48 | 1.11 | 57.4 | 20.27 | 2.82 |
| | ACCTGGCAG | | | | | | | |
| GA222 | TGGCAGGGGT | 216 | 2.04 | 0.66 | 0.5 | 16.7 | 3.32 | 0.88 |
| | GGTCAGCGGC | | | | | | | |
| GA223 | GCTGACCACCC | 217 | 17.5 | 7.28 | 1.44 | 57.58 | 21.4 | 3.46 |
| | CTGCCAGGT | | | | | | | |
| GA224 | GGCCGCTGACC | 218 | 13.02 | 2.19 | 1.01 | 47.5 | 12.34 | 2.61 |
| | ACCCCTGCC | | | | | | | |
| GA225 | GGCATCGTCCC | 219 | 18.82 | 6.39 | 0.89 | 8.57 | 3.11 | 2.03 |
| | GGAAGTTGC | | | | | | | |
| GA226 | GGCTTTTCCGA | 220 | 7.61 | 2.99 | 0.4 | ND | ND | ND |
| | ATAAACTCC | | | | | | | |
| GA227 | GTCCCGGAAGT | 221 | 32.09 | 8.29 | 0.02 | 32.41 | 4.58 | 0.56 |
| | TGCCGGCAG | | | | | | | |
| GA228 | CGGCTGTACCC | 222 | 37.1 | 10.96 | 5.9 | 31.36 | 7.89 | 1.95 |
| | ACCCGCCAG | | | | | | | |
| GA229 | GTCGTGCTGGT | 223 | 30.41 | 6.85 | 0.47 | 34.28 | 5.39 | 0.75 |
| | CACCGCTGC | | | | | | | |
| GA230 | AGTAGAGGCA | 224 | 29.31 | 12.83 | ND | 35.86 | ND | ND |
| | GGCATCGTCC | | | | | | | |
| GA231 | TCCGAATAAAC | 225 | ND | ND | ND | ND | ND | ND |
| | TCCAGGCCT | | | | | | | |
| GA232 | GTTTATTCGGA | 226 | ND | ND | ND | ND | ND | ND |
| | AAAGCCAGC | | | | | | | |
| GA233 | GCGGCTGTACC | 227 | 19.97 | 5.39 | 3.08 | 37.8 | 10.84 | 2.38 |
| | CACCCGCCA | | | | | | | |
| GA234 | CGCCTGCCAGC | 252 | 5.45 | 2.29 | 0.06 | 6.44 | 1.53 | 0.21 |
| | GCCTGGCGA | | | | | | | |
| GA235 | CACCGCTGCCG | 228 | ND | ND | ND | 50.03 | 17.51 | 2.51 |
| | GCAACTTCC | | | | | | | |
| GA236 | AGCCCTCGCCA | 229 | 22.41 | 3.13 | 6.92 | 37.44 | 11.62 | 2.31 |
| | GGCGCTGGC | | | | | | | |
| GA237 | CAACGCCGCCT | 230 | 36.78 | 15.83 | 4.53 | 46.01 | 13.46 | 2.17 |
| | GCCAGCGCC | | | | | | | |
| GA238 | GCACGACCCC | 231 | ND | ND | ND | 17.92 | 4.01 | 0.94 |
| | AGCCCTCGCC | | | | | | | |
| GA239 | CCGCCTGCCAG | 232 | 3.49 | 1.73 | 0.06 | 4.55 | 0.55 | 0.02 |
| | CGCCTGGCG | | | | | | | |
| GA240 | TGCCAGCGCCT | 233 | 7.94 | 0.24 | 1.05 | 10.62 | 1.9 | 0.52 |
| | GGCGAGGGC | | | | | | | |
| GA241 | TGCTGCTGCCC | 234 | 5.39 | 1.49 | 0.61 | 16.11 | 2.94 | 0.97 |
| | CTGGCGGGT | | | | | | | |
| GA242 | TCACCGCTGCC | 235 | ND | ND | ND | 31.71 | 7.13 | 1.79 |
| | GGCAACTTC | | | | | | | |
| GA243 | GGCGAGGGCT | 236 | ND | ND | ND | 10.18 | 1.84 | 0.51 |
| | GGGGTCGTGC | | | | | | | |
| GA244 | TTCCGAATAAA | 237 | ND | ND | ND | 28.16 | 7.89 | 1.63 |
| | CTCCAGGCC | | | | | | | |
| GA245 | GTGCTGCTGCC | 238 | 2.9 | 2.97 | 1.68 | 7.07 | 0.88 | 0.19 |
| | CCTGGCGGG | | | | | | | |
| GA246 | GCCAGCGCCTG | 239 | 17.95 | 2.17 | 0.08 | 24.63 | 5.78 | 1.11 |
| | GCGAGGGCT | | | | | | | |
| GA247 | CCTCGCCAGGC | 240 | 6.76 | 0.17 | 0.25 | 11.48 | 2.62 | 0.71 |
| | GCTGGCAGG | | | | | | | |

TABLE 3
ANGPTL3 gRNA/SpCas9 editing in primary hepatocytes

| | | | Human Primary | | Cyno Primary | |
|---|---|---|---|---|---|---|
| | | SEQ | Hepatocyte | | Hepatocyte | |
| | Protospacer | ID | Editing % | | Editing % | |
| gRNA | (5′-3′) | NO: | 500 ng/mL | 100 ng/ml | 500 ng/ml | 100 ng/mL |
| GA107 | AGCCAATGGCC | 105 | 5.09 | 3.72 | ND | 32.58 |
| | TCCTTCAGT | | | | | |
| GA108 | TCCCAACTGAA | 106 | 19.43 | 4.95 | 15.49 | 4.11 |
| | GGAGGCCAT | | | | | |
| GA109 | GGCCTCCTTCA | 107 | 18.07 | 6.60 | 15.11 | 4.15 |
| | GTTGGGACA | | | | | |
| GA110 | GACCATGTCCC | 108 | 13.63 | 5.37 | 15.99 | 8.59 |
| | AACTGAAGG | | | | | |
| GA111 | GCCAATGGCCT | 109 | 24.08 | 10.72 | 28.98 | 22.61 |
| | CCTTCAGTT | | | | | |
| GA113 | ATTCTGGAGGA | 111 | 19.97 | 6.00 | 26.67 | 12.07 |
| | AATAACTAG | | | | | |
| GA115 | AACATAGCAAA | 113 | ND | ND | 25.51 | 12.58 |
| | TCTTGATTT | | | | | |
| GA116 | GTAGAATTTTTT | 114 | 16.33 | 3.78 | 19.83 | 10.84 |
| | CTTCTAGG | | | | | |
| GA117 | ACTACAAGTCA | 115 | 16.55 | 7.08 | 26.11 | 10.01 |
| | AAAATGAAG | | | | | |
| GA122 | CTTTTATTTGAC | 120 | 13.82 | 4.45 | 16.76 | 7.28 |
| | TATGCTGT | | | | | |
| GA125 | TGATGGTAAGA | 123 | 16.27 | 5.04 | 19.72 | 12.91 |
| | CACTTTGGT | | | | | |
| GA126 | GGAGTAGTTCT | 124 | 15.21 | 6.73 | 17.57 | 8.29 |
| | TGGTGCTCT | | | | | |
| GA127 | AACATGATGGT | 125 | 18.74 | 5.77 | 33.67 | 19.89 |
| | AAGACACTT | | | | | |
| GA128 | TGAAGAAAGGG | 126 | 25.39 | 10.29 | 32.55 | 0.19 |
| | AGTAGTTCT | | | | | |
| GA129 | AGTTCTTGGTGC | 127 | ND | ND | 20.06 | 5.36 |
| | TCTTGGCT | | | | | |
| GA130 | ATGATGGTAAG | 128 | 17.09 | 7.51 | 25.90 | 14.60 |
| | ACACTTTGG | | | | | |
| GA131 | GAAGATAGAGA | 129 | 18.64 | ND | 27.57 | 10.10 |
| | AATTTCTGT | | | | | |
| GA132 | GGAAGATAGAG | 130 | 28.39 | 15.25 | 26 | 15 |
| | AAATTTCTG | | | | | |
| GA137 | TATCAGGTAAA | 135 | 29.70 | 11.44 | 30.57 | 28.01 |
| | ACCTGTCTA | | | | | |
| GA141 | TTGAGAGTTGC | 139 | 14.87 | 5.80 | 10.32 | 5.49 |
| | TGGGTCTGA | | | | | |
| GA142 | TGAAAAACTTG | 140 | 24.90 | 10.50 | 27.59 | 20.09 |
| | AGAGTTGCT | | | | | |
| GA143 | TTAATTCAACAT | 141 | 19.36 | 9.30 | 21.16 | 14.84 |
| | CGAATAGA | | | | | |
| GA145 | CATTATATTCAG | 143 | 26.33 | 12.55 | 30.34 | 18.77 |
| | GTAGTCCA | | | | | |
| GA148 | ACAAAACTTCA | 146 | 31.67 | 12.01 | 69.75 | 28.57 |
| | ATGAAACGT | | | | | |
| GA151 | GAGAACTACAA | 149 | 31.88 | 10.56 | 38.91 | 11.32 |
| | ATATGGTTT | | | | | |

[0698] The modes of operation of Cas9, cytidine base editors (CBE), and adenine base editors (ABE) respectively, along with relevant terminology used in this application including “protospacer”, “PAM”, “spacer” are illustrated (FIGS. 1A-1C). For one of the guides that performed well, GA156, with spacer sequence 5′-GGTGCTAGCCTTGCGTTCCG-3′ (SEQ ID NO: 66), additional guides were synthesized with modifications to the tracrRNA sequence. Additionally, an X-ray crystal structure-guided approach was used (FIG. 1D). Structure-guided spacer and tracr designs were informed by the crystal structures of S. pyogenes Cas9 in complex with sgRNA (Jiang et al., 2015, PDB ID 4ZTO) and S. pyogenes Cas9 in a pre-catalytic ternary complex (Jiang et al., 2016, PDB ID 5F9R) (FIG. 2). Any positions in the crystal structures where there appeared to be a hydrogen bond between the 2′-OH of a given nucleotide and the Cas9 protein (or another part of the sgRNA) were left unmodified. Additionally, any positions where a steric clash was predicted to occur between a 2′-OMe and the protein were left unmodified. At sites where the 2′-OH was solvent-exposed or otherwise distant from protein residues, a 2′-OMe substitution was made. In cases where the two crystal structures disagreed, no modification was made. This strategy was applied to the entire sgRNA or just the tracr region. Exemplary structures are shown in FIGS. 3-7.

[0699] PCSK9 gRNAs were co-transfected with an equivalent amount of in vitro transcribed SpCas9 mRNA MS002 (1:1 ratio by weight) into primary human hepatocytes and processed as described in detailed methods. A wide range of editing activities were observed (Table 4; ND=Not determined). The guides with the highest editing activity at five days post transfection were GA001, GA002, GA007, and GA008. The structure-guided 2′-OMe heavy guide RNA (gRNA) designs GA007 and GA008 showed improved editing over minimally modified control gRNA GA009.

TABLE 4
In vitro evaluation of modified gRNA via SpCas9
editing in primary human hepatocytes

| gRNA | % Editing, day 3 | % Editing, day 5 |
|---|---|---|
| GA001 | 16 | 27 |
| GA002 | 28 | 23 |
| GA003 | ND | 7 |
| GA004 | 7 | 12 |
| GA005 | 1 | 15 |
| GA006 | ND | 12 |
| GA007 | 30 | 27 |
| GA008 | 20 | 28 |
| GA009 | 4 | 19 |

### Example 3. PCSK9 and ANGPTL3 Base Editing In Vitro

[0700] Editing of PCSK9 by ABE8.8 was observed in primary hepatocytes. PCSK9 gRNAs were co-transfected with an equivalent amount of in vitro transcribed ABE8.8 mRNA MA002 (1:1 ratio by weight) into primary hepatocytes and processed as described in detailed methods. In one set of experiments, extracted genomic DNA was analyzed for base editing of the target splice site with next-generation sequencing of PCR amplicons generated around the target sites. Samples were prepared using the Nextera XT DNA library preparation kit (Illumina) according to the manufacturer's protocol. Briefly, two rounds of PCR were performed first to amplify the region of interest and second to add DNA sequences required for next generation sequencing and sample identification to the initial product. The final amplicon was sequenced on the Illumina MiSeq instrument according to the manufacturer's protocol. A wide range of editing activities (Table 5; FIG. 8) were observed, with guides GA066, GA073, and GA074 performing the best.

TABLE 5
ABE8.8/PCSK9 gRNA editing in primary hepatocytes

| | | Human Primary | | | Cynomolgous Primary | | |
|---|---|---|---|---|---|---|---|
| | | Hepatocytes-splice | | | Hepatocytes-splice | | |
| | | site editing % | | | site editing % | | |
| | | 5000 | 2500 | 1250 | 5000 | 2500 | 1250 |
| gRNA | Species | ng/mL | ng/mL | ng/mL | ng/mL | ng/mL | ng/mL |
| GA066 | Human/ | 25.9 | 18.7 | 13.6 | 24.3 | 29.1 | 21.4 |
| | Cyno | | | | | | |
| GA072 | Human/ | 2.5 | 2.2 | 1.5 | 2.2 | 1.7 | 2.3 |
| | Cyno | | | | | | |
| GA073 | Human/ | 25.4 | 17.5 | 11.2 | 29.2 | 23.2 | 24.7 |
| | Cyno | | | | | | |
| GA074 | Human/ | 23.8 | 18.8 | 11.6 | 18.7 | 20.1 | 17.5 |
| | Cyno | | | | | | |
| GA075 | Human/ | 5.5 | 3.1 | 1.8 | ND | ND | ND |
| | Cyno | | | | | | |
| GA076 | Human/ | 4.9 | 3.9 | 1.6 | ND | ND | ND |
| | Cyno | | | | | | |
| GA077 | Human/ | 6.0 | 5.7 | 2.8 | 5.4 | 5.7 | 4.1 |
| | Cyno | | | | | | |
| GA078 | Human/ | 12.6 | 10.0 | 6.5 | ND | ND | ND |
| | Cyno | | | | | | |
| GA079 | Human/ | 6.5 | 4.9 | 2.2 | 0.5 | 0.5 | 0.6 |
| | Cyno | | | | | | |
| GA080 | Human/ | 0.6 | 0.5 | 0.4 | 7.0 | 8.8 | 7.1 |
| | Cyno | | | | | | |
| GA081 | Human/ | 8.3 | 6.1 | 4.3 | 0.3 | 0.3 | 0.3 |
| | Cyno | | | | | | |
| GA082 | Human/ | 9.8 | 9.6 | 5.6 | ND | ND | ND |
| | Cyno | | | | | | |
| GA083 | Human/ | 0.2 | 0.2 | 0.2 | ND | ND | ND |
| | Cyno | | | | | | |
| GA084 | Human/ | 8.6 | 7.6 | 4.9 | ND | ND | ND |
| | Cyno | | | | | | |
| GA085 | Human/ | 2.4 | 1.8 | 1.2 | ND | ND | ND |
| | Cyno | | | | | | |
| GA086 | Human/ | 5.7 | 4.9 | 2.9 | ND | ND | ND |
| | Cyno | | | | | | |
| GA087 | Human/ | 1.9 | 1.4 | 1.0 | 0.2 | 0.2 | 0.2 |
| | Cyno | | | | | | |
| GA088 | Human/ | 7.2 | 6.2 | 3.6 | 24.8 | 23.0 | 17.0 |
| | Cyno | | | | | | |
| GA089 | Human/ | 18.1 | 14.1 | 5.4 | ND | ND | ND |
| | Cyno | | | | | | |
| GA090 | Human/ | 0.4 | 0.5 | 0.3 | ND | ND | ND |
| | Cyno | | | | | | |

[0701] When considering the data from primary human hepatocytes, PCSK9-targeting gRNAs were identified that matched the following three protospacer sequences as having the best cross-species activity between both primary human hepatocytes and primary cynomolgous hepatocytes: 5′-CCCGCACCTTGGCGCAGCGG-3′ (SEQ ID NO: 13) (GA066), 5′-GCTTACCTGTCTGTGGAAGC-3′ (SEQ ID NO: 67) (GA073), and 5′-TGCTTACCTGTCTGTGGAAG-3′ (SEQ ID NO: 68) (GA074). The GA066 sequence targets the splice donor at the 5′ end of human PCSK9 intron 1 and is predicted to result in an aberrant PCSK9 protein translated from exon 1, followed by several amino acids translated from the beginning of intron 1 (read through from exon 1 into intron 1), followed by a premature stop codon (FIG. 9). The GA073 and GA074 sequences each target the splice donor at the 5′ end of human PCSK9 intron 4 and is predicted to result in an aberrant PCSK9 protein translated from exons 1, 2, 3, and 4, followed by several amino acids translated from the beginning of intron 4 (readthrough from exon 4 into intron 4), followed by a premature stop codon. The predicted prematurely truncated protein in each of these cases is likely to have complete loss of function as well as having minimal immunogenicity due to the near-identical match to part of the naturally occurring wild-type human PCSK9 amino acid sequence. The same protospacer sequence, 5′-CCCGCACCTTGGCGCAGCGG-3′ (SEQ ID NO: 13) (GA066), is found in the cynomolgus monkey genome, similarly targeting the splice donor at the 5′ end of cyno PCSK9 intron 1.

[0702] Editing of ANGPTL3 by ABE8.8 was observed in primary hepatocytes. ANGPTL3 gRNAs were co-transfected with an equivalent amount of in vitro transcribed ABE8.8 mRNA MA004 (1:1 ratio by weight) into primary hepatocytes and processed as described in detailed methods. A human ANGPTL3-targeting gRNA matching the following protospacer sequence 5′-AAGATACCTGAATAACCCTC-3′ (SEQ ID NO: 15) (GA091) was identified. The GA091 sequence targets the splice donor at the 5′ end of human ANGPTL3 intron 6 and is predicted to result in an aberrant ANGPTL3 protein translated from exons 1, 2, 3, 4, 5, and 6, followed by several amino acids translated from the beginning of intron 6 (readthrough from exon 6 into intron 6), followed by a premature stop codon (FIG. 10). Notably, there is a naturally occurring rare human DNA variant that disrupts the same splice donor and bears the designation rs398122985. A gRNA was synthesized with the orthologous cynomolgous spacer sequence, differing by 1 nucleotide: 5′-AAGATACCTGAATAACTCTC-3′ (SEQ ID NO: 14) (GA067) and bearing modest chemical modifications (Table 1). Both GA091 in human primary hepatocytes, and GA067 in cynomolgus primary hepatocytes, lead to substantial splice editing when co-transfected with ABE8.8 mRNA (protocol described in the detailed methods section) (Table 6). RNA was transfected at 2500, 1250, 625, and 312.5 ng/test article/mL, with two replicates reported (rep 1 and rep 2).

TABLE 6
ABE8.8/ANGPTL3 gRNA editing in primary hepatocytes

| | | 2500, | 2500, | 1250, | 1250, | 625, | 625, | 312.5, | 312.5, |
|---|---|---|---|---|---|---|---|---|---|
| gRNA | Species | rep 1 | rep 2 | rep 1 | rep 2 | rep 1 | rep 2 | rep 1 | rep 2 |
| | | Human Primary Hepatocytes-splice site editing % (Dose, Replicate #) | | | | | | | |
| GA091 | Human | 72.23 | 72.04 | 62.01 | 65.15 | 47.85 | 47.3 | 30.71 | 29.62 |
| GA092 | Human/ | 38.39 | 41.71 | 33.38 | 29.83 | 20.73 | 19.94 | 8.54 | 10.92 |
| | Cyno | | | | | | | | |
| GA093 | Human | 63.53 | 66.9 | 55.54 | 56.2 | 39.22 | 39.8 | 20.7 | 17.32 |
| GA094 | Human | 44.84 | 46.65 | 39.62 | 46.8 | 28.75 | 14.74 | 14.12 | 26.7 |
| | | Cyno Primary Hepatocytes-splice site editing (Dose, Replicate #) | | | | | | | |
| GA067 | Cyno | 66.06 | 64.84 | 64.92 | 63.78 | 53.56 | 53.66 | 37.05 | 39.36 |
| GA092 | Human/ | 45.76 | 43.27 | 43 | 44.28 | 32.42 | 32.56 | 25.72 | 19.87 |
| | Cyno | | | | | | | | |

[0703] Another strategy by which adenine base editors might be used to disrupt gene function is to introduce a missense mutation(s) into the coding region of the gene that results in production of a less functional, or non-functional protein. Guide RNAs targeting protospacers in ANGPTL3 exons were assessed for base editing activity to introduce missense mutation(s). Each of the gRNAs with an equivalent amount of in vitro transcribed ABE8.8 mRNA MA004 (1:1 ratio by weight) were co-transfected in two replicates (rep 1 and rep 2) at 2500, 1250, 625, and 312.5 ng/RNA/mL into primary human hepatocytes and processed as described in detailed methods. The resulting base editing efficiency, as well as one potential amino acid substitution, is listed in Table 7.

[0704] In some embodiments, adenine base editors disrupts gene function by replacing any one amino acid selected from A, R, N, D, C, Q, E, G, H, I, L, K, M, F, P, S, T, W, Y, and V with a non-identical amin acid A, R, N, D, C, Q, E, G, H, I, L, K, M, F, P, S, T, W, Y, and V. In some embodiments, adenine base editors disrupt gene function by substituting I with T or V. In some embodiments, adenine base editors disrupt gene function by substituting D with G. In some embodiments, adenine base editors disrupt gene function by substituting E with G. In some embodiments, adenine base editors disrupt gene function by substituting F with L or P. In some embodiments, adenine base editors disrupt gene function by substituting H with R. In some embodiments, adenine base editors disrupt gene function by substituting L with P. In some embodiments, adenine base editors disrupt gene function by substituting S with P. In some embodiments, adenine base editors disrupt gene function by substituting M with T. In some embodiments, adenine base editors disrupt gene function by substituting N with G. In some embodiments, adenine base editors disrupt gene function by substituting Q with R. In some embodiments, adenine base editors disrupt gene function by substituting R with G. In some embodiments, adenine base editors disrupt gene function by substituting T with A. In some embodiments, adenine base editors disrupt gene function by substituting V with A. In some embodiments, adenine base editors disrupt gene function by substituting Y with C or H. In some embodiments, adenine base editors disrupt gene function by substituting K with G. In some embodiments, adenine base editors disrupt gene function by introducing an amino acid substitute as listed in Table 7.

TABLE 7
ANGPTL3 gRNA ABE editing can introduce missense mutations

| | | | | Human Primary Hepatocytes- | | | | | | | |
|---|---|---|---|---|---|---|---|---|---|---|---|
| | | | Example | Editing % (Dose, Replicate #) | | | | | | | |
| | | SEQ | Amino | 2500, | 2500, | 1250, | 1250, | 625, | 625, | 312.5, | 312.5, |
| | Protospacer | ID | Acid | rep | rep | rep | rep | rep | rep | rep | rep |
| gRNA | (5′-3′) | NO | Substitution | 1 | 2 | 1 | 2 | 1 | 2 | 1 | 2 |
| GA104 | TAATTT | 102 | I68T | 0.27 | 0.31 | 0.17 | 0.29 | 0.27 | 0.31 | 0.21 | 0.27 |
| | GGCCCT | | | | | | | | | | |
| | TCGTCT | | | | | | | | | | |
| | TA | | | | | | | | | | |
| GA105 | AGACTT | 103 | D59G | 1.12 | 1.06 | 0.98 | 1 | 0.95 | 1.28 | 1.07 | 1.01 |
| | TGTCCA | | | | | | | | | | |
| | TAAGAC | | | | | | | | | | |
| | GA | | | | | | | | | | |
| GA106 | GACTTT | 104 | N/A (D59G) | 1.24 | 1.08 | 1.15 | 1.13 | 1.28 | 1.24 | 1.07 | 1.34 |
| | GTCCAT | | | | | | | | | | |
| | AAGACG | | | | | | | | | | |
| | AA | | | | | | | | | | |
| GA112 | ATTGTC | 110 | N/A | 0.53 | 0.44 | 0.46 | 0.54 | 0.49 | 0.35 | 0.39 | 0.5 |
| | TTGATC | | | | | | | | | | |
| | AATTCT | | | | | | | | | | |
| | GG | | | | | | | | | | |
| GA113 | ATTCTG | 111 | S17P | 1.22 | 1.31 | 1.17 | 1.26 | 1.23 | 1.19 | 1.21 | 1.13 |
| | GAGGAA | | | | | | | | | | |
| | ATAACT | | | | | | | | | | |
| | AG | | | | | | | | | | |
| GA115 | AACATA | 113 | M39T | 58.3 | ND | 50.19 | ND | 29.1 | ND | 16.55 | ND |
| | GCAAAT | | | | | | | | | | |
| | CTTGAT | | | | | | | | | | |
| | TT | | | | | | | | | | |
| GA116 | GTAGAA | 114 | I132T | 54.78 | ND | 65.37 | ND | 33.93 | ND | 19.8 | ND |
| | TTTTTTC | | | | | | | | | | |
| | TTCTAG | | | | | | | | | | |
| | G | | | | | | | | | | |
| GA117 | ACTACA | 115 | Q107R | 56.95 | 57.99 | 42.71 | 48.24 | 25.63 | 27.9 | 13.13 | 12.8 |
| | AGTCAA | | | | | | | | | | |
| | AAATGA | | | | | | | | | | |
| | AG | | | | | | | | | | |
| GA118 | TATATT | 116 | Y186C | 37.26 | 37.2 | 30.38 | 30.76 | 20.85 | 20.44 | 9.23 | 11.01 |
| | GGTCTT | | | | | | | | | | |
| | CCACGG | | | | | | | | | | |
| | TC | | | | | | | | | | |
| GA119 | CAAAGA | 117 | D177G | 54.92 | 55.55 | 14.06 | 42.4 | 25.96 | 25.9 | 10.84 | 12.43 |
| | CCTTCT | | | | | | | | | | |
| | CCAGAC | | | | | | | | | | |
| | CG | | | | | | | | | | |
| GA120 | GGTCTT | 118 | V182A | 1.79 | 2.04 | 1.41 | 1.59 | 1.21 | 0.89 | 0.73 | 0.76 |
| | CCACGG | | | | | | | | | | |
| | TCTGGA | | | | | | | | | | |
| | GA | | | | | | | | | | |
| GA121 | TTGTTT | 119 | Y186H | 57.04 | 65.91 | 45.78 | 45.61 | 30.15 | 33.83 | 15.68 | 13.37 |
| | ATATTG | | | | | | | | | | |
| | GTCTTC | | | | | | | | | | |
| | CA | | | | | | | | | | |
| GA122 | CTTTTA | 120 | I196T | 40.76 | 37.69 | 37.03 | 34.27 | 21.08 | 18.83 | 11.25 | 7.49 |
| | TTTGAC | | | | | | | | | | |
| | TATGCT | | | | | | | | | | |
| | GT | | | | | | | | | | |
| GA123 | AAAGTC | 121 | F167L | 12.51 | 13.68 | 8.79 | 12.05 | 8.1 | 5.76 | 3.63 | 2.83 |
| | TGGATA | | | | | | | | | | |
| | TAGAGA | | | | | | | | | | |
| | GT | | | | | | | | | | |
| GA124 | GTTGGT | 122 | L189P | 4.43 | 4.46 | 4.13 | 4.34 | 2.5 | 2.4 | 1.2 | 0.71 |
| | TTAATT | | | | | | | | | | |
| | GTTTAT | | | | | | | | | | |
| | AT | | | | | | | | | | |
| GA125 | TGATGG | 123 | N/A | 23.46 | 26.03 | 20.98 | 24.59 | 13.15 | 15.36 | 6.44 | 5.84 |
| | TAAGAC | | | | | | | | | | |
| | ACTTTG | | | | | | | | | | |
| | GT | | | | | | | | | | |
| GA126 | GGAGTA | 124 | N/A | 30.93 | 32.19 | 18.11 | 28.57 | 15.14 | 14.56 | 7.37 | 5.22 |
| | GTTCTT | | | | | | | | | | |
| | GGTGCT | | | | | | | | | | |
| | CT | | | | | | | | | | |
| GA127 | AACATG | 125 | H239R | 43.8 | 45.03 | 35.09 | 34.98 | 23.07 | 24.46 | 12.12 | 12.5 |
| | ATGGTA | | | | | | | | | | |
| | AGACAC | | | | | | | | | | |
| | TT | | | | | | | | | | |
| GA128 | TGAAGA | 126 | F228P, | 57.41 | 74.82 | 54.67 | 60.9 | 34.35 | 48.55 | 22.73 | 17.55 |
| | AAGGGA | | L229P | | | | | | | | |
| | GTAGTT | | | | | | | | | | |
| | CT | | | | | | | | | | |
| GA129 | AGTTCT | 127 | N/A | 0.19 | 0.07 | 0.07 | 0.13 | 0.05 | 0.11 | 0.1 | 0.08 |
| | TGGTGC | | | | | | | | | | |
| | TCTTGG | | | | | | | | | | |
| | CT | | | | | | | | | | |
| GA130 | ATGATG | 128 | D240G | 22.16 | 22.73 | 18.57 | 20.93 | 10.79 | 10.52 | 5.93 | 5.09 |
| | GTAAGA | | | | | | | | | | |
| | CACTTT | | | | | | | | | | |
| | GG | | | | | | | | | | |
| GA131 | GAAGAT | 129 | L216P, | 73.63 | 82.24 | 65.4 | 74.19 | 42.42 | 47.99 | 25.24 | 27.14 |
| | AGAGAA | | S217P | | | | | | | | |
| | ATTTCT | | | | | | | | | | |
| | GT | | | | | | | | | | |
| GA132 | GGAAGA | 130 | S217P | 76.43 | 88.77 | 69.65 | 70.55 | 49.49 | 46.32 | 22.36 | 23.83 |
| | TAGAGA | | | | | | | | | | |
| | AATTTC | | | | | | | | | | |
| | TG | | | | | | | | | | |
| GA133 | TATTTC | 131 | I234T | 33.9 | 31.49 | 26.95 | 30.48 | 14.09 | 21.88 | 12.1 | 11.31 |
| | ATTCAA | | | | | | | | | | |
| | CTGAAG | | | | | | | | | | |
| | AA | | | | | | | | | | |
| GA134 | ATTTCA | 132 | N/A | 41.07 | 47.04 | 38.09 | 38.78 | 24.71 | 21 | 15.48 | 15.68 |
| | TTCAAC | | | | | | | | | | |
| | TGAAGA | | | | | | | | | | |
| | AA | | | | | | | | | | |
| GA135 | GTCTAC | 133 | Y273C | 34.5 | 36.73 | 31.33 | 31.88 | 19.77 | 19.85 | 12.12 | 10.61 |
| | TGTGAT | | | | | | | | | | |
| | GTTATA | | | | | | | | | | |
| | TC | | | | | | | | | | |
| GA136 | TAAATG | 134 | I249T | 31.45 | 31.46 | 22.08 | 22.42 | 12.96 | 13.18 | 6.23 | 5 |
| | GTGGTA | | | | | | | | | | |
| | CATTCA | | | | | | | | | | |
| | GC | | | | | | | | | | |
| GA137 | TATCAG | 135 | N/A | 39.23 | 45.5 | 35.54 | 35.24 | 20.93 | 15.07 | 10.3 | 9.13 |
| | GTAAAA | | | | | | | | | | |
| | CCTGTC | | | | | | | | | | |
| | TA | | | | | | | | | | |
| GA138 | TGTACC | 136 | T247A | 38.65 | 38.24 | 29.16 | 29.42 | 19.7 | 17.09 | 10.32 | 8.59 |
| | ACCATT | | | | | | | | | | |
| | TATAAC | | | | | | | | | | |
| | AG | | | | | | | | | | |
| GA139 | TTCACC | 137 | N/A | 13 | 11.96 | 10.47 | 9.45 | 6.86 | 4.95 | 3.51 | 3.78 |
| | TCTGTT | | | | | | | | | | |
| | ATAAAT | | | | | | | | | | |
| | GG | | | | | | | | | | |
| GA140 | AACAGA | 138 | R252G | 30.27 | 41.96 | 32.49 | 33.65 | 18.78 | 17.9 | 9.48 | 7.7 |
| | GGTGAA | | | | | | | | | | |
| | CATACA | | | | | | | | | | |
| | AG | | | | | | | | | | |
| GA141 | TTGAGA | 139 | S267P | 0.4 | 0.41 | 0.37 | 0.51 | 0.4 | 0.67 | 0.44 | 0.45 |
| | GTTGCT | | | | | | | | | | |
| | GGGTCT | | | | | | | | | | |
| | GA | | | | | | | | | | |
| GA143 | TTAATT | 141 | I285V | 12.33 | 10.68 | 9.23 | 8.81 | 5.47 | 4.63 | 3.05 | 2.94 |
| | CAACAT | | | | | | | | | | |
| | CGAATA | | | | | | | | | | |
| | GA | | | | | | | | | | |
| GA144 | TTTGGG | 142 | R308G | 15.05 | 15.17 | 10.82 | 12.69 | 7.52 | 8.04 | 4.16 | 4.56 |
| | AGGCTT | | | | | | | | | | |
| | GATGGT | | | | | | | | | | |
| | AA | | | | | | | | | | |
| GA145 | CATTAT | 143 | N/A (intron) | 66.32 | 62.98 | 55.96 | 58.5 | 37.77 | 37.26 | 20.55 | 17.46 |
| | ATTCAG | | | | | | | | | | |
| | GTAGTC | | | | | | | | | | |
| | CA | | | | | | | | | | |
| GA146 | TTGGGA | 144 | R308G | 22.26 | 23.4 | 16.22 | 18.81 | 9.91 | 10.61 | 4.57 | 4.62 |
| | GGCTTG | | | | | | | | | | |
| | ATGGTA | | | | | | | | | | |
| | AG | | | | | | | | | | |
| GA147 | TTTTGG | 145 | R308G | 3.99 | 3.67 | 3.46 | 2.72 | 1.96 | 2.41 | 1.03 | 1.2 |
| | GAGGCT | | | | | | | | | | |
| | TGATGG | | | | | | | | | | |
| | TA | | | | | | | | | | |
| GA148 | ACAAAA | 146 | N294G | 25.08 | 21.83 | 22.57 | 21.33 | 12.96 | 16.13 | 8.62 | 7.59 |
| | CTTCAA | | | | | | | | | | |
| | TGAAAC | | | | | | | | | | |
| | GT | | | | | | | | | | |
| GA149 | TATGGT | 147 | Y304C | 0.47 | 0.43 | 0.42 | 0.48 | 0.52 | 0.47 | 0.45 | 0.47 |
| | TTTGGG | | | | | | | | | | |
| | AGGCTT | | | | | | | | | | |
| | GA | | | | | | | | | | |
| GA150 | ACTACA | 148 | Y302C, | 51.08 | 51.83 | 40.09 | 43.73 | 23.76 | 22.55 | 10.14 | 9.52 |
| | AATATG | | K303G | | | | | | | | |
| | GTTTTG | | | | | | | | | | |
| | GG | | | | | | | | | | |
| GA151 | GAGAAC | 149 | N301G | 45.3 | 44.63 | 31.68 | 35.7 | 22.72 | 20.85 | 10.83 | 12.4 |
| | TACAAA | | | | | | | | | | |
| | TATGGT | | | | | | | | | | |
| | TT | | | | | | | | | | |
| GA152 | AGGACA | 150 | H391R | 15.32 | 14.78 | 9.37 | 11.5 | 6.33 | 6.89 | 4.95 | 4.38 |
| | CTTCAA | | | | | | | | | | |
| | CTGTCC | | | | | | | | | | |
| | AG | | | | | | | | | | |
| GA153 | CTTTTC | 101 | N/A (intron) | 22.82 | 23.57 | 18.25 | 16.17 | 8.41 | 7.17 | 4.79 | ND |
| | AGGAGA | | | | | | | | | | |
| | ATTTTG | | | | | | | | | | |
| | GT | | | | | | | | | | |
| GA276 | ACGTGG | 242 | E300G | 4.85 | 5.62 | 3.78 | 4 | 2.98 | 2.75 | 2.38 | 1.96 |
| | GAGAAC | | | | | | | | | | |
| | TACAAA | | | | | | | | | | |
| | TA | | | | | | | | | | |
| GA277 | CGATGT | 243 | N/A | 2.36 | 2.43 | 1.69 | 1.87 | 1.53 | 1.72 | 1.16 | 1.17 |
| | TGAATT | | | | | | | | | | |
| | AATGTC | | | | | | | | | | |
| | CA | | | | | | | | | | |
| GA278 | CACAAA | 244 | Q293R | 4.09 | 4.48 | 2.43 | 2.81 | 2.2 | 2.01 | 1.68 | 1.74 |
| | ACTTCA | | | | | | | | | | |
| | ATGAAA | | | | | | | | | | |
| | CG | | | | | | | | | | |
| GA279 | TACGAA | 245 | I333V | 22.69 | 29.48 | 19.35 | 21.19 | 12.41 | 15.31 | 7.23 | 7.37 |
| | TTGAGT | | | | | | | | | | |
| | TGGAAG | | | | | | | | | | |
| | AC | | | | | | | | | | |
| GA284 | CTATGG | 246 | S322P | 22.78 | 30.95 | 22.27 | 19.12 | 16.01 | 16.29 | 11.29 | 5.95 |
| | AGTATA | | | | | | | | | | |
| | TCTTCT | | | | | | | | | | |
| | CT | | | | | | | | | | |

[0705] The gRNAs GA066/GA095, GA096, G097, GA346, matching the 5′-CCCGCACCTTGGCGCAGCGG-3′ (SEQ ID NO: 13) (GA066) protospacer sequence but with more extensive chemical modifications of various kinds (Table 1) were synthesized. Similarly, three gRNAs (GA098, GA099, GA100) were synthesized matching the 5′-AAGATACCTGAATAACCCTC-3′ (SEQ ID NO: 15) (GA091) human protospacer sequence, as well as four gRNAs (GA067/GA101, GA102, GA103, GA347) matching the 5′-AAGATACCTGAATAACTCTC-3′ (SEQ ID NO: 14) (GA067) cynomolgus protospacer sequence, but with more extensive chemical modifications of various kinds (Table 1). GA066 and GA095 contain the same chemical composition and modification pattern, as do GA067 and GA101 with one another. It is contemplated that such gRNAs may improve stability against nucleases and gRNA-base editor complex, and reduce or suppress gRNA-triggered immune reaction. Each of the gRNAs described in Table 8, with an equivalent amount of in vitro transcribed ABE8.8 mRNA MA002 (1:1 ratio by weight), were co-transfected into primary human hepatocytes and primary cynomolgus hepatocytes via MessengerMax reagent, using various dilutions to assess for editing activity at different concentrations of test article. Three days after transfection, genomic DNA was harvested from the hepatocytes, and then assessed for base editing of the target splice site with next-generation sequencing. In both human and cynomolgus hepatocytes, as high as 60%-70% editing of the target splice site (PCSK9 intron 1 splice donor; ANGPTL3 intron 6 splice donor) were observed (Table 8).

TABLE 8
Chemically modified gRNAs have high editing efficiency in human and
cynomolgus primary hepatocytes

| | | Human Primary Hepatocytes- | | | | Cynomolgus Primary Hepatocytes- | | | |
|---|---|---|---|---|---|---|---|---|---|
| | | splice site editing % | | | | splice site editing % | | | |
| | | 2500 | 500 | 100 | 20 | 2500 | 500 | 100 | 20 |
| gRNA | Species | ng/mL | ng/mL | ng/mL | ng/mL | ng/mL | ng/mL | ng/mL | ng/mL |
| GA066 | Human/ | 67.7 | 55.1 | 38.9 | 13.3 | 48.2 | 55.3 | 43.8 | 19.0 |
| | Cyno | | | | | | | | |
| GA096 | Human/ | 62.8 | 49.9 | 41.2 | 15.6 | 65.9 | 51.4 | 48.0 | 19.6 |
| | Cyno | | | | | | | | |
| GA097 | Human/ | 67.3 | 68.1 | 54.1 | 22.6 | 62.2 | 58.1 | 56.8 | 28.0 |
| | Cyno | | | | | | | | |
| GA098 | Human | 70.7 | 51.3 | 36.3 | 10.9 | ND | ND | ND | ND |
| GA099 | Human | 70.3 | 47.0 | 34.4 | 11.5 | ND | ND | ND | ND |
| GA100 | Human | 69.2 | 48.6 | 38.5 | 12.4 | ND | ND | ND | ND |
| GA066/ | Cyno | ND | ND | ND | ND | 61.4 | 49.0 | 45.9 | 16.0 |
| GA101 | | | | | | | | | |
| GA102 | Cyno | ND | ND | ND | ND | 62.5 | 51.7 | 58.1 | 25.9 |
| GA103 | Cyno | ND | ND | ND | ND | 62.7 | 44.2 | 44.6 | 17.2 |

[0706] The method by which classical CRISPR/Cas9 disrupts a gene by ultimately introducing an indel, is distinctly and significantly different than base editing. Specifically, base editing is used to introduce a base mutation(s) within a target window closer to the 5′ region of the protospacer, as opposed to 3-4 bp away from the PAM, as routinely seen with CRISPR/Cas9. Further, a target region that is highly amenable to CRISPR/Cas9 editing does not necessarily mean base editing at that location will occur, and vice versa. LNPs containing either: (1) Cas9 mRNA MS010 and a gRNA matching 5′-CCCGCACCTTGGCGCAGCGG-3′ (SEQ ID NO: 13) (GA097) protospacer sequence; or (2) ABE8.8 mRNA MA004 and gRNA matching 5′-CCCGCACCTTGGCGCAGCGG-3′ (SEQ ID NO: 13) (GA097) protospacer sequence, were transfected in human primary hepatocytes. Sanger sequencing of the edited genomic DNA was performed and illustrated the difference in gene editing that occurred from CRISPR/Cas9 compared to base editing (FIG. 11). The arrow highlights the main base editing position, while the scissors highlight the general region where Cas9 cuts.

[0707] To demonstrate that base editing of a splice site disrupts splicing, reverse transcription-PCR of mRNA from treated primary human hepatocytes, using primers in exon 1 and exon 2, was performed. Results confirmed that splice site disruption resulted in the use of alternative splice donor sites within intron 1, well downstream of the in-frame TAG stop codon (FIG. 12, Table 9). The table reports the number of mapped reads for each splice site donor as determined from next generation sequencing.

TABLE 9
Alternative splice donor sites within PCSK9 intron 1 resulting from editing of
PCSK9 exon 1 splice-donor adenine base in primary human hepatocytes.

| | | Number of aligned reads corresponding to: | | | | | |
|---|---|---|---|---|---|---|---|
| | | Intron | Intron | Intron | Intron | Intron | Intron |
| | | length | length | length | length | length | length |
| | Mapped | 0 | 83 | 87 | 135 | 153 | 154 |
| Sample* | reads | (GT donor) | (CC donor) | (GT donor) | (CG donor) | (GC donor) | (CA donor) |
| control | 7827 | 3187 | 0 | 0 | 0 | 0 | 0 |
| (1) | | | | | | | |
| control | 10584 | 5956 | 0 | 0 | 0 | 0 | 0 |
| (2) | | | | | | | |
| control | 8575 | 2307 | 0 | 0 | 0 | 0 | 0 |
| (3) | | | | | | | |
| control | 6721 | 5153 | 0 | 0 | 0 | 0 | 0 |
| (4) | | | | | | | |
| treated | 8278 | 2368 | 0 | 243 | 184 | 984 | 0 |
| (1) | | | | | | | |
| treated | 4127 | 1851 | 19 | 235 | 0 | 785 | 0 |
| (2) | | | | | | | |
| treated | 5694 | 1096 | 21 | 563 | 0 | 392 | 130 |
| (3) | | | | | | | |
| treated | 4214 | 2036 | 0 | 70 | 0 | 1203 | 0 |
| (4) | | | | | | | |

*Four different primer pairs were used for RT-PCR of the control/treated samples.

### Example 4. PCSK9 and ANGPTL3 Off-Target Validation In Vitro

[0708] With a view towards establishing the safety of a base-editing therapy knocking down PCSK9 in the human liver in vivo, off-target mutagenesis analysis was assessed. A list of candidate sites in the human genome for off-target mutagenesis was assembled using two different methods. The first method used bioinformatic analysis of the human genome, identifying all sites with a PAM sequence compatible with Streptococcus pyogenes Cas9 (and therefore ABE 8.8) and a protospacer sequence with up to 4 single-nucleotide mismatches with the GA066 spacer sequence 5′-CCCGCACCTTGGCGCAGCGG-3′ (SEQ ID NO: 13). The second method to generate candidate sites used an in vitro biochemical assay, ONE-seq, that determined the propensity of a ribonucleoprotein comprising the ABE8.8 base editor protein and PCSK9 gRNA (5′-CCCGCACCTTGGCGCAGCGG-3′ (SEQ ID NO: 13)) to cleave oligonucleotides in a library. The reference human genome (GRCh38) was searched for sites with up to 6 mismatches to the protospacer sequence specified by the PCSK9 gRNA (5′-CCCGCACCTTGGCGCAGCGG-3′ (SEQ ID NO: 13)), and sites with up to 4 mismatches plus up to 2 DNA or RNA bulges using Cas-Designer were identified. More specifics on ONE-seq library preparation, experimental protocol, and bioinformatic analysis are described in the additional detailed methods section.

[0709] Any cleaved oligonucleotides are PCR-amplified and undergo next-generation sequencing. Oligonucleotides with higher sequence counts reflect a higher propensity for Cas9/gRNA cleavage in vitro and represent the sites most likely to suffer off-target mutagenesis in cells. The top site identified by the ONE-seq assay was the on-target PCSK9 site. The list of candidate off-target sites comprises more than 250 sites, and warranted further investigation (Table 10).

[0710] Primary human hepatocytes were treated with lipid nanoparticle (LNP) encapasulating ABE8.8 mRNA MA004 and PCSK9 gRNA (GA097 or GA346) at 1:1 weight ratio (see Lipid Nanoparticle Formulation and Analysis for details of LNP preparation) Upon next-generation sequencing using the Agilent SureSelect technology (Table 11), when the observed base editing rates in control cells were subtracted from the observed base editing rates in LNP-treated cells across the on-target site and candidate off-target sites (to account for background sequencing errors inherent in next-generation sequencing), appreciable base editing was observed at the on-target PCSK9 target site. These results were replicated in three different primary hepatocyte lots (STL, HLY, and JLP) from two male and one female patients.

[0711] Additionally, using hepatocytes from four individual donors (including lot TLY from a female patient, in addition to the three lots listed above), more than 50 off-target sites were assessed by performing next-generation sequencing of targeted PCR amplicons from LNP-treated versus untreated hepatocytes. Editing at none of these potential off-target sites, and only on-target editing at the PCSK9 target site, was observed (FIG. 13).

TABLE 10
PCSK9 gRNA (Protospacer 5′-CCCGCACCTTGGCGCAGCGG-3′ (SEQ
ID NO: 13)) candidate off-target sites as determined by
ONE-seq

| | | Potential Off-target | SEQ | |
|---|---|---|---|---|
| Chromosome | Location | sequence (5′-3′) | ID NO: | Alignment |
| 1 | 55040029- | CCCGCACCTTGGCGCAGCGGTGG | 80 | X00 |
| | 55040051 | | | |
| 1 | 6888039- | CTAGCACC-TGCCCCAGCGGTGG | 453 | RNA41 |
| | 6888061 | | | |
| 1 | 10640222- | TCCCTACCCTGGCACAGCAGGGG | 454 | X60 |
| | 10640244 | | | |
| 1 | 15101074- | CCCACACTCAGACGCAGCGAGGG | 455 | X60 |
| | 15101096 | | | |
| 1 | 20712184- | CCCGCAC--TGGAGCAGCAGGGA | 456 | RNA32 |
| | 20712206 | | | |
| 1 | 22256342- | CTTGCACCTTGGTAGCAGCTGGGG | 457 | DNA41 |
| | 22256365 | | | |
| 1 | 25103342- | CTGGCACCATGGCCCAGCAGTGG | 458 | X50 |
| | 25103364 | | | |
| 1 | 29882027- | ACTGCATCTTAGTGCAGAGGTGG | 459 | X60 |
| | 29882049 | | | |
| 1 | 40866872- | TCCACACCTTGGCGCACTGGAAG | 460 | X50 |
| | 40866894 | | | |
| 1 | 43692630- | CATTCACCTTGTCACAGCTGGGG | 461 | X60 |
| | 43692652 | | | |
| 1 | 44163492- | ACCGCACCATTGCACAGCCTAGG | 462 | X60 |
| | 44163514 | | | |
| 1 | 54256943- | GCCGCACCATGGGCACAGCGGGGA | 463 | DNA41 |
| | 54256966 | | | |
| 1 | 60335313- | CCCATACC-TGGCACAGCGGTGG | 464 | RNA31 |
| | 60335335 | | | |
| 1 | 64198527- | CAAGCACC-TGGCTCAGAGGTGG | 465 | RNA41 |
| | 64198549 | | | |
| 1 | 64266524- | ACCGCACC-TGGCACAGTGGAAG | 466 | RNA41 |
| | 64266546 | | | |
| 1 | 110096163- | CCCCACCCTTGGCACAGAGCAGG | 467 | X60 |
| | 110096185 | | | |
| 1 | 121262583- | CCAGCACC-TAGCGCAGAGCTGG | 468 | RNA41 |
| | 121262605 | | | |
| 1 | 145017699- | CCAGCACC-TAGCGCAGAGCTGG | 468 | RNA41 |
| | 145017721 | | | |
| 1 | 155615561- | CCCGCACC-TACCTCAGCAGGGG | 469 | RNA41 |
| | 155615583 | | | |
| 1 | 155751756- | CCCGCACC-TACCTCAGCAGGGG | 469 | RNA41 |
| | 155751778 | | | |
| 1 | 157194781- | CCCGCACCCCACCGCAGCGGGGG | 470 | X40 |
| | 157194803 | | | |
| 1 | 163263975- | TCTTTACCTTGGAGCAGCTGAGG | 471 | X60 |
| | 163263997 | | | |
| 1 | 175575740- | CCCGCACCACAGTGCACCGGGGG | 472 | X50 |
| | 175575762 | | | |
| 1 | 204314754- | CCTCCACAATGGCGCAGGGGCGG | 473 | X50 |
| | 204314776 | | | |
| 1 | 206281058- | CCAGCACC-TAGCGCAGAGCTGG | 468 | RNA41 |
| | 206281080 | | | |
| 1 | 208574946- | CCAGCACC-TGGCACAGAAGAGG | 474 | RNA41 |
| | 208574968 | | | |
| 1 | 228337504- | ACCGCACCAAGGTGCATAGGAGG | 475 | X60 |
| | 228337526 | | | |
| 1 | 240808285- | CCAGCA-CTTGCCCCAGCAGAGG | 476 | RNA41 |
| | 240808307 | | | |
| 2 | 9138986- | CTCCCACCCTGGCCCAGCGGGGG | 477 | X40 |
| | 9139008 | | | |
| 2 | 11670027- | ACAGCACCTTGGCCCAGAGGCGA | 478 | X50 |
| | 11670049 | | | |
| 2 | 15561025- | ACGGCACCTTGGGCTAGCGGGGG | 479 | X50 |
| | 15561047 | | | |
| 2 | 42969964- | CCCGCACCCAGCTGCAGCCGAGG | 480 | X50 |
| | 42969986 | | | |
| 2 | 69112187- | CCAGCACC-TGGTGCAGAGTAGG | 481 | RNA41 |
| | 69112209 | | | |
| 2 | 71667395- | CCCACACCTGGGCCCAGTGGAGG | 482 | X40 |
| | 71667417 | | | |
| 2 | 72985325- | CCAGCACC-TGGTGCAGCTTAGG | 483 | RNA41 |
| | 72985347 | | | |
| 2 | 85317392- | TCCACACAATGGCACAGCAGAGG | 484 | X60 |
| | 85317414 | | | |
| 2 | 90356123- | CCCGCACC-TGGCTCAGAGGGTC | 485 | RNA41 |
| | 90356145 | | | |
| 2 | 91447288- | CCCGCACC-TGGCTCAGAGGGTC | 485 | RNA41 |
| | 91447310 | | | |
| 2 | 107914896- | CGGGCACCATGGCAGCAGCGGAGG | 486 | DNA31 |
| | 107914919 | | | |
| 2 | 110633933- | CGGGCACCATGGCAGCAGCGGAGG | 486 | DNA31 |
| | 110633956 | | | |
| 2 | 120922089- | CCCACACCATGGCCCAGTGAGAG | 487 | X60 |
| | 120922111 | | | |
| 2 | 127571237- | CCAGCACC-TGGCACAGTGAAGG | 488 | RNA41 |
| | 127571259 | | | |
| 2 | 132524147- | CCCACACATGGCCACAGCAGTGG | 489 | X60 |
| | 132524169 | | | |
| 2 | 179801496- | CTGGCACCTTAGCACAGAGGAGG | 490 | X50 |
| | 179801518 | | | |
| 2 | 182608809- | CCCGCACCAGAGCGCAGGGGGAG | 491 | X50 |
| | 182608831 | | | |
| 2 | 197360047- | GCCACACC-TGGCCCAGCAGGGG | 492 | RNA41 |
| | 197360069 | | | |
| 2 | 203642814- | CCCGCACCAGGGCGCAGATGGAG | 493 | X50 |
| | 203642836 | | | |
| 2 | 203866756- | TCCACACCTCAGCACAGCAGAGG | 494 | X60 |
| | 203866778 | | | |
| 2 | 219451287- | ACCGCACCTTGGCCCAGTGCTGG | 495 | X40 |
| | 219451309 | | | |
| 2 | 231686140- | ACCGCAGC-TGGCGCAGCATGGG | 496 | RNA41 |
| | 231686162 | | | |
| 3 | 3719723- | CCCGCACC-TGGCTCAGAGGGTC | 485 | RNA41 |
| | 3719745 | | | |
| 3 | 10287991- | CCCGCA-TTTGCCTCAGCGGTGG | 497 | RNA31 |
| | 10288013 | | | |
| 3 | 13178217- | CCAGCA-CTTGGCACAGCAGTGG | 498 | RNA31 |
| | 13178239 | | | |
| 3 | 14242673- | CCCACACCTTGGTGTCAGCGGAGG | 499 | DNA21 |
| | 14242696 | | | |
| 3 | 14819436- | CCTGCACC-CGGAGCAGCAGGGG | 500 | RNA41 |
| | 14819458 | | | |
| 3 | 38369509- | CCTCCACCTTGGCCCAGTGGAGG | 501 | X40 |
| | 38369531 | | | |
| 3 | 52005791- | CTCCCACCCTGGCGCAGAGGAGG | 502 | X40 |
| | 52005813 | | | |
| 3 | 54016522- | TCAGCACC-TGGTGCAGAGGAGG | 503 | RNA41 |
| | 54016544 | | | |
| 3 | 118171416- | CGAGCACCATGGCGCAGCCCCGG | 504 | X50 |
| | 118171438 | | | |
| 3 | 118171480- | CCCGCA-CTTGGAGCAGCCGGCG | 505 | RNA31 |
| | 118171502 | | | |
| 3 | 139288546- | GGAGCACCTTGACCCAGCAGAGG | 506 | X60 |
| | 139288568 | | | |
| 3 | 139677330- | CCAGCA-CTTAGCCCAGCAGCGG | 507 | RNA41 |
| | 139677352 | | | |
| 3 | 139731008- | CCCGCACCTCGGCACAGCTAGGG | 508 | X40 |
| | 139731030 | | | |
| 3 | 150408362- | GCCCCATCTTGGCCCAGCGGAGG | 509 | X40 |
| | 150408384 | | | |
| 3 | 182806878- | CTAGAACCATGGTGCAGAGGGGG | 510 | X60 |
| | 182806900 | | | |
| 4 | 1221653- | ATCCCACCTCGGCACAGCTGGGG | 511 | X60 |
| | 1221675 | | | |
| 4 | 1308120- | CCCGCACCGTGGTACAGCCTGTG | 512 | X60 |
| | 1308142 | | | |
| 4 | 6008382- | CCCGCACC-AGGCCCAGCTGGCG | 513 | RNA41 |
| | 6008404 | | | |
| 4 | 6747615- | CCCACACCTTGGTGCAGCTCTGT | 514 | X50 |
| | 6747637 | | | |
| 4 | 7054192- | ACCACACC-TGTCCCAGCGGAGG | 515 | RNA41 |
| | 7054214 | | | |
| 4 | 37229056- | CACACTACTTGGCACAGAGGAGG | 516 | X60 |
| | 37229078 | | | |
| 4 | 84244376- | ACCGCA-CTCAGAGCAGCGGAGG | 517 | RNA41 |
| | 84244398 | | | |
| 4 | 114598629- | TCCGCA-CTTGGCTCAGCGGGGC | 518 | RNA31 |
| | 114598651 | | | |
| 4 | 115179695- | CCCCGCACTCGGAGCAGCGGCGG | 519 | X60 |
| | 115179717 | | | |
| 4 | 139511785- | TCCGCACCCTGAGAGCAGTGGAGG | 520 | DNA41 |
| | 139511808 | | | |
| 4 | 141615591- | CCCTGCACTTGGTGCAGCTGGGG | 521 | X60 |
| | 141615613 | | | |
| 4 | 158623208- | ACCGCACC-TGACCCAGTGGTGG | 522 | RNA41 |
| | 158623230 | | | |
| 4 | 182110224- | CTCCTACCATGGCACAGCTGAGG | 523 | X60 |
| | 182110246 | | | |
| 5 | 767330- | CCCACACCAGGGCGCAGCTGAAG | 524 | X50 |
| | 767352 | | | |
| 5 | 1516550- | CCAGTACCTTGGCCCAGCTTTGG | 525 | X50 |
| | 1516572 | | | |
| 5 | 77203454- | ACAGCACC-TGGCACAGTGGTGG | 526 | RNA41 |
| | 77203476 | | | |
| 5 | 126364896- | CCCACACC-TGGAGCACCAGGGG | 527 | RNA41 |
| | 126364918 | | | |
| 5 | 126628420- | CAAGCACCTTGGCAGCAGCTGAGG | 528 | DNA31 |
| | 126628443 | | | |
| 5 | 173667321- | CCCATGCCTTAGCACAGCGATGG | 529 | X60 |
| | 173667343 | | | |
| 5 | 178526685- | CTCTATCCTTGGCCCAGCAGTGG | 530 | X60 |
| | 178526707 | | | |
| 6 | 3751269- | CCCGCACCTTGCCGCAGCGGCCC | 531 | X30 |
| | 3751291 | | | |
| 6 | 15092621- | ATGGCACCTTGGCACATCAGAGG | 532 | X60 |
| | 15092643 | | | |
| 6 | 16346963- | CCCCGCACTCGGAGCAGCGGCGG | 519 | X60 |
| | 16346985 | | | |
| 6 | 29016770- | TCCCCACACTGTCGCAGAGGAGG | 533 | X60 |
| | 29016792 | | | |
| 6 | 36310604- | CCAGCACCATGGCACAGAGAGGT | 534 | X60 |
| | 36310626 | | | |
| 6 | 44047493- | ACAGCACC-TGGCACAGAGGAGG | 535 | RNA41 |
| | 44047515 | | | |
| 6 | 47477658- | ACCGCACCTGGCAGCAGCCGTGG | 536 | X50 |
| | 47477680 | | | |
| 6 | 73315113- | CCAGCACC-TGGAGCAGCCGAGG | 537 | RNA31 |
| | 73315135 | | | |
| 6 | 138138382- | CCAGCACC-TGGCACAAAGGAGG | 538 | RNA41 |
| | 138138404 | | | |
| 6 | 139537177- | GAGGCACCTTGGACCAGCAGCGG | 539 | X60 |
| | 139537199 | | | |
| 6 | 148698322- | CCCGCA-CTTGGAGCAGCCGGTG | 540 | RNA31 |
| | 148698344 | | | |
| 6 | 153756217- | CCAGCA-CTTAGTGCAGCGCAGG | 541 | RNA41 |
| | 153756239 | | | |
| 6 | 165843913- | CCCACACC-TGGAGCAGCAGGAG | 542 | RNA41 |
| | 165843935 | | | |
| 7 | 93102- | CCCACACC-AGGCACGGCGGGGG | 543 | RNA41 |
| | 93124 | | | |
| 7 | 5360719- | CCCTCACC-AGCCGCAGCAGGGG | 544 | RNA41 |
| | 5360741 | | | |
| 7 | 24849083- | CACCCGACTTGGCGACAGCGGGGG | 545 | DNA41 |
| | 24849106 | | | |
| 7 | 74043103- | ACCGCACC-TGGCACAGAAGGGG | 546 | RNA41 |
| | 74043125 | | | |
| 7 | 84150566- | CCCGCACC-TGGCTCAGAGGGTC | 485 | RNA41 |
| | 84150588 | | | |
| 7 | 96041009- | ACCACACC-TGGCCCAGCAGTGG | 547 | RNA41 |
| | 96041031 | | | |
| 7 | 98765214- | CCCTCACC-GGGCACAGAGGAGG | 548 | RNA41 |
| | 98765236 | | | |
| 7 | 106882973- | CCAGTACC-TGGCCCAGAGGAGG | 549 | RNA41 |
| | 106882995 | | | |
| 7 | 123763164- | CCCGCACC-AGGCGCAGGTGGAG | 550 | RNA41 |
| | 123763186 | | | |
| 7 | 129225099- | CAGGCACCTTGGCGGCAGCCGCGG | 551 | DNA31 |
| | 129225122 | | | |
| 7 | 139596895- | TGTGCACCATGGCACAGCGGGGA | 552 | X60 |
| | 139596917 | | | |
| 7 | 147737806- | CCCGCACC-TGGCTCAGAGGGTC | 485 | RNA41 |
| | 147737828 | | | |
| 7 | 150737589- | CCCGCACACAGACGCAGAGCAGG | 553 | X60 |
| | 150737611 | | | |
| 7 | 153256176- | TCCACACC-TGGCCCAGCTGTGG | 554 | RNA41 |
| | 153256198 | | | |
| 7 | 155527865- | CCTGCAC--TGGCCCAGCAGCGG | 555 | RNA32 |
| | 155527887 | | | |
| 8 | 2485153- | CCTGCA-CTAGCCGCAACGGGGG | 556 | RNA41 |
| | 2485175 | | | |
| 8 | 26191893- | TGAGCACCTTGGGGCAGCTGGGG | 557 | X50 |
| | 26191915 | | | |
| 8 | 100957388- | CCCGCA-CTTGGCGCAGCTGGCC | 558 | RNA31 |
| | 100957410 | | | |
| 8 | 139813559- | CCAGCACCTTGGCAGCAGCACCGG | 559 | DNA31 |
| | 139813582 | | | |
| 8 | 142499068- | TCCCCCACTTGGCACAGCTGGGG | 560 | X60 |
| | 142499090 | | | |
| 8 | 143383198- | CCAGCA-CAGGGCGCAGAGGTGG | 561 | RNA41 |
| | 143383220 | | | |
| 9 | 33873295- | CCCACCCCTTAGCACAGCAATGG | 562 | X60 |
| | 33873317 | | | |
| 9 | 34958979- | CCCACACCGTGGCCCAGAGGTGG | 563 | X40 |
| | 34959001 | | | |
| 9 | 109123571- | CCAGCACC-TGGCACAGCATAGG | 564 | RNA41 |
| | 109123593 | | | |
| 9 | 137012994- | ACCACTACCTGGCCCAGCGGTGG | 565 | X60 |
| | 137013016 | | | |
| 9 | 137167999- | TCCGCACCTTGGTCCAGCAGGGG | 566 | X40 |
| | 137168021 | | | |
| 9 | 137477162- | TACGCACC-TGGCTCAGCAGAGG | 567 | RNA41 |
| | 137477184 | | | |
| 10 | 1572578- | AGCCCAGCATGGCGCAGAGGTGG | 568 | X60 |
| | 1572600 | | | |
| 10 | 5824416- | CCAGCACC-TGGCACAGAGGAGA | 569 | RNA41 |
| | 5824438 | | | |
| 10 | 16285410- | ACCGCACC-TGGCCCAGATGGGG | 570 | RNA41 |
| | 16285432 | | | |
| 10 | 20297215- | CCCGCACC-TGGCTCAGAGGGGT | 571 | RNA31 |
| | 20297237 | | | |
| 10 | 21126683- | ACCGCACC-TGGCCCAGTGGAGG | 572 | RNA31 |
| | 21126705 | | | |
| 10 | 28839554- | CCCACATCCTGGCCCAGCAGGGG | 573 | X50 |
| | 28839576 | | | |
| 10 | 47223533- | CCTGCACC-AGGCTCAGTGGGGG | 574 | RNA41 |
| | 47223555 | | | |
| 10 | 59089166- | CGAGCACCTTGGCAGCAGCTGAGG | 575 | DNA31 |
| | 59089189 | | | |
| 10 | 60958888- | ACCGCACC-TGGCCCAGAGTAGG | 576 | RNA41 |
| | 60958910 | | | |
| 10 | 88036335- | ACAGCACC-TGGCGCAGAGCGGG | 577 | RNA41 |
| | 88036357 | | | |
| 10 | 97031490- | ACTCCACCATGGCACAGCGTGGG | 578 | X60 |
| | 97031512 | | | |
| 10 | 111259337- | ACCACACC-TGGCCCAGAGGAGG | 579 | RNA41 |
| | 111259359 | | | |
| 10 | 122572126- | GCGGCACCTTGGCCCAGCGTGGG | 580 | X40 |
| | 122572148 | | | |
| 10 | 130560773- | CCTGCACCTGAGCACAGAGGAGG | 581 | X50 |
| | 130560795 | | | |
| 11 | 2916587- | CCCGCACCCT-GTGCAGCCGAGG | 582 | RNA31 |
| | 2916609 | | | |
| 11 | 10630862- | CCCAC-TCTTGGCACAGGGGAGG | 583 | RNA41 |
| | 10630884 | | | |
| 11 | 18729719- | CCCGCACC-AGGTGCAGGAGTGG | 584 | RNA41 |
| | 18729741 | | | |
| 11 | 47350413- | ACCGCACC-TGGCCCAGCAAAGG | 585 | RNA41 |
| | 47350435 | | | |
| 11 | 47941203- | GCTGCACCTTAGCACAGTGAAGG | 586 | X60 |
| | 47941225 | | | |
| 11 | 57761981- | TCAGCACCTTGGCGAAGCCTTGG | 587 | X50 |
| | 57762003 | | | |
| 11 | 72870610- | ACCGCACC-TGGCCCAAAGGGGG | 588 | RNA41 |
| | 72870632 | | | |
| 11 | 76659109- | CCCTCACCCTGGCACAGCCGGGG | 589 | X40 |
| | 76659131 | | | |
| 11 | 117692097- | TTCACACCTTGGTGCAGAGGTGA | 590 | X60 |
| | 117692119 | | | |
| 11 | 121325368- | CCAGCACC-TAGCGCAGCGGCTG | 591 | RNA31 |
| | 121325390 | | | |
| 11 | 129981605- | ACCGCACC-TGGCCCATCAGGGG | 592 | RNA41 |
| | 129981627 | | | |
| 12 | 3851459- | CCCGCACC-TGGCTCAGCGGGTC | 593 | RNA31 |
| | 3851481 | | | |
| 12 | 32850805- | TCAGCACC-TGGAGCAGCCGAGG | 594 | RNA41 |
| | 32850827 | | | |
| 12 | 48000120- | CCCCACCCTTGGTGCAGAGGAGG | 595 | X50 |
| | 48000142 | | | |
| 12 | 53328526- | CATACACCTTGCCGCAGCCAGGG | 596 | X60 |
| | 53328548 | | | |
| 12 | 54190321- | CACACACCTTAGCACAGCCAAGG | 597 | X60 |
| | 54190343 | | | |
| 12 | 65971780- | CTAGCACC-TGGCACAGTGGTGG | 598 | RNA41 |
| | 65971802 | | | |
| 12 | 95590363- | ACCGTACC-TGGCCCAGAGGAGG | 599 | RNA41 |
| | 95590385 | | | |
| 12 | 106690762- | GCCCCACCTTAATGCAGCGGGGG | 600 | X50 |
| | 106690784 | | | |
| 12 | 114491014- | CCAGCTACATGGCCCAGAGGAGG | 601 | X60 |
| | 114491036 | | | |
| 12 | 127431260- | CCCACACCAT-GCGCAGAGTGGG | 602 | RNA41 |
| | 127431282 | | | |
| 13 | 25788073- | CCCGCACCCAGGC-CAGCTGTGG | 603 | RNA31 |
| | 25788095 | | | |
| 13 | 69424400- | CCAGCACC-TGCTGCAGCGATGG | 604 | RNA41 |
| | 69424422 | | | |
| 13 | 85917572- | CCCGCACC-TGGCTCAGAGGGTC | 485 | RNA41 |
| | 85917594 | | | |
| 13 | 98388403- | TCCGCACCTTGGCCCAGTTGAAG | 605 | X50 |
| | 98388425 | | | |
| 14 | 20813343- | ACAGCACCTTGGCAGCAGAGGTGG | 606 | DNA31 |
| | 20813366 | | | |
| 14 | 24408232- | CCCGCACC-AGGCTCAGCAGCAG | 607 | RNA41 |
| | 24408254 | | | |
| 14 | 38663021- | CCAGCACC-TGGCACAGCCAGGG | 608 | RNA41 |
| | 38663043 | | | |
| 14 | 65250553- | GCTGCACCCTGCCACAGAGGAGG | 609 | X60 |
| | 65250575 | | | |
| 14 | 89310097- | CCAGCACCCTAGTGCAGAGTGGG | 610 | X60 |
| | 89310119 | | | |
| 14 | 90554536- | CCCGCACC-TGGCACAGCACCAG | 611 | RNA41 |
| | 90554558 | | | |
| 14 | 100213915- | CCCG-ACCCTGACGCAGCCTGGG | 612 | RNA41 |
| | 100213937 | | | |
| 14 | 101153383- | CCCGCACCCTATCACAGCAGAGG | 613 | X50 |
| | 101153405 | | | |
| 14 | 102929418- | CTCGCACC-AGGCGCAGCCGTGG | 614 | RNA31 |
| | 102929440 | | | |
| 15 | 42252041- | CCCGCACC-TGGCTCAGCGGGTC | 593 | RNA31 |
| | 42252063 | | | |
| 15 | 47827093- | CATGTACCTTGCCACAGCAGGGG | 615 | X60 |
| | 47827115 | | | |
| 15 | 69452825- | CGAGCACCTTGGCGGCAGCTGAGG | 616 | DNA31 |
| | 69452848 | | | |
| 15 | 86059010- | TCCACACCTAGGCACAGCCTAGG | 617 | X60 |
| | 86059032 | | | |
| 15 | 94089230- | CCAGCACCAAGGCTCAGCTGAGG | 618 | X50 |
| | 94089252 | | | |
| 15 | 99993270- | ACCGCACC-TGGCACATTGGAGG | 619 | RNA41 |
| | 99993292 | | | |
| 16 | 1003178- | CCCACACCTTGGCCCAGCCCTGG | 620 | X40 |
| | 1003200 | | | |
| 16 | 2092489- | GCCGCACC-TGCCGCAGCCGTGG | 621 | RNA31 |
| | 2092511 | | | |
| 16 | 3089598- | CCCGCA-CTGGGTGCAGTGGTGG | 622 | RNA31 |
| | 3089620 | | | |
| 16 | 14882693- | CCCACACCCAGGTGCAGCGGCAG | 623 | X50 |
| | 14882715 | | | |
| 16 | 16097875- | CCAGCACC-TGGCACAGCAGGTG | 624 | RNA41 |
| | 16097897 | | | |
| 16 | 16281338- | CCCACACCCAGGTGCAGCGGCAG | 623 | X50 |
| | 16281360 | | | |
| 16 | 18430777- | CCCACACCCAGGTGCAGCGGCAG | 623 | X50 |
| | 18430799 | | | |
| 16 | 18513312- | CCCACACCCAGGTGCAGCGGCAG | 623 | X50 |
| | 18513334 | | | |
| 16 | 21358246- | CCCGCATCTTGGTGCAGCTGCTT | 625 | X50 |
| | 21358268 | | | |
| 16 | 28383449- | ACCGCACCATGGTGCAGCTGGGC | 626 | X50 |
| | 28383471 | | | |
| 16 | 28731839- | ACCGCACCATGGTGCAGCTGGGC | 626 | X50 |
| | 28731861 | | | |
| 16 | 29792483- | CCAACACC-TGGCGCAGAGTAGG | 627 | RNA41 |
| | 29792505 | | | |
| 16 | 29863301- | CTCGTACCAAAGCGCAGAGGAGG | 628 | X60 |
| | 29863323 | | | |
| 16 | 30783356- | CCCGCA-CTCGGTGCAGCGGTAT | 629 | RNA41 |
| | 30783378 | | | |
| 16 | 31081352- | CCCGCA-CTGGGTGCAGCGGAAG | 630 | RNA31 |
| | 31081374 | | | |
| 16 | 31436901- | GCCGCA-CTTGGCGCAGCTGTGG | 631 | RNA21 |
| | 31436923 | | | |
| 16 | 67748649- | CTAACACCTTGGTGCAGAGGTGG | 632 | X50 |
| | 67748671 | | | |
| 16 | 78768901- | CCTACACCATGGCGCAGCGTCAG | 633 | X50 |
| | 78768923 | | | |
| 16 | 81278358- | CCAGCACC-TGGCACATCGGTGG | 634 | RNA31 |
| | 81278380 | | | |
| 16 | 88044071- | CCCGCATCTTGGTGCAGCTGCTT | 625 | X50 |
| | 88044093 | | | |
| 16 | 88839686- | CCCGCA-CATGGTGCAGTGGCTG | 635 | RNA41 |
| | 88839708 | | | |
| 17 | 7223899- | CCCAC-CCCTGGCCCAGCCGAGG | 636 | RNA41 |
| | 7223921 | | | |
| 17 | 7462659- | TGCACACCTTGGCGCAGTGGGGG | 637 | X40 |
| | 7462681 | | | |
| 17 | 7511796- | CCAGCACC-TGGCACAGGGGAGG | 638 | RNA31 |
| | 7511818 | | | |
| 17 | 19391599- | CCCACACC-AGGCACAGAGGAGG | 639 | RNA41 |
| | 19391621 | | | |
| 17 | 26736056- | CCCGCACC-TGGCTCAGAGGGTC | 485 | RNA41 |
| | 26736078 | | | |
| 17 | 28662198- | GTAGCACGTTGACGCAGCAGCGG | 640 | X60 |
| | 28662220 | | | |
| 17 | 38870195- | GCCGCACC-GGGCGCAGTTGGGG | 641 | RNA41 |
| | 38870217 | | | |
| 17 | 45753295- | CCCACACC-TGCCCCAGAGGTGG | 642 | RNA41 |
| | 45753317 | | | |
| 17 | 45993823- | CCCACAGC-TGGCCCAGCAGGGG | 643 | RNA41 |
| | 45993845 | | | |
| 17 | 63929863- | TCAGCACCTTGGCACAGCTGAAG | 644 | X50 |
| | 63929885 | | | |
| 17 | 79154410- | ACAGCACCTCGGTGCAGCAGAGA | 645 | X60 |
| | 79154432 | | | |
| 17 | 81131740- | CCCTC-CCATGGCGCAGCTTCGG | 646 | RNA41 |
| | 81131762 | | | |
| 18 | 3448410- | CCCGCACC-GGGCGCAGCAGCTG | 647 | RNA31 |
| | 3448432 | | | |
| 18 | 39380982- | CATGCTACATGGCGCAGCGGTAG | 648 | X60 |
| | 39381004 | | | |
| 18 | 58247634- | CTCGCACCCGAACGCAGCAGAGG | 649 | X60 |
| | 58247656 | | | |
| 18 | 59917417- | TCCCCACCCCAGCGCAGCAGAGG | 650 | X60 |
| | 59917439 | | | |
| 18 | 78993257- | CGAAGACCTTGGCGCAGAAGCGG | 651 | X60 |
| | 78993279 | | | |
| 19 | 1104611- | CCCGCACCTTGGCCTAGCGCGGT | 652 | X40 |
| | 1104633 | | | |
| 19 | 1274125- | TCTGCACCTTGGCGCAGCTGGAG | 653 | X40 |
| | 1274147 | | | |
| 19 | 2209581- | CTCCCACCTTAAAGCAGCGGTGG | 654 | X50 |
| | 2209603 | | | |
| 19 | 5543277- | ACCGCACC-TGGCCCAGAGTGGG | 655 | RNA41 |
| | 5543299 | | | |
| 19 | 6431799- | CCCCCACCTTGGCCCAGCGTTGG | 656 | X30 |
| | 6431821 | | | |
| 19 | 10872441- | GCCACACC-TCGCACAGCGGTGG | 657 | RNA41 |
| | 10872463 | | | |
| 19 | 11391283- | ACCACACCTTGCTGCAGAGGAGG | 658 | X50 |
| | 11391305 | | | |
| 19 | 11406443- | CCCGCA-GAGGGCGCAGCGGCTG | 659 | RNA41 |
| | 11406465 | | | |
| 19 | 12747607- | CCAGCAC--TGGCTCAGCAGAGG | 660 | RNA32 |
| | 12747629 | | | |
| 19 | 36110180- | ACCGCACC-TGGCCCAAAGGGGG | 588 | RNA41 |
| | 36110202 | | | |
| 19 | 46709648- | ACCGCACC-CGGCCCAGTGGAGG | 661 | RNA41 |
| | 46709670 | | | |
| 19 | 49720095- | CCTGCACTCAGGCGCAGACGGGG | 662 | X60 |
| | 49720117 | | | |
| 19 | 50490618- | GCTGCACCTTGGCACAGTGGAGG | 663 | X40 |
| | 50490640 | | | |
| 19 | 51068476- | CCCACACCCAGGCCCAGAGGAGG | 664 | X50 |
| | 51068498 | | | |
| 19 | 51606728- | CCTGCACCT--GCACAGCAGGGG | 665 | RNA32 |
| | 51606750 | | | |
| 19 | 53775475- | CGAGCACCTTGGCAGCAGCTGAGG | 575 | DNA31 |
| | 53775498 | | | |
| 19 | 56088833- | CTCGCACC-TGGTGCAGCACCGG | 666 | RNA41 |
| | 56088855 | | | |
| 20 | 13900645- | GCCGCAC--AGGCACAGCGGCGG | 667 | RNA32 |
| | 13900667 | | | |
| 20 | 23109029- | TCAGCACCTTGGCACATCCAGGG | 668 | X60 |
| | 23109051 | | | |
| 20 | 31859435- | CCTGCACCTTTGCACAGCACTGG | 669 | X50 |
| | 31859457 | | | |
| 20 | 45967752- | CCCGCA-TGTGGCGCAGCAGTGT | 670 | RNA41 |
| | 45967774 | | | |
| 20 | 49558961- | CCCAGCACTTGGTGAAGCGGAGG | 671 | X60 |
| | 49558983 | | | |
| 21 | 37176555- | CCCACAC--TGGTGCAGAGGTGG | 672 | RNA32 |
| | 37176577 | | | |
| 22 | 22912001- | CCTGCACCATGGTGCACCGGCAG | 673 | X50 |
| | 22912023 | | | |
| 22 | 25849024- | CCCGCAC--AGCCGCAGAGGAGG | 674 | RNA32 |
| | 25849046 | | | |
| 22 | 27735501- | ACCGCACC-TGGCACAGCTTGGG | 675 | RNA41 |
| | 27735523 | | | |
| 22 | 49971621- | CCCACACCCTGGCCCAGCCTCGG | 676 | X50 |
| | 49971643 | | | |
| X | 1842130- | CCAGCACTTTGGTACAGCATAGG | 677 | X60 |
| | 1842152 | | | |
| X | 23566446- | CCCGCACC-TGGCTCAGAGGGGT | 571 | RNA31 |
| | 23566468 | | | |
| X | 50814798- | CCCGCACCCTGGCTCAGTGTTGG | 678 | X40 |
| | 50814820 | | | |
| X | 76172984- | CCCGCAC--AGGCGCAGAGGTGG | 679 | RNA22 |
| | 76173006 | | | |
| X | 83385071- | CCAGCACC-TGGTCCAGTGGAGG | 680 | RNA41 |
| | 83385093 | | | |
| X | 107536875- | CCAGCACC-TGGCACAGAGTAGG | 681 | RNA41 |
| | 107536897 | | | |

TABLE 11
PCSK9 gRNA GA346 off-target site validation in human primary hepatocytes

| | Lot #: | STL | HLY | JLP | STL | HLY | JLP | Average | Average | Net |
|---|---|---|---|---|---|---|---|---|---|---|
| Chromosome | Location | Treated | Treated | Treated | Control | Control | Control | treated | untreated | Editing |
| 1 | 55040029- | 42.18 | 49.76 | 78.54 | 0.13 | 0.19 | 0.03 | 56.83 | 0.12 | 56.71 |
| | 55040051 | | | | | | | | | |
| 1 | 54256943- | 0 | 0.07 | 0.04 | 0.1 | 0 | 0.03 | 0.04 | 0.04 | −0.01 |
| | 54256966 | | | | | | | | | |
| 1 | 22256342- | 0 | 0 | 0.02 | 0 | 0.07 | 0.02 | 0.01 | 0.03 | −0.02 |
| | 22256365 | | | | | | | | | |
| 1 | 10640222- | 0 | 0 | 0 | 0 | 0.04 | 0 | 0.00 | 0.01 | −0.01 |
| | 10640244 | | | | | | | | | |
| 1 | 6888039- | 0 | 0 | 0.03 | 0.03 | 0.05 | 0.03 | 0.01 | 0.04 | −0.03 |
| | 6888061 | | | | | | | | | |
| 1 | 60335313- | 0 | 0.02 | 0.01 | 0.03 | 0 | 0.02 | 0.01 | 0.02 | −0.01 |
| | 60335335 | | | | | | | | | |
| 1 | 64198527- | 0 | 0.07 | 0 | 0.02 | 0.06 | 0 | 0.02 | 0.03 | 0.00 |
| | 64198549 | | | | | | | | | |
| 1 | 64266524- | 0 | 0.04 | 0.05 | 0.02 | 0 | 0.05 | 0.03 | 0.02 | 0.01 |
| | 64266546 | | | | | | | | | |
| 1 | 121262583- | 0.02 | 0.04 | 0.05 | 0.02 | 0 | 0.04 | 0.04 | 0.02 | 0.02 |
| | 121262605 | | | | | | | | | |
| 1 | 20712184- | 0.05 | 0.05 | 0.03 | 0.03 | 0.06 | 0.06 | 0.04 | 0.05 | −0.01 |
| | 20712206 | | | | | | | | | |
| 1 | 240808285- | 0.06 | 0.03 | 0.01 | 0 | 0.06 | 0.02 | 0.03 | 0.03 | 0.01 |
| | 240808307 | | | | | | | | | |
| 1 | 145017699- | 0.05 | 0.05 | 0.08 | 0.07 | 0.14 | 0.05 | 0.06 | 0.09 | −0.03 |
| | 145017721 | | | | | | | | | |
| 1 | 155615561- | 0 | 0.04 | 0.01 | 0 | 0.05 | 0.03 | 0.02 | 0.03 | −0.01 |
| | 155615583 | | | | | | | | | |
| 1 | 155751756- | 0.02 | 0 | 0.06 | 0.01 | 0.09 | 0.07 | 0.03 | 0.06 | −0.03 |
| | 155751778 | | | | | | | | | |
| 1 | 206281058- | 0 | 0.08 | 0.08 | 0.02 | 0.07 | 0 | 0.05 | 0.03 | 0.02 |
| | 206281080 | | | | | | | | | |
| 1 | 208574946- | 0 | 0 | 0 | 0 | 0 | 0.05 | 0.00 | 0.02 | −0.02 |
| | 208574968 | | | | | | | | | |
| 1 | 15101074- | 0 | 0 | 0.05 | 0.02 | 0.06 | 0 | 0.02 | 0.03 | −0.01 |
| | 15101096 | | | | | | | | | |
| 1 | 25103342- | 0.06 | 0 | 0.03 | 0.03 | 0.03 | 0 | 0.03 | 0.02 | 0.01 |
| | 25103364 | | | | | | | | | |
| 1 | 29882027- | 0.03 | 0 | 0.04 | 0.05 | 0 | 0 | 0.02 | 0.02 | 0.01 |
| | 29882049 | | | | | | | | | |
| 1 | 40866872- | 0 | 0 | 0.05 | 0.02 | 0 | 0 | 0.02 | 0.01 | 0.01 |
| | 40866894 | | | | | | | | | |
| 1 | 43692630- | 0 | 0 | 0 | 0.02 | 0.04 | 0.01 | 0.00 | 0.02 | −0.02 |
| | 43692652 | | | | | | | | | |
| 1 | 44163492- | 0 | 0 | 0 | 0 | 0 | 0.03 | 0.00 | 0.01 | −0.01 |
| | 44163514 | | | | | | | | | |
| 1 | 110096163- | 0 | 0 | 0.02 | 0.03 | 0 | 0.03 | 0.01 | 0.02 | −0.01 |
| | 110096185 | | | | | | | | | |
| 1 | 157194781- | 0 | 0 | 0.03 | 0 | 0 | 0 | 0.01 | 0.00 | 0.01 |
| | 157194803 | | | | | | | | | |
| 1 | 163263975- | 0 | 0 | 0 | 0 | 0 | 0 | 0.00 | 0.00 | 0.00 |
| | 163263997 | | | | | | | | | |
| 1 | 175575740- | 0 | 0.05 | 0.06 | 0.07 | 0 | 0 | 0.04 | 0.02 | 0.01 |
| | 175575762 | | | | | | | | | |
| 1 | 204314754- | 0 | 0.08 | 0.04 | 0.04 | 0.02 | 0.06 | 0.04 | 0.04 | 0.00 |
| | 204314776 | | | | | | | | | |
| 1 | 228337504- | 0.02 | 0 | 0.01 | 0.05 | 0.05 | 0.01 | 0.01 | 0.04 | −0.03 |
| | 228337526 | | | | | | | | | |
| 2 | 107914896- | 0.04 | 0 | 0 | 0.11 | 0 | 0 | 0.01 | 0.04 | −0.02 |
| | 107914919 | | | | | | | | | |
| 2 | 110633933- | 0 | 0 | 0.02 | 0.03 | 0 | 0.06 | 0.01 | 0.03 | −0.02 |
| | 110633956 | | | | | | | | | |
| 2 | 69112187- | 0 | 0 | 0 | 0 | 0.07 | 0 | 0.00 | 0.02 | −0.02 |
| | 69112209 | | | | | | | | | |
| 2 | 72985325- | 0.03 | 0 | 0 | 0.01 | 0 | 0.05 | 0.01 | 0.02 | −0.01 |
| | 72985347 | | | | | | | | | |
| 2 | 90356123- | 0.05 | 0 | 0 | 0.01 | 0 | 0 | 0.02 | 0.00 | 0.01 |
| | 90356145 | | | | | | | | | |
| 2 | 127571237- | 0.03 | 0.04 | 0.01 | 0 | 0.04 | 0.02 | 0.03 | 0.02 | 0.01 |
| | 127571259 | | | | | | | | | |
| 2 | 197360047- | 0 | 0.04 | 0 | 0 | 0 | 0.05 | 0.01 | 0.02 | 0.00 |
| | 197360069 | | | | | | | | | |
| 2 | 231686140- | 0.05 | 0.12 | 0 | 0.02 | 0 | 0 | 0.06 | 0.01 | 0.05 |
| | 231686162 | | | | | | | | | |
| 2 | 9138986- | 96.7 | 99.46 | 96.44 | 97.34 | 99.52 | 96.8 | 97.53 | 97.89 | −0.35 |
| | 9139008 | | | | | | | | | |
| 2 | 11670027- | 0.03 | 0 | 0.02 | 0 | 0 | 0.11 | 0.02 | 0.04 | −0.02 |
| | 11670049 | | | | | | | | | |
| 2 | 15561025- | 0 | 0 | 0 | 0.06 | 0.06 | 0.06 | 0.00 | 0.06 | −0.06 |
| | 15561047 | | | | | | | | | |
| 2 | 42969964- | 0.03 | 0 | 0.04 | 0.05 | 0.08 | 0.03 | 0.02 | 0.05 | −0.03 |
| | 42969986 | | | | | | | | | |
| 2 | 71667395- | 0 | 0.04 | 0.02 | 0.05 | 0.08 | 0 | 0.02 | 0.04 | −0.02 |
| | 71667417 | | | | | | | | | |
| 2 | 85317392- | 0.02 | 0.06 | 0 | 0.01 | 0 | 0.03 | 0.03 | 0.01 | 0.01 |
| | 85317414 | | | | | | | | | |
| 2 | 120922089- | 0.03 | 0.03 | 0.03 | 0.01 | 0 | 0.05 | 0.03 | 0.02 | 0.01 |
| | 120922111 | | | | | | | | | |
| 2 | 132524147- | 0 | 0.05 | 0 | 0.06 | 0.08 | 0.08 | 0.02 | 0.07 | −0.06 |
| | 132524169 | | | | | | | | | |
| 2 | 179801496- | 0.03 | 0.04 | 0 | 0.01 | 0 | 0.01 | 0.02 | 0.01 | 0.02 |
| | 179801518 | | | | | | | | | |
| 2 | 182608809- | 0 | 0 | 0.09 | 0.14 | 0 | 0 | 0.03 | 0.05 | −0.02 |
| | 182608831 | | | | | | | | | |
| 2 | 203866756- | 0.02 | 0.11 | 0.04 | 0 | 0.04 | 0.01 | 0.06 | 0.02 | 0.04 |
| | 203866778 | | | | | | | | | |
| 2 | 219451287- | 0 | 0 | 0.02 | 0 | 0.08 | 0.02 | 0.01 | 0.03 | −0.03 |
| | 219451309 | | | | | | | | | |
| 3 | 14242673- | 0.03 | 0 | 0 | 0.04 | 0 | 0.01 | 0.01 | 0.02 | −0.01 |
| | 14242696 | | | | | | | | | |
| 3 | 10287991- | 0 | 0 | 0 | 0 | 0 | 0.06 | 0.00 | 0.02 | −0.02 |
| | 10288013 | | | | | | | | | |
| 3 | 13178217- | 0.03 | 0 | 0.02 | 0.03 | 0.03 | 0.01 | 0.02 | 0.02 | −0.01 |
| | 13178239 | | | | | | | | | |
| 3 | 118171480- | 0 | 0 | 0 | 0.05 | 0 | 0 | 0.00 | 0.02 | −0.02 |
| | 118171502 | | | | | | | | | |
| 3 | 14819436- | 0.02 | 0 | 0 | 0.01 | 0 | 0.03 | 0.01 | 0.01 | −0.01 |
| | 14819458 | | | | | | | | | |
| 3 | 54016522- | 0.06 | 0 | 0 | 0.01 | 0.05 | 0 | 0.02 | 0.02 | 0.00 |
| | 54016544 | | | | | | | | | |
| 3 | 139677330- | 0 | 0 | 0 | 0.06 | 0 | 0.03 | 0.00 | 0.03 | −0.03 |
| | 139677352 | | | | | | | | | |
| 3 | 38369509- | 0.03 | 0 | 0 | 0 | 0 | 0 | 0.01 | 0.00 | 0.01 |
| | 38369531 | | | | | | | | | |
| 3 | 52005791- | 0.03 | 0 | 0.04 | 0 | 0 | 0.02 | 0.02 | 0.01 | 0.02 |
| | 52005813 | | | | | | | | | |
| 3 | 118171416- | 0.15 | 0.06 | 0 | 0 | 0 | 0.03 | 0.07 | 0.01 | 0.06 |
| | 118171438 | | | | | | | | | |
| 3 | 139288546- | 0 | 0.02 | 0.04 | 0.03 | 0 | 0 | 0.02 | 0.01 | 0.01 |
| | 139288568 | | | | | | | | | |
| 3 | 139731008- | 0 | 0.02 | 0.07 | 0.03 | 0 | 0 | 0.03 | 0.01 | 0.02 |
| | 139731030 | | | | | | | | | |
| 3 | 150408362- | 0 | 0 | 0.04 | 0 | 0 | 0.04 | 0.01 | 0.01 | 0.00 |
| | 150408384 | | | | | | | | | |
| 3 | 182806878- | 0.09 | 0 | 0.04 | 0 | 0 | 0.05 | 0.04 | 0.02 | 0.03 |
| | 182806900 | | | | | | | | | |
| 4 | 139511785- | 0 | 0 | 0 | 0.03 | 0 | 0.03 | 0.00 | 0.02 | −0.02 |
| | 139511808 | | | | | | | | | |
| 4 | 84244376- | 0.03 | 0 | 0.05 | 0.06 | 0 | 0.01 | 0.03 | 0.02 | 0.00 |
| | 84244398 | | | | | | | | | |
| 4 | 114598629- | 0 | 0 | 0.02 | 0 | 0 | 0 | 0.01 | 0.00 | 0.01 |
| | 114598651 | | | | | | | | | |
| 4 | 6008382- | 0 | 0 | 0.04 | 0 | 0 | 0.12 | 0.01 | 0.04 | −0.03 |
| | 6008404 | | | | | | | | | |
| 4 | 7054192- | 0.14 | 0.02 | 0 | 0.02 | 0.07 | 0.01 | 0.05 | 0.03 | 0.02 |
| | 7054214 | | | | | | | | | |
| 4 | 158623208- | 0 | 0 | 0.12 | 0 | 0 | 0 | 0.04 | 0.00 | 0.04 |
| | 158623230 | | | | | | | | | |
| 4 | 1221653- | 0.05 | 0 | 0.01 | 0.03 | 0 | 0.05 | 0.02 | 0.03 | −0.01 |
| | 1221675 | | | | | | | | | |
| 4 | 1308120- | 0.03 | 0 | 0.02 | 0 | 0 | 0 | 0.02 | 0.00 | 0.02 |
| | 1308142 | | | | | | | | | |
| 4 | 6747615- | 0.03 | 0 | 0.05 | 0.02 | 0 | 0.04 | 0.03 | 0.02 | 0.01 |
| | 6747637 | | | | | | | | | |
| 4 | 37229056- | 0.03 | 0.02 | 0 | 0.05 | 0 | 0.05 | 0.02 | 0.03 | −0.02 |
| | 37229078 | | | | | | | | | |
| 4 | 115179695- | 0 | 0 | 0 | 0 | 0 | 0 | 0.00 | 0.00 | 0.00 |
| | 115179717 | | | | | | | | | |
| 4 | 141615591- | 0 | 0 | 0.05 | 0 | 0 | 0 | 0.02 | 0.00 | 0.02 |
| | 141615613 | | | | | | | | | |
| 4 | 182110224- | 0.04 | 0 | 0.05 | 0.05 | 0.06 | 0.02 | 0.03 | 0.04 | −0.01 |
| | 182110246 | | | | | | | | | |
| 5 | 126628420- | 0.03 | 0.07 | 0 | 0.05 | 0 | 0 | 0.03 | 0.02 | 0.02 |
| | 126628443 | | | | | | | | | |
| 5 | 77203454- | 0.06 | 0 | 0.07 | 0.1 | 0 | 0.05 | 0.04 | 0.05 | −0.01 |
| | 77203476 | | | | | | | | | |
| 5 | 126364896- | 0.03 | 0 | 0 | 0 | 0 | 0 | 0.01 | 0.00 | 0.01 |
| | 126364918 | | | | | | | | | |
| 5 | 767330- | 0.09 | 0.04 | 0.05 | 0.03 | 0.06 | 0.04 | 0.06 | 0.04 | 0.02 |
| | 767352 | | | | | | | | | |
| 5 | 1516550- | 0 | 0.06 | 0 | 0 | 0 | 0.03 | 0.02 | 0.01 | 0.01 |
| | 1516572 | | | | | | | | | |
| 5 | 173667321- | 0.02 | 0 | 0.01 | 0.03 | 0.04 | 0.02 | 0.01 | 0.03 | −0.02 |
| | 173667343 | | | | | | | | | |
| 5 | 178526685- | 0 | 0 | 0 | 0 | 0.03 | 0.03 | 0.00 | 0.02 | −0.02 |
| | 178526707 | | | | | | | | | |
| 6 | 44047493- | 0.06 | 0.02 | 0.04 | 0.09 | 0 | 0.05 | 0.04 | 0.05 | −0.01 |
| | 44047515 | | | | | | | | | |
| 6 | 73315113- | 0 | 0 | 0 | 0.07 | 0.04 | 0 | 0.00 | 0.04 | −0.04 |
| | 73315135 | | | | | | | | | |
| 6 | 148698322- | 0 | 0 | 0.13 | 0.07 | 0 | 0.11 | 0.04 | 0.06 | −0.02 |
| | 148698344 | | | | | | | | | |
| 6 | 153756217- | 0 | 0 | 0.01 | 0.07 | 0.11 | 0 | 0.00 | 0.06 | −0.06 |
| | 153756239 | | | | | | | | | |
| 6 | 138138382- | 0.06 | 0 | 0 | 0.04 | 0 | 0.03 | 0.02 | 0.02 | 0.00 |
| | 138138404 | | | | | | | | | |
| 6 | 165843913- | 0.03 | 0.07 | 0 | 0.05 | 0 | 0.03 | 0.03 | 0.03 | 0.01 |
| | 165843935 | | | | | | | | | |
| 6 | 3751269- | 0 | 0 | 0 | 0 | 0 | 0 | 0.00 | 0.00 | 0.00 |
| | 3751291 | | | | | | | | | |
| 6 | 15092621- | 0 | 0.03 | 0.02 | 0.01 | 0 | 0 | 0.02 | 0.00 | 0.01 |
| | 15092643 | | | | | | | | | |
| 6 | 16346963- | 0.07 | 0 | 0 | 0 | 0 | 0 | 0.02 | 0.00 | 0.02 |
| | 16346985 | | | | | | | | | |
| 6 | 29016770- | 0 | 0 | 0 | 0.02 | 0.08 | 0.02 | 0.00 | 0.04 | −0.04 |
| | 29016792 | | | | | | | | | |
| 6 | 36310604- | 0.06 | 0 | 0.06 | 0.01 | 0.1 | 0.09 | 0.04 | 0.07 | −0.03 |
| | 36310626 | | | | | | | | | |
| 6 | 47477658- | 0.2 | 0 | 0 | 0.07 | 0 | 0.03 | 0.07 | 0.03 | 0.03 |
| | 47477680 | | | | | | | | | |
| 6 | 139537177- | 0 | 0 | 0 | 0.03 | 0 | 0 | 0.00 | 0.01 | −0.01 |
| | 139537199 | | | | | | | | | |
| 7 | 24849083- | 0 | 0.05 | 0.06 | 0.03 | 0 | 0 | 0.04 | 0.01 | 0.03 |
| | 24849106 | | | | | | | | | |
| 7 | 129225099- | 0 | 0 | 0 | 0 | 0 | 0 | 0.00 | 0.00 | 0.00 |
| | 129225122 | | | | | | | | | |
| 7 | 93102- | 0.37 | 0 | 0.28 | 0.04 | 0 | 0.05 | 0.22 | 0.03 | 0.19 |
| | 93124 | | | | | | | | | |
| 7 | 5360719- | 0 | 0.03 | 0.07 | 0.02 | 0 | 0.1 | 0.03 | 0.04 | −0.01 |
| | 5360741 | | | | | | | | | |
| 7 | 74043103- | 0.1 | 0 | 0.07 | 0.04 | 0 | 0.04 | 0.06 | 0.03 | 0.03 |
| | 74043125 | | | | | | | | | |
| 7 | 96041009- | 0.17 | 0.09 | 0.03 | 0.03 | 0.11 | 0.11 | 0.10 | 0.08 | 0.01 |
| | 96041031 | | | | | | | | | |
| 7 | 98765214- | 0 | 0 | 0 | 0 | 0.05 | 0.03 | 0.00 | 0.03 | −0.03 |
| | 98765236 | | | | | | | | | |
| 7 | 106882973- | 0 | 0.12 | 0.02 | 0.09 | 0.05 | 0.02 | 0.05 | 0.05 | −0.01 |
| | 106882995 | | | | | | | | | |
| 7 | 123763164- | 0.08 | 0.29 | 0 | 0 | 0 | 0.13 | 0.12 | 0.04 | 0.08 |
| | 123763186 | | | | | | | | | |
| 7 | 147737806- | 0 | 44.29 | 0.19 | 0.11 | 43.85 | 0 | 14.83 | 14.65 | 0.17 |
| | 147737828 | | | | | | | | | |
| 7 | 153256176- | 0 | 0.05 | 0.04 | 0 | 0 | 0.03 | 0.03 | 0.01 | 0.02 |
| | 153256198 | | | | | | | | | |
| 7 | 155527865- | 0 | 0 | 0 | 0 | 0 | 0 | 0.00 | 0.00 | 0.00 |
| | 155527887 | | | | | | | | | |
| 7 | 139596895- | 0 | 0.03 | 0.03 | 0.03 | 0.03 | 0 | 0.02 | 0.02 | 0.00 |
| | 139596917 | | | | | | | | | |
| 7 | 150737589- | 0.05 | 0.13 | 0.05 | 0.01 | 0.05 | 0.18 | 0.08 | 0.08 | 0.00 |
| | 150737611 | | | | | | | | | |
| 8 | 139813559- | 0 | 0.06 | 0 | 0 | 0.06 | 0 | 0.02 | 0.02 | 0.00 |
| | 139813582 | | | | | | | | | |
| 8 | 2485153- | 0.05 | 0 | 0.03 | 0.03 | 0 | 0.06 | 0.03 | 0.03 | 0.00 |
| | 2485175 | | | | | | | | | |
| 8 | 100957388- | 0 | 0 | 0 | 0.03 | 0 | 0 | 0.00 | 0.01 | −0.01 |
| | 100957410 | | | | | | | | | |
| 8 | 143383198- | 0.02 | 0.11 | 0.04 | 0.11 | 0.09 | 0 | 0.06 | 0.07 | −0.01 |
| | 143383220 | | | | | | | | | |
| 8 | 26191893- | 0 | 0.06 | 0 | 0.02 | 0.13 | 0.02 | 0.02 | 0.06 | −0.04 |
| | 26191915 | | | | | | | | | |
| 8 | 142499068- | 0.03 | 0 | 0 | 0 | 0.08 | 0 | 0.01 | 0.03 | −0.02 |
| | 142499090 | | | | | | | | | |
| 9 | 137012994- | 0.05 | 0 | 0.07 | 0.02 | 0 | 0.03 | 0.04 | 0.02 | 0.02 |
| | 137013016 | | | | | | | | | |
| 9 | 137167999- | 0.03 | 0 | 0 | 0 | 0 | 0.03 | 0.01 | 0.01 | 0.00 |
| | 137168021 | | | | | | | | | |
| 9 | 109123571- | 0.03 | 0 | 0 | 0.02 | 0 | 0 | 0.01 | 0.01 | 0.00 |
| | 109123593 | | | | | | | | | |
| 9 | 137477162- | 0.05 | 0.06 | 0.02 | 0.02 | 0.03 | 0.05 | 0.04 | 0.03 | 0.01 |
| | 137477184 | | | | | | | | | |
| 9 | 33873295- | 0.05 | 0 | 0 | 0 | 0 | 0 | 0.02 | 0.00 | 0.02 |
| | 33873317 | | | | | | | | | |
| 9 | 34958979- | 0.1 | 0.03 | 0 | 0.01 | 0 | 0.01 | 0.04 | 0.01 | 0.04 |
| | 34959001 | | | | | | | | | |
| 10 | 28839554- | 0 | 0.18 | 0.08 | 0.11 | 0 | 0 | 0.09 | 0.04 | 0.05 |
| | 28839576 | | | | | | | | | |
| 10 | 59089166- | 0 | 0 | 0 | 0 | 0.06 | 0 | 0.00 | 0.02 | −0.02 |
| | 59089189 | | | | | | | | | |
| 10 | 97031490- | 0.1 | 0.12 | 0 | 0.01 | 0.03 | 0.09 | 0.07 | 0.04 | 0.03 |
| | 97031512 | | | | | | | | | |
| 10 | 122572126- | 0 | 0.05 | 0.03 | 0 | 0 | 0 | 0.03 | 0.00 | 0.03 |
| | 122572148 | | | | | | | | | |
| 10 | 130560773- | 0.03 | 0.02 | 0.03 | 0.02 | 0 | 0 | 0.03 | 0.01 | 0.02 |
| | 130560795 | | | | | | | | | |
| 10 | 5824416- | 0 | 0.09 | 0.01 | 0 | 0 | 0 | 0.03 | 0.00 | 0.03 |
| | 5824438 | | | | | | | | | |
| 10 | 16285410- | 0.08 | 0.09 | 0 | 0.05 | 0 | 0.03 | 0.06 | 0.03 | 0.03 |
| | 16285432 | | | | | | | | | |
| 10 | 20297215- | 0 | 0 | 0 | 0 | 0 | 0 | 0.00 | 0.00 | 0.00 |
| | 20297237 | | | | | | | | | |
| 10 | 21126683- | 0.08 | 0.09 | 0 | 0.05 | 0 | 0 | 0.06 | 0.02 | 0.04 |
| | 21126705 | | | | | | | | | |
| 10 | 47223533- | 0 | 0 | 0.02 | 0.03 | 0 | 0.03 | 0.01 | 0.02 | −0.01 |
| | 47223555 | | | | | | | | | |
| 10 | 60958888- | 0.1 | 0 | 0.12 | 0 | 0.14 | 0.03 | 0.07 | 0.06 | 0.02 |
| | 60958910 | | | | | | | | | |
| 10 | 88036335- | 0.03 | 0 | 0.02 | 0.02 | 0 | 0.02 | 0.02 | 0.01 | 0.00 |
| | 88036357 | | | | | | | | | |
| 10 | 111259337- | 0.08 | 0 | 0 | 0.09 | 0 | 0 | 0.03 | 0.03 | 0.00 |
| | 111259359 | | | | | | | | | |
| 10 | 1572578- | 0.03 | 0 | 0.03 | 0 | 0.05 | 0.05 | 0.02 | 0.03 | −0.01 |
| | 1572600 | | | | | | | | | |
| 11 | 47941203- | 0 | 0.05 | 0.02 | 0 | 0 | 0.03 | 0.02 | 0.01 | 0.01 |
| | 47941225 | | | | | | | | | |
| 11 | 57761981- | 0 | 0 | 0.02 | 0.01 | 0 | 0.08 | 0.01 | 0.03 | −0.02 |
| | 57762003 | | | | | | | | | |
| 11 | 76659109- | 0 | 0 | 0 | 0 | 0 | 0.01 | 0.00 | 0.00 | 0.00 |
| | 76659131 | | | | | | | | | |
| 11 | 117692097- | 0 | 0.04 | 0 | 0.01 | 0 | 0.02 | 0.01 | 0.01 | 0.00 |
| | 117692119 | | | | | | | | | |
| 11 | 10630862- | 0.03 | 0 | 0 | 0.02 | 0 | 0.06 | 0.01 | 0.03 | −0.02 |
| | 10630884 | | | | | | | | | |
| 11 | 18729719- | 0 | 0 | 0.06 | 0.06 | 0.1 | 0.08 | 0.02 | 0.08 | −0.06 |
| | 18729741 | | | | | | | | | |
| 11 | 47350413- | 0.05 | 0 | 0 | 0.06 | 0.07 | 0 | 0.02 | 0.04 | −0.03 |
| | 47350435 | | | | | | | | | |
| 11 | 72870610- | 0 | 0 | 0 | 0 | 0 | 0.24 | 0.00 | 0.08 | −0.08 |
| | 72870632 | | | | | | | | | |
| 11 | 2916587- | 0 | 0 | 0.01 | 0 | 0 | 0 | 0.00 | 0.00 | 0.00 |
| | 2916609 | | | | | | | | | |
| 11 | 121325368- | 0 | 0.04 | 0.09 | 0.07 | 0.06 | 0.05 | 0.04 | 0.06 | −0.02 |
| | 121325390 | | | | | | | | | |
| 11 | 129981605- | 0 | 0 | 0.04 | 0.06 | 0.13 | 0.04 | 0.01 | 0.08 | −0.06 |
| | 129981627 | | | | | | | | | |
| 12 | 3851459- | 0 | 0 | 0 | 0 | 0 | 0 | 0.00 | 0.00 | 0.00 |
| | 3851481 | | | | | | | | | |
| 12 | 32850805- | 0.06 | 0 | 0.07 | 0.05 | 0.07 | 0 | 0.04 | 0.04 | 0.00 |
| | 32850827 | | | | | | | | | |
| 12 | 65971780- | 0.06 | 0.04 | 0.03 | 0 | 0 | 0 | 0.04 | 0.00 | 0.04 |
| | 65971802 | | | | | | | | | |
| 12 | 95590363- | 0 | 0.18 | 0 | 0.08 | 0 | 0.08 | 0.06 | 0.05 | 0.01 |
| | 95590385 | | | | | | | | | |
| 12 | 127431260- | 0.05 | 0.04 | 0.11 | 0.06 | 0.12 | 0.04 | 0.07 | 0.07 | −0.01 |
| | 127431282 | | | | | | | | | |
| 12 | 48000120- | 0 | 0 | 0.02 | 0 | 0.06 | 0.02 | 0.01 | 0.03 | −0.02 |
| | 48000142 | | | | | | | | | |
| 12 | 53328526- | 0 | 0 | 0 | 0.06 | 0.09 | 0.02 | 0.00 | 0.06 | −0.06 |
| | 53328548 | | | | | | | | | |
| 12 | 54190321- | 0.06 | 0.02 | 0.03 | 0.01 | 0 | 0.05 | 0.04 | 0.02 | 0.02 |
| | 54190343 | | | | | | | | | |
| 12 | 106690762- | 0 | 0 | 0 | 0.01 | 0 | 0.01 | 0.00 | 0.01 | −0.01 |
| | 106690784 | | | | | | | | | |
| 12 | 114491014- | 0.11 | 0 | 0 | 0.05 | 0.1 | 0.05 | 0.04 | 0.07 | −0.03 |
| | 114491036 | | | | | | | | | |
| 13 | 69424400- | 0 | 0.04 | 0.03 | 0.01 | 0.13 | 0 | 0.02 | 0.05 | −0.02 |
| | 69424422 | | | | | | | | | |
| 13 | 25788073- | 0.05 | 0.04 | 0.04 | 0.03 | 0.05 | 0 | 0.04 | 0.03 | 0.02 |
| | 25788095 | | | | | | | | | |
| 13 | 98388403- | 0 | 0.06 | 0.02 | 0 | 0 | 0 | 0.03 | 0.00 | 0.03 |
| | 98388425 | | | | | | | | | |
| 14 | 20813343- | 0.05 | 0.02 | 0.01 | 0.02 | 0 | 0.05 | 0.03 | 0.02 | 0.00 |
| | 20813366 | | | | | | | | | |
| 14 | 24408232- | 0 | 0.03 | 0.07 | 0.06 | 0 | 0.07 | 0.03 | 0.04 | −0.01 |
| | 24408254 | | | | | | | | | |
| 14 | 38663021- | 0.08 | 0 | 0.01 | 0.06 | 0 | 0 | 0.03 | 0.02 | 0.01 |
| | 38663043 | | | | | | | | | |
| 14 | 100213915- | 0 | 0 | 0 | 0.03 | 0 | 0 | 0.00 | 0.01 | −0.01 |
| | 100213937 | | | | | | | | | |
| 14 | 90554536- | 0 | 0 | 0.01 | 0.06 | 0 | 0.03 | 0.00 | 0.03 | −0.03 |
| | 90554558 | | | | | | | | | |
| 14 | 102929418- | 0 | 0 | 0.03 | 0.03 | 0 | 0 | 0.01 | 0.01 | 0.00 |
| | 102929440 | | | | | | | | | |
| 14 | 65250553- | 0.04 | 0 | 0 | 0.04 | 0 | 0 | 0.01 | 0.01 | 0.00 |
| | 65250575 | | | | | | | | | |
| 14 | 89310097- | 0.06 | 0 | 0.06 | 0.03 | 0.06 | 0.04 | 0.04 | 0.04 | 0.00 |
| | 89310119 | | | | | | | | | |
| 14 | 101153383- | 0 | 0.04 | 0 | 0 | 0 | 0 | 0.01 | 0.00 | 0.01 |
| | 101153405 | | | | | | | | | |
| 15 | 69452825- | 0 | 0 | 0.03 | 0.04 | 0 | 0.03 | 0.01 | 0.02 | −0.01 |
| | 69452848 | | | | | | | | | |
| 15 | 42252041- | 0 | 0 | 0 | 0 | 0 | 0 | 0.00 | 0.00 | 0.00 |
| | 42252063 | | | | | | | | | |
| 15 | 99993270- | 0.03 | 0 | 0.02 | 0 | 0 | 0 | 0.02 | 0.00 | 0.02 |
| | 99993292 | | | | | | | | | |
| 15 | 47827093- | 0.08 | 0.04 | 0.02 | 0.04 | 0 | 0 | 0.05 | 0.01 | 0.03 |
| | 47827115 | | | | | | | | | |
| 15 | 86059010- | 0.05 | 0.02 | 0.07 | 0.05 | 0.05 | 0.01 | 0.05 | 0.04 | 0.01 |
| | 86059032 | | | | | | | | | |
| 15 | 94089230- | 0.11 | 0.04 | 0.04 | 0.07 | 0.02 | 0.02 | 0.06 | 0.04 | 0.03 |
| | 94089252 | | | | | | | | | |
| 16 | 3089598- | 0 | 0.03 | 0.01 | 0 | 0.07 | 0 | 0.01 | 0.02 | −0.01 |
| | 3089620 | | | | | | | | | |
| 16 | 30783356- | 0 | 0 | 0 | 0.04 | 0 | 0.02 | 0.00 | 0.02 | −0.02 |
| | 30783378 | | | | | | | | | |
| 16 | 31081352- | 0.03 | 0 | 0.04 | 0 | 0 | 0 | 0.02 | 0.00 | 0.02 |
| | 31081374 | | | | | | | | | |
| 16 | 31436901- | 0.02 | 0.02 | 0.01 | 0.01 | 0.05 | 0.03 | 0.02 | 0.03 | −0.01 |
| | 31436923 | | | | | | | | | |
| 16 | 2092489- | 0.05 | 0 | 0 | 0 | 0.03 | 0 | 0.02 | 0.01 | 0.01 |
| | 2092511 | | | | | | | | | |
| 16 | 16097875- | 0.03 | 0.04 | 0.02 | 0.04 | 0.04 | 0.14 | 0.03 | 0.07 | −0.04 |
| | 16097897 | | | | | | | | | |
| 16 | 29792483- | 0.06 | 0.03 | 0.11 | 0.11 | 0 | 0.03 | 0.07 | 0.05 | 0.02 |
| | 29792505 | | | | | | | | | |
| 16 | 88839686- | 0.03 | 0 | 0 | 0 | 0 | 0.04 | 0.01 | 0.01 | 0.00 |
| | 88839708 | | | | | | | | | |
| 16 | 81278358- | 0 | 0 | 0 | 0 | 0 | 0.04 | 0.00 | 0.01 | −0.01 |
| | 81278380 | | | | | | | | | |
| 16 | 1003178- | 0.09 | 0 | 0.04 | 0.02 | 0 | 0 | 0.04 | 0.01 | 0.04 |
| | 1003200 | | | | | | | | | |
| 16 | 14882693- | 0.06 | 0.03 | 0.07 | 0.09 | 0 | 0.01 | 0.05 | 0.03 | 0.02 |
| | 14882715 | | | | | | | | | |
| 16 | 16281338- | 0.02 | 0.04 | 0.06 | 0.06 | 0 | 0.06 | 0.04 | 0.04 | 0.00 |
| | 16281360 | | | | | | | | | |
| 16 | 18430777- | 0.08 | 0 | 0.09 | 0.07 | 0.05 | 0.02 | 0.06 | 0.05 | 0.01 |
| | 18430799 | | | | | | | | | |
| 16 | 18513312- | 0.04 | 0 | 0 | 0.02 | 0 | 0.07 | 0.01 | 0.03 | −0.02 |
| | 18513334 | | | | | | | | | |
| 16 | 21358246- | 0 | 0 | 0 | 0.02 | 0 | 0.02 | 0.00 | 0.01 | −0.01 |
| | 21358268 | | | | | | | | | |
| 16 | 28383449- | 0.02 | 0.1 | 0.03 | 0.03 | 0.04 | 0.01 | 0.05 | 0.03 | 0.02 |
| | 28383471 | | | | | | | | | |
| 16 | 28731839- | 0.05 | 0.02 | 0.05 | 0.02 | 0 | 0.04 | 0.04 | 0.02 | 0.02 |
| | 28731861 | | | | | | | | | |
| 16 | 29863301- | 0 | 0 | 0 | 0.03 | 0 | 0 | 0.00 | 0.01 | −0.01 |
| | 29863323 | | | | | | | | | |
| 16 | 67748649- | 0 | 0 | 0.03 | 0 | 0 | 0 | 0.01 | 0.00 | 0.01 |
| | 67748671 | | | | | | | | | |
| 16 | 78768901- | 0.04 | 0 | 0.01 | 0 | 0.02 | 0.03 | 0.02 | 0.02 | 0.00 |
| | 78768923 | | | | | | | | | |
| 16 | 88044071- | 0 | 0 | 0 | 0 | 0 | 0 | 0.00 | 0.00 | 0.00 |
| | 88044093 | | | | | | | | | |
| 17 | 7223899- | 0 | 0 | 0 | 0.02 | 0 | 0.06 | 0.00 | 0.03 | −0.03 |
| | 7223921 | | | | | | | | | |
| 17 | 7511796- | 0 | 0.02 | 0.05 | 0.04 | 0.09 | 0 | 0.02 | 0.04 | −0.02 |
| | 7511818 | | | | | | | | | |
| 17 | 19391599- | 0.03 | 0.03 | 0.1 | 0.05 | 0.06 | 0.06 | 0.05 | 0.06 | 0.00 |
| | 19391621 | | | | | | | | | |
| 17 | 26736056- | 0.03 | 0.08 | 0 | 0.04 | 0 | 0 | 0.04 | 0.01 | 0.02 |
| | 26736078 | | | | | | | | | |
| 17 | 38870195- | 0 | 0.03 | 0.05 | 0.03 | 0.07 | 0 | 0.03 | 0.03 | −0.01 |
| | 38870217 | | | | | | | | | |
| 17 | 45753295- | 0.03 | 0 | 0.02 | 0.04 | 0 | 0.04 | 0.02 | 0.03 | −0.01 |
| | 45753317 | | | | | | | | | |
| 17 | 45993823- | 0 | 0.06 | 0.02 | 0.05 | 0.07 | 0 | 0.03 | 0.04 | −0.01 |
| | 45993845 | | | | | | | | | |
| 17 | 81131740- | 0 | 0 | 0 | 0.01 | 0 | 0.03 | 0.00 | 0.01 | −0.01 |
| | 81131762 | | | | | | | | | |
| 17 | 7462659- | 0.05 | 0 | 0.04 | 0.01 | 0.06 | 0 | 0.03 | 0.02 | 0.01 |
| | 7462681 | | | | | | | | | |
| 17 | 28662198- | 0 | 0 | 0 | 0.07 | 0 | 0.03 | 0.00 | 0.03 | −0.03 |
| | 28662220 | | | | | | | | | |
| 17 | 63929863- | 0.07 | 0.02 | 0.03 | 0.01 | 0.02 | 0.03 | 0.04 | 0.02 | 0.02 |
| | 63929885 | | | | | | | | | |
| 17 | 79154410- | 0 | 0 | 0.03 | 0.02 | 0 | 0 | 0.01 | 0.01 | 0.00 |
| | 79154432 | | | | | | | | | |
| 18 | 3448410- | 0.03 | 0 | 0 | 0 | 0 | 0 | 0.01 | 0.00 | 0.01 |
| | 3448432 | | | | | | | | | |
| 18 | 39380982- | 0 | 0.04 | 0.03 | 0.01 | 0 | 0.05 | 0.02 | 0.02 | 0.00 |
| | 39381004 | | | | | | | | | |
| 18 | 58247634- | 0.08 | 0.02 | 0 | 0 | 0.05 | 0.03 | 0.03 | 0.03 | 0.01 |
| | 58247656 | | | | | | | | | |
| 18 | 59917417- | 0.06 | 0 | 0 | 0.02 | 0 | 0 | 0.02 | 0.01 | 0.01 |
| | 59917439 | | | | | | | | | |
| 18 | 78993257- | 0 | 0 | 0.04 | 0 | 0.11 | 0.02 | 0.01 | 0.04 | −0.03 |
| | 78993279 | | | | | | | | | |
| 19 | 53775475- | 0.03 | 0 | 0.02 | 0.02 | 0 | 0 | 0.02 | 0.01 | 0.01 |
| | 53775498 | | | | | | | | | |
| 19 | 11406443- | 0.02 | 0 | 0.08 | 0.02 | 0 | 0.1 | 0.03 | 0.04 | −0.01 |
| | 11406465 | | | | | | | | | |
| 19 | 10872441- | 0.06 | 0 | 0 | 0.03 | 0 | 0.03 | 0.02 | 0.02 | 0.00 |
| | 10872463 | | | | | | | | | |
| 19 | 36110180- | 0 | 0 | 0 | 0.13 | 0 | 0 | 0.00 | 0.04 | −0.04 |
| | 36110202 | | | | | | | | | |
| 19 | 46709648- | 0 | 0 | 0.09 | 0.03 | 0 | 0.12 | 0.03 | 0.05 | −0.02 |
| | 46709670 | | | | | | | | | |
| 19 | 12747607- | 0.03 | 0 | 0.06 | 0.04 | 0.05 | 0.02 | 0.03 | 0.04 | −0.01 |
| | 12747629 | | | | | | | | | |
| 19 | 56088833- | 0 | 0.07 | 0 | 0.05 | 0.14 | 0 | 0.02 | 0.06 | −0.04 |
| | 56088855 | | | | | | | | | |
| 19 | 51606728- | 0.02 | 0 | 0.01 | 0.01 | 0 | 0.06 | 0.01 | 0.02 | −0.01 |
| | 51606750 | | | | | | | | | |
| 19 | 1104611- | 0 | 0 | 0 | 0 | 0 | 0 | 0.00 | 0.00 | 0.00 |
| | 1104633 | | | | | | | | | |
| 19 | 1274125- | 0 | 0.05 | 0.02 | 0.05 | 0 | 0 | 0.02 | 0.02 | 0.01 |
| | 1274147 | | | | | | | | | |
| 19 | 2209581- | 0 | 0 | 0 | 0.02 | 0.07 | 0 | 0.00 | 0.03 | −0.03 |
| | 2209603 | | | | | | | | | |
| 19 | 6431799- | 0 | 0 | 0 | 0 | 0 | 0.03 | 0.00 | 0.01 | −0.01 |
| | 6431821 | | | | | | | | | |
| 19 | 11391283- | 0.03 | 0.04 | 0.03 | 0.07 | 0.1 | 0.03 | 0.03 | 0.07 | −0.03 |
| | 11391305 | | | | | | | | | |
| 19 | 49720095- | 0.04 | 0 | 0 | 0 | 0 | 0.1 | 0.01 | 0.03 | −0.02 |
| | 49720117 | | | | | | | | | |
| 19 | 50490618- | 0 | 0.05 | 0.02 | 0 | 0.03 | 0 | 0.02 | 0.01 | 0.01 |
| | 50490640 | | | | | | | | | |
| 19 | 51068476- | 0.07 | 0.06 | 0.1 | 0.08 | 0 | 0.02 | 0.08 | 0.03 | 0.04 |
| | 51068498 | | | | | | | | | |
| 20 | 45967752- | 0 | 0 | 0 | 0 | 0 | 0.03 | 0.00 | 0.01 | −0.01 |
| | 45967774 | | | | | | | | | |
| 20 | 13900645- | 0.03 | 0 | 0.03 | 0.04 | 0.05 | 0.06 | 0.02 | 0.05 | −0.03 |
| | 13900667 | | | | | | | | | |
| 20 | 23109029- | 0 | 0 | 0.01 | 0 | 0 | 0.01 | 0.00 | 0.00 | 0.00 |
| | 23109051 | | | | | | | | | |
| 20 | 31859435- | 0 | 0.02 | 0 | 0 | 0 | 0.03 | 0.01 | 0.01 | 0.00 |
| | 31859457 | | | | | | | | | |
| 20 | 49558961- | 0.04 | 0.09 | 0 | 0 | 0.07 | 0 | 0.04 | 0.02 | 0.02 |
| | 49558983 | | | | | | | | | |
| 21 | 37176555- | 0 | 0 | 0.03 | 0.07 | 0.05 | 0 | 0.01 | 0.04 | −0.03 |
| | 37176577 | | | | | | | | | |
| 22 | 27735501- | 0 | 0.08 | 0 | 0 | 0.04 | 0.05 | 0.03 | 0.03 | 0.00 |
| | 27735523 | | | | | | | | | |
| 22 | 25849024- | 0.03 | 0.04 | 0.01 | 0 | 0 | 0.02 | 0.03 | 0.01 | 0.02 |
| | 25849046 | | | | | | | | | |
| 22 | 22912001- | 0 | 0 | 0.01 | 0 | 0.05 | 0 | 0.00 | 0.02 | −0.01 |
| | 22912023 | | | | | | | | | |
| 22 | 49971621- | 0 | 0.15 | 0.06 | 0 | 0.11 | 0.03 | 0.07 | 0.05 | 0.02 |
| | 49971643 | | | | | | | | | |
| X | 1842130- | 0 | 0 | 0 | 0 | 0 | 0 | 0.00 | 0.00 | 0.00 |
| | 1842152 | | | | | | | | | |
| X | 50814798- | 0 | 0 | 0 | 0.06 | 0 | 0 | 0.00 | 0.02 | −0.02 |
| | 50814820 | | | | | | | | | |
| X | 23566446- | 0 | 0 | 0 | 0 | 0 | 0 | 0.00 | 0.00 | 0.00 |
| | 23566468 | | | | | | | | | |
| X | 83385071- | 0 | 0.08 | 0 | 0 | 0 | 0 | 0.03 | 0.00 | 0.03 |
| | 83385093 | | | | | | | | | |
| X | 76172984- | 0 | 0 | 0.03 | 0 | 0 | 0.05 | 0.01 | 0.02 | −0.01 |
| | 76173006 | | | | | | | | | |
| X | 107536875- | 0 | 0 | 0 | 0.03 | 0 | 0 | 0.00 | 0.01 | −0.01 |
| | 107536897 | | | | | | | | | |

[0712] Adenine base editors have been reported to induce gRNA-independent RNA editing via the deoxyadenosine deaminase domain. To assess for gRNA-independent RNA editing, primary human hepatocytes were treated with mRNA and PCSK9 gRNA (n=4 biological replicates), SpCas9 mRNA and gRNA (n=4), or were untreated (n=4). RNA was extracted after 2 days, and processed as described in the additional detailed methods section. Comparing the RNA profiles of the ABE8.8- and SpCas9-treated hepatocytes with untreated hepatocytes, no substantial RNA edits in the ABE8.8-treated hepatocytes was observed (FIG. 14). Each replicate was compared against each of four untreated hepatocyte samples to eliminate any positions with editing that were common to both conditions. The jitter plots portray transcriptomic loci with editing in the treated sample (number indicates total edited loci identified in the treated sample, boxplot indicates median+interquartile range of proportion of edited reads across all edited loci in the sample).

[0713] Modifications and/or truncations to either the spacer or tracr portion of the gRNA was assessed by alteration of the GA066 spacer (5′-CCCGCACCTTGGCGCAGCGG-3′ (SEQ ID NO: 13)) (Table 12). The modifications to the guide can serve to improve on-target editing efficiency and/or improve off-target editing efficiency. Each of the gRNAs with an equivalent amount of in vitro transcribed ABE8.8 mRNA (1:1 ratio by weight) were co-transfected into primary human hepatocytes and primary cynomolgus hepatocytes and processed as described in detailed methods.

TABLE 12
Modifications and/or truncations of the PCSK9 guide GA346 results in
high-level editing in human primary hepatocytes

| | Human Primary Hepatocytes-Editing % at Position 6 (Dose, Replicate #) | | | | | | | |
|---|---|---|---|---|---|---|---|---|
| | 2500 | 2500 | 1250 | 1250 | 625 | 625 | 312.5 | 312.5 |
| | ng/mL | ng/mL | ng/mL | ng/mL | ng/mL | ng/mL | ng/mL | ng/mL |
| gRNA | rep1 | rep2 | rep1 | rep2 | rep1 | rep2 | rep1 | rep2 |
| GA346 | 30.69 | 35.58 | 19.99 | 34.67 | 27.13 | 16.93 | 12.56 | 9.92 |
| GA376 | 38.15 | 33.98 | 31.43 | 25.28 | 24.02 | 22.03 | 14.81 | 12.02 |
| GA377 | 35.11 | 37.31 | 26.39 | 31.48 | 21.39 | 23.19 | 15.34 | 14.9 |
| GA380 | 38.5 | 35.38 | 32.41 | 32.43 | 25.28 | 20.36 | 12.85 | ND |
| GA381 | 29.7 | 31.2 | 24.12 | 29.23 | 17.32 | 18.43 | 11.44 | 11 |
| GA382 | 34.56 | 30.02 | 22.5 | 24.45 | 18.48 | 15.64 | 8.45 | 8.86 |
| GA383 | 42.2 | 34.95 | 32.76 | 31.79 | 22.24 | 24.17 | 13.27 | 13.26 |
| GA384 | 8.49 | 8.5 | 7.07 | 6.51 | 5.03 | 4.25 | 2.61 | 2.7 |
| GA385 | 40.2 | 29.05 | 26.39 | 21.43 | 18.88 | 16.66 | 11.76 | 7.63 |
| GA386 | 43.73 | 30.67 | 31.57 | 26.5 | 27.51 | 19.19 | 16.94 | 13.41 |
| GA387 | 22.61 | 16.64 | 17.25 | 12.78 | 11.55 | 8.26 | 5.28 | 4.24 |
| GA388 | 28.77 | 23.84 | 20.46 | 20.33 | 13.73 | ND | 7.26 | ND |
| GA389 | 28.45 | 23.46 | 21.98 | 17.88 | 12.62 | 12.78 | 8.06 | 8.54 |
| GA391 | 25.58 | 30.06 | 25.43 | 27.3 | 27.12 | 18.67 | 16.86 | 15.78 |
| | Cyno Primary Hepatocytes-Editing % at Position 6 (Dose, Replicate #) | | | | | | | |
| | 2500 | 2500 | 1250 | 1250 | 625 | 625 | 312.5 | 312.5 |
| | ng/mL | ng/mL | ng/mL | ng/mL | ng/mL | ng/mL | ng/mL | ng/mL |
| gRNA | rep1 | rep2 | rep1 | rep2 | rep1 | rep2 | rep1 | rep2 |
| GA346 | 40.1 | 37.48 | 36.97 | 34.08 | 25.91 | 25.59 | 14.83 | 15.25 |
| GA376 | 29.57 | 29.57 | 27.62 | 31.98 | 23.08 | 22.29 | 15.12 | 15.75 |
| GA377 | 35.36 | 42.67 | 35.66 | 43.35 | 30.68 | 34.73 | 21.24 | 21.79 |
| GA380 | 43.27 | 44.85 | 39.03 | 38.76 | 33.31 | 34.1 | 21.83 | 21.51 |
| GA381 | 39.45 | 47.85 | 35.82 | 41.03 | 28.42 | 31.87 | 15.51 | 18.36 |
| GA382 | 36.34 | 39.97 | 32.74 | 37.41 | 26.15 | 25.68 | 14.08 | 12.74 |
| GA383 | 39.02 | 53.37 | 35.44 | 44.23 | 28 | 33.42 | 16 | 20.03 |
| GA384 | 26.71 | 22.52 | 20.97 | 21.53 | 14.38 | 16.21 | 8.31 | 8.03 |
| GA385 | 38.44 | 37.36 | 38.31 | 31.84 | 31.97 | 28.48 | 18.23 | 17.68 |
| GA386 | 48.11 | 43.61 | 40.09 | 40.44 | 37.59 | 37.42 | 23.07 | 25.27 |
| GA387 | 27.3 | 21.08 | 23.71 | 21.53 | 16.82 | 13.62 | 7.34 | 6.03 |
| GA388 | 41.95 | 36.03 | 32.87 | 29.9 | 23.65 | 25.43 | 12.13 | 13.19 |
| GA389 | 34.62 | 33.47 | 32.15 | 29.86 | 25.87 | 23.29 | 11.17 | 12.33 |

[0714] With a view towards establishing the safety of a base-editing therapy knocking down ANGPTL3 in the human liver in vivo, a list of candidate sites in the human genome for off-target mutagenesis was assembled using two different methods. The first method used bioinformatic analysis of the human genome, identifying all sites with a PAM sequence compatible with Streptococcus pyogenes Cas9 (and therefore ABE 8.8) and a protospacer sequence with up to 4 single-nucleotide mismatches with the GA100 spacer sequence 5′-AAGATACCTGAATAACTCTC-3′ (SEQ ID NO: 14).

[0715] The second method to generate candidate sites used an in vitro biochemical assay, ONE-seq, that determined the propensity of a ribonucleoprotein comprising the ABE8.8 base editor protein and gRNA GA441 to cleave oligonucleotides in a library. The reference human genome (GRCh38) was searched for sites with up to 6 mismatches to the protospacer sequence specified by the ANGPTL3 gRNA (5′-AAGATACCTGAATAACTCTC-3′ (SEQ ID NO: 14)), and sites with up to 4 mismatches plus up to 2 DNA or RNA bulges using Cas-Designer were identified. More specifics on ONE-seq library preparation, experimental protocol, and bioinformatic analysis are described in the additional detailed methods section.

[0716] Oligonucleotides with higher sequence counts reflect a higher propensity for Cas9/gRNA cleavage in vitro and represent the sites most likely to suffer off-target mutagenesis in cells. The top candidate sites are identified in Table 13. Validation of candidate sites was performed using ANGPTL3 edited, and untreated human primary hepatocytes. Upon next-generation sequencing (Table 14), when the observed base editing rates in control cells were subtracted from the observed base editing rates in LNP-treated cells across the on-target site and candidate off-target sites (to account for background sequencing errors inherent in next-generation sequencing), appreciable base editing were observed at the on-target ANGPTL3 target site.

TABLE 13
ANGPTL3 gRNA (Protospacer 5′-AAGATACCTGAATAACCCTC-3′ (SEQ
ID NO: 15)) candidate off-target sites identified by ONE-seq

| | | Potential Off-target | SEQ ID | |
|---|---|---|---|---|
| chromosome | location | Sequence (5′-3′) | NO: | alignment |
| 1 | 4546642 | CAGATACCATAAAAATCATCTGG | 682 | X60 |
| 1 | 6955991 | AAGATACTGAAAAACCCTGCAA | 683 | RNA41 |
| 1 | 16544549 | CAGAGAGCAGAGTAAACCTCTGG | 684 | X60 |
| 1 | 23996891 | CAGAAAACTATAACCCTCAGG | 685 | RNA32 |
| 1 | 26088616 | AGAATGGCTGCATAACCCTTGGG | 686 | X60 |
| 1 | 27386898 | AAGGTTACTTAATAAACATCTGG | 687 | X60 |
| 1 | 28115884 | AAGATACCTGAATTAAATCTCAAA | 688 | DNA41 |
| 1 | 30795252 | AAGTATCTTGAATAACCCTCCTG | 689 | X50 |
| 1 | 31542787 | CAAATAACTAAATGACCCTCTTG | 690 | X60 |
| 1 | 32826604 | AAGATACTGAAAAACTCTCTTC | 691 | RNA41 |
| 1 | 33418548 | TAGATAACCTGAATAGCCCTATAG | 692 | DNA41 |
| 1 | 45361452 | TAGATACTTCAATACCTCTCAGT | 693 | X60 |
| 1 | 57486127 | AGCAATCCTGAAAAATCCTCTGG | 694 | X60 |
| 1 | 59422147 | ACGATACTTGGATAACCCTCTGG | 695 | X30 |
| 1 | 59572755 | GAGATACCTAATAAGCCTCTAT | 696 | RNA41 |
| 1 | 62604219 | AAGATACCTGAATAACCCTCTGG | 697 | X00 |
| 1 | 66687653 | AAGTTACTGAATATCTCTCAGC | 698 | RNA41 |
| 1 | 76436411 | AGTATACCTCAATAACCACCTGG | 699 | X50 |
| 1 | 77254313 | AAGATCCAGAAGAATCCCCTGG | 700 | RNA41 |
| 1 | 78181978 | AGGATACCTGGAAACCCTACTGG | 701 | X60 |
| 1 | 83689742 | AAGATAACTAGCTAGCTCTCTGG | 702 | X60 |
| 1 | 89670639 | GAGATACTTGAATAAACTTCTAT | 703 | X60 |
| 1 | 93001069 | AAGATACCTGACTAACCTGTTTT | 704 | X60 |
| 1 | 97782174 | TAGATACATGATTAAACCACTGC | 705 | X60 |
| 1 | 110981606 | TATATACATGAATAACTCCGG | 706 | RNA32 |
| 1 | 114341782 | ATTATTCTTGAATAACCCCAGGG | 707 | X60 |
| 1 | 114403243 | AAGATACCTGAGAAACTCTGCAA | 708 | X60 |
| 1 | 114800896 | ATGACTGCTGAGAAACCCTCTGG | 709 | X60 |
| 1 | 114851709 | AAGAATCCTAGATATCCCTCAGT | 710 | X60 |
| 1 | 116440140 | AAAATACCAAAAAAACCCTATAG | 711 | X60 |
| 1 | 118751265 | AAGAATTTGAATAACCCTCAAT | 712 | RNA41 |
| 1 | 119001156 | AGGCTAACAGAATCACCCTCGGG | 713 | X50 |
| 1 | 150002706 | GTGATCCTGAGTAAACCTCAGG | 714 | RNA41 |
| 1 | 156332931 | TAGATACCTATAAGCCTCTGG | 715 | RNA22 |
| 1 | 162745410 | AAGATACATGAAAAAAACATTGG | 716 | X60 |
| 1 | 164962899 | AAGATACCTTAAAACCCTTCAGC | 717 | X50 |
| 1 | 165289582 | AATTTACCTGAATAGTCATTAGG | 718 | X60 |
| 1 | 167577809 | AAGATACACAAATAGCCATCAAG | 719 | X60 |
| 1 | 170883188 | AACAAACCTGAATAGTCCTACTG | 720 | X60 |
| 1 | 175232700 | CAGATATCTGAATCACTCTTCTG | 721 | X60 |
| 1 | 176788495 | AAAATATGAATAACCCTTTGG | 722 | RNA22 |
| 1 | 177848832 | CAGATACTGAGTCACCCTCAGC | 723 | RNA41 |
| 1 | 178104014 | AAGTACCTAAATACCCTTGGGG | 724 | RNA41 |
| 1 | 179507899 | AAGATACCATTCTAACCCTCTGA | 725 | X50 |
| 1 | 180840385 | AAGGTAACTAAGAAACCCTCAGA | 726 | X60 |
| 1 | 183484429 | CTCATACCACAATAACCCTCATG | 727 | X60 |
| 1 | 183743474 | AAGATAATGAATATCACCCAGG | 728 | RNA41 |
| 1 | 185824500 | AAGATACTAATAAACACTCAGG | 729 | RNA41 |
| 1 | 188687384 | CAGATACCTGAATAAGCAGAAGC | 730 | X60 |
| 1 | 194817380 | ATAATACCTGAATACTCTCAGA | 731 | RNA41 |
| 1 | 199542263 | TCTATACCTGCATAACCCTAAGG | 732 | X50 |
| 1 | 201739039 | AAGTTACCAGGAGGACCCTCAGG | 733 | X50 |
| 1 | 203127991 | AAGAGACCGGAATGCCCCCTTGG | 734 | X60 |
| 1 | 209196372 | AACAGGCCATAAGAACCCTCTGG | 735 | X60 |
| 1 | 209428278 | TAAATGCCAGGATAAGCCTCTGG | 736 | X60 |
| 1 | 217518556 | TACATAACTGAATAACTCTCCAA | 737 | X60 |
| 1 | 222014072 | AAGAAAGCTGAGTAAGCCCGGG | 738 | RNA41 |
| 1 | 228023082 | GGGATACCCGAATAACCCCACAG | 739 | X60 |
| 1 | 228546593 | GAGACACCTGGGTAACCCCAGG | 740 | RNA41 |
| 1 | 228724320 | GTTATACCTGAATAAATCTGGGG | 741 | X60 |
| 1 | 230479071 | AAAATACCTGCATAACCCTGAGA | 742 | X40 |
| 1 | 230750818 | CAGTTCCCTGAGTCACCCTCAGT | 743 | X60 |
| 1 | 231757688 | AAGATACATGAACTTCCCACAGG | 744 | X50 |
| 1 | 232190288 | AAAATAAGTGAATAACCCACTAA | 745 | X60 |
| 1 | 233265568 | TAGGTACCTGAGTAACTCTGCGG | 746 | X50 |
| 1 | 235139684 | AAGAAACCAGATAACCCACAGC | 747 | RNA41 |
| 1 | 238895801 | AAGATACCTGCATAATCTAGGA | 748 | RNA41 |
| 1 | 244048003 | AGGATACCTGCGTAACTCGCAGC | 749 | X60 |
| 1 | 245228289 | AAGATACCTGGAGATGCCCCTTG | 750 | X60 |
| 2 | 2541015 | AAGATATCAGAATAACTCTGGCT | 751 | X60 |
| 2 | 5866267 | CCTGTACCTGCATAACCTTCTGG | 752 | X60 |
| 2 | 11192249 | AAGATACCTAAAAAGCCCCCAGC | 753 | X50 |
| 2 | 14318310 | TAGATACCCAAATAGCCCCTCAGG | 754 | DNA41 |
| 2 | 17555591 | TCTATACCTAAATAGTCCTCAGG | 755 | X60 |
| 2 | 18083124 | AAAATACCAGAATAACCCATTTA | 756 | X60 |
| 2 | 18570047 | AAGATATCTGAATAAACTCCAAA | 757 | X60 |
| 2 | 23315873 | ATGATTATTAAATAACCCTCAAG | 758 | X60 |
| 2 | 24850333 | AAGATCCCTGATTACCATTCCAG | 759 | X60 |
| 2 | 28691746 | AAGATACCTGGCTCAACCTCATC | 760 | X60 |
| 2 | 29326137 | AATGTGGCTGAAAAAGCCTCTGG | 761 | X60 |
| 2 | 30453369 | AAGATACCTAAACATTCCAGTGG | 762 | X60 |
| 2 | 31504056 | AAGAGAGCTGGACAACTCTAAGG | 763 | X60 |
| 2 | 33271364 | AAGATAGGTCAATAACCACCCGG | 764 | X50 |
| 2 | 33829479 | TAGATAACTGAATAAACTCTATGG | 765 | DNA41 |
| 2 | 35540632 | AAGATGTATTATTGACCCTCTGG | 766 | X60 |
| 2 | 38119450 | TAGAAAACAGAATGACTCTCAGG | 767 | X60 |
| 2 | 42166900 | AATAACCAAAATAACCCTCCAG | 768 | RNA41 |
| 2 | 46398173 | TATGTACCTAATAAGCCTCAGG | 769 | RNA41 |
| 2 | 49841412 | CATATATCTGAATAGCCTTCTGG | 770 | X50 |
| 2 | 56159084 | AAGATACAGAATTCCCCTCTGA | 771 | RNA41 |
| 2 | 56257553 | AAGTTACATGAAAAACATCTGG | 772 | RNA41 |
| 2 | 57130463 | AAAATACCTGAATAATCCTCGAA | 773 | X40 |
| 2 | 59482506 | AAGATACCAGAGAAAGTCTCAGA | 774 | X60 |
| 2 | 60290320 | CAAATACCAGAATACCCTACAGG | 775 | X60 |
| 2 | 64169496 | ATGATCCTAAATAACCTTCCAG | 776 | RNA41 |
| 2 | 68986545 | AACAACATGAATGACTCTCTGG | 777 | RNA41 |
| 2 | 71741885 | AAGATAAAGGTATCTCCCTCTGG | 778 | X60 |
| 2 | 72415642 | AAGCCAACTGAATAACACTGTTG | 779 | X60 |
| 2 | 72619690 | ATGATACCTGAATACCTCTAATG | 780 | X50 |
| 2 | 75266724 | AAGCCAACTGAAGAGCCCTTGGG | 781 | X60 |
| 2 | 80321182 | AAGAACTTGATAAACCCTCAAG | 782 | RNA41 |
| 2 | 87443936 | TTGACACCTAAATAACCCTTTGG | 783 | X50 |
| 2 | 98349660 | AAGAGACCAGAAGCAACCTCTGT | 784 | X60 |
| 2 | 100696913 | AAGAAACATGAACAGAGCCTCAGG | 785 | DNA41 |
| 2 | 104408132 | GAGATACCTGTATAAGTCACTAG | 786 | X60 |
| 2 | 108664444 | AAAATGCCTTAAGAACCCTGGGG | 787 | X50 |
| 2 | 111506561 | TTGACACCTAAATAACCCTTTGG | 783 | X50 |
| 2 | 112735695 | TAGATACTCAGTAACCCTCTTG | 788 | RNA41 |
| 2 | 115162717 | AAGAGACAGGAATAACCCTCAGC | 789 | X40 |
| 2 | 121516112 | AAAATACCATGTAAAACACTCTGG | 790 | DNA41 |
| 2 | 122492850 | GAGATACAGAATAGCCCTGGGG | 791 | RNA41 |
| 2 | 124401576 | AAGAACCTAAATCACCATTGGG | 792 | RNA41 |
| 2 | 128856709 | AAGATATCTGGATAATCCACCAA | 793 | X60 |
| 2 | 141714040 | AAGATACTGGAATAAACATAAAG | 794 | X60 |
| 2 | 143719680 | AAAATGCCTCAATATCTCTGTGG | 795 | X60 |
| 2 | 144191771 | AAAATACCAAAATAACCCTAAAG | 796 | X50 |
| 2 | 149423627 | TAGATACCTGAAATACTCTATGC | 797 | X60 |
| 2 | 153591411 | AAAATACCATAATTTCCCTCAGA | 798 | X60 |
| 2 | 154142624 | AAGATACCAAATAAACCTCTGA | 799 | RNA31 |
| 2 | 155791011 | AAGATACCTAAAATACCTATTGG | 800 | X60 |
| 2 | 155965426 | CAGATACCTGAAAAACTCTCTCT | 801 | X50 |
| 2 | 157734996 | AATAAACACTGAATAACCCTTTGT | 802 | DNA41 |
| 2 | 163699397 | CAGCTACCTAATTACCCTCTGG | 803 | RNA31 |
| 2 | 163782922 | TAGGTACCTGATTTACCCTGATG | 804 | X60 |
| 2 | 166944919 | AAGATACCTCAGGAACCAGCAGC | 805 | X60 |
| 2 | 168821195 | AAAAGACCTAAAAAGCCCTCTGG | 806 | X50 |
| 2 | 169944031 | TCAATTACTGAATAACCCTCTTG | 807 | X60 |
| 2 | 170941666 | AATATACATGAATAAATCTCACA | 808 | X60 |
| 2 | 173215359 | AAAAAACGTGAAAAACCTTAGGG | 809 | X60 |
| 2 | 174371138 | AAGATACCTGTTAGCCCTCACC | 810 | RNA41 |
| 2 | 176698280 | AAGTTTCATGCATAAAACTCTGG | 811 | X60 |
| 2 | 180424100 | AAGGTACCTGAAGAACTCAACTG | 812 | X60 |
| 2 | 181934742 | AAGATGTATGAATAACTCTCGGG | 813 | X40 |
| 2 | 183685747 | AAGCAACCTAAATGTCCATCAGG | 814 | X60 |
| 2 | 183737398 | GAGATACCTGGATAACCACTTGG | 815 | X50 |
| 2 | 184251994 | AAGACACCTGGAGAACTCTCGGG | 816 | X40 |
| 2 | 188364288 | AAGTAACCCAATAACCCTGAGG | 817 | RNA41 |
| 2 | 188883471 | ACAATACGTGAATGAATCCTCTGG | 818 | DNA41 |
| 2 | 191075654 | AAGATTCCAGACATACACTCTGG | 819 | X60 |
| 2 | 191371557 | TAAGTAGCTGTATAACCCTGGGG | 820 | X60 |
| 2 | 195665474 | TAAATACTTGAAAAACCCACAGA | 821 | X60 |
| 2 | 196276026 | AAGTTATCTGACTAACAATCTGT | 822 | X60 |
| 2 | 196963744 | AATATACATGAATTTCTCTTAGG | 823 | X60 |
| 2 | 197268832 | AAGATGCCTCCCTAACACTGGGG | 824 | X60 |
| 2 | 197475333 | TACATACCAACAACCCTCTGG | 825 | RNA32 |
| 2 | 198342120 | AATAGAGCTGAAAAACCCTCACT | 826 | X60 |
| 2 | 198435701 | AAATTAGATGAATAACCCTTAGT | 827 | X60 |
| 2 | 202129138 | AAAATACCTGATACCCCCTGG | 828 | RNA32 |
| 2 | 202797188 | AGAGTACCTGAATACCTCTGG | 829 | RNA32 |
| 2 | 203165696 | AGAATATCTGAATTACCCTCAAG | 830 | X50 |
| 2 | 204928058 | AAGATACATGAGTAAACCCAGC | 831 | RNA41 |
| 2 | 206764957 | AGGAGACCTGCACAGGCCTCTGG | 832 | X60 |
| 2 | 216172775 | AATTTATATGAAAAACCCACTGG | 833 | X60 |
| 2 | 217541307 | AAGATACCTGATCAATCCTCTTC | 834 | X50 |
| 2 | 217737466 | AAGATACCAGACCAAAGCTCAGG | 835 | X50 |
| 2 | 220751309 | TAGAGACATGAAAAACCCTCCAA | 836 | X60 |
| 2 | 221762944 | AATATTCCTGAATCCCTCGGG | 837 | RNA22 |
| 2 | 226128392 | CTCATACCTGAATAACCTTCTCA | 838 | X60 |
| 2 | 226932531 | CAGATACCGAGAAAAACCCTCTGG | 839 | DNA31 |
| 2 | 227560446 | AAGATATATGAAAAAGCCTATGC | 840 | X60 |
| 2 | 228586979 | CAGATACCTCACCAACACTCCAG | 841 | X60 |
| 2 | 232730167 | CAGAGACCTGAAAAGCCCTGCCG | 842 | X60 |
| 2 | 240208622 | AAAAGGCCTGCAGAAACCTCTGG | 843 | X60 |
| 2 | 241728292 | CAAATCCTTGAATCACCCCCAGG | 844 | X60 |
| 2 | 241778506 | AAGATACCTGGCCACACCCCAGG | 845 | X60 |
| 3 | 539550 | GAGATAATGAATAGCCCTCCGG | 846 | RNA31 |
| 3 | 7611430 | AAGATACCTGTCATCCCTCCGT | 847 | RNA41 |
| 3 | 8738135 | GGGATACCTGCATAACTCTCAGG | 848 | X40 |
| 3 | 11156153 | GAAATGCCTGAATCACACTCGAG | 849 | X60 |
| 3 | 11683514 | AAGATACTGAATCAACTTCAGT | 850 | RNA41 |
| 3 | 16474484 | AAGATACCAGTACACCCCCAGG | 851 | RNA41 |
| 3 | 19871463 | ATGATACCTCAATAACCCTATTT | 852 | X50 |
| 3 | 25070750 | AAAATACCTGAACATACCTTGAG | 853 | X60 |
| 3 | 35461847 | TACATACCTAACAACCCCTCAGG | 854 | X60 |
| 3 | 35699317 | AAGAAACAAGGGAAACCCTCAGG | 855 | X60 |
| 3 | 36482333 | AAGATACCAGGATGGCTCTCTGC | 856 | X60 |
| 3 | 37570248 | CAACAACCAGAATAACCCACAGG | 857 | X60 |
| 3 | 37680767 | AAGATTAAAAGAATAAACCTCAGG | 858 | DNA41 |
| 3 | 38875399 | AACTTACCTGCAAAACCATCTGG | 859 | X50 |
| 3 | 56933123 | AAGATCTGAATTACCATCAGT | 860 | RNA32 |
| 3 | 61401423 | GAGATCCTTAACAACCCTCAAG | 861 | RNA41 |
| 3 | 64532843 | AAGATATCTGAGCCACACTCTCG | 862 | X60 |
| 3 | 68532737 | AAGCTACCTGAAAACCTTCAGG | 863 | RNA21 |
| 3 | 70442317 | AAGATGACTGAAGAAACCTTGGG | 864 | X50 |
| 3 | 70620477 | AAGATCCCTGCAAACCCTTTTGG | 865 | X60 |
| 3 | 71429771 | AAGACAGCTAAATCACCCCACGG | 866 | X60 |
| 3 | 71714408 | AAGATCACAGAATCACCCTCCTC | 867 | X60 |
| 3 | 74054464 | AATAGACATGAATAACCCTAAGA | 868 | X50 |
| 3 | 76238395 | CAGACACCTTACTAACTCTCCTG | 869 | X60 |
| 3 | 82942470 | AAGATACACAAATAAACTTCTAG | 870 | X60 |
| 3 | 83311768 | AAGATATCTGAAAAACTCTCAAA | 871 | X50 |
| 3 | 84371314 | AAGACACTGAATAACCCACAGA | 872 | RNA31 |
| 3 | 86668690 | TAGATAGCAAATAACCCTAGGG | 873 | RNA41 |
| 3 | 98032158 | AATAGACCTAAATAACCTCAAG | 874 | RNA41 |
| 3 | 99319950 | AAGTTACCTGACTAACCCTGAGG | 875 | X30 |
| 3 | 100809940 | AAGATATCTGAATAACTACAAGG | 876 | X50 |
| 3 | 107069791 | AAGATACTTGGATAACTCTGCTA | 877 | X60 |
| 3 | 107509328 | AAGAGGCTGGAATAAGCCACGGG | 878 | X60 |
| 3 | 111016912 | AAGATACATAAATATCACTGCAG | 879 | X60 |
| 3 | 118950239 | CACTAACCTGAATAGCCCTAAGG | 880 | X60 |
| 3 | 120988045 | AATATACCTGAAAAACCATCAGG | 881 | X30 |
| 3 | 121667776 | AAAATACCTAAAGAAATTTCAGG | 882 | X60 |
| 3 | 122037269 | CGTGTACCTGAAAAAGCCTCAGG | 883 | X60 |
| 3 | 126759212 | GTGAGGCCTGAAGAACACTCTGG | 884 | X60 |
| 3 | 133985020 | AAGTTACTGAATATCCCTCCAG | 885 | RNA31 |
| 3 | 140863741 | AAGAAACCGGAATGAGCCCCCAG | 886 | X60 |
| 3 | 141050688 | CAGATACCAGAAGCACCCTCGAG | 887 | X50 |
| 3 | 142685343 | TAGATAACTGAAATATCCCTCTGG | 888 | DNA31 |
| 3 | 143875802 | GAGATACCCAAATAAACCTCAAA | 889 | X60 |
| 3 | 151175376 | AAGATACTGAATAAAGCTCTTA | 890 | RNA41 |
| 3 | 151226712 | AAGATAACTGAAGAAACTGAAGG | 891 | X60 |
| 3 | 151395707 | AAGATACCAGGGTAACTCTATGA | 892 | X60 |
| 3 | 155083487 | AAGATACCTGAATATCCAACCTA | 893 | X50 |
| 3 | 161319971 | AAGCTGACTGAAGAGCCCTTGGG | 894 | X60 |
| 3 | 168443226 | AGTATTTCTGACAAACCCTCAGG | 895 | X60 |
| 3 | 169534358 | GAGATAGCTAATAACCCCCTGG | 896 | RNA31 |
| 3 | 171933625 | AAGACAACTGAAAAACGCTGTGG | 897 | X50 |
| 3 | 173995167 | AAGACACCTGAATAATCTCTGGA | 898 | X60 |
| 3 | 176890998 | ATGATAAGTGAATAAGTCTCATG | 899 | X60 |
| 3 | 177768689 | AGGATATATGAAAAAGCCTGCGG | 900 | X60 |
| 3 | 187379619 | AAGATACCCTAAAAGCCTTTGG | 901 | RNA41 |
| 3 | 188484179 | AAGATGCATGAATAACCTCTGGA | 902 | X60 |
| 3 | 190699564 | ATGACACCAGAAAGACCCTAAGG | 903 | X60 |
| 3 | 192710228 | AAAATACTAAATAACCCCATGG | 904 | RNA41 |
| 4 | 723653 | CAGATTCCTGGAAGACCCTCAAG | 905 | X60 |
| 4 | 11334933 | AAGAGACCTCAAGGTCTCTCTGG | 906 | X60 |
| 4 | 12971711 | AAGACTAAAGAATAACCCTCTGG | 907 | X50 |
| 4 | 15327544 | AATATGCCTACATTACACTCAGG | 908 | X60 |
| 4 | 16411507 | AAGACACTGAATAACCCTTGGC | 909 | RNA31 |
| 4 | 20157051 | AAGATAGTGAGTAAGTCTCAGG | 910 | RNA41 |
| 4 | 23244775 | TAGATAAGAATAGCCCTCAGG | 911 | RNA32 |
| 4 | 26200297 | TCTATACCTCAATAACCTCCTGG | 912 | X60 |
| 4 | 28742386 | AAGATACCTAAGTGCTCCACAGG | 913 | X60 |
| 4 | 29008961 | AAGAAACCTACAATAACCTTCATG | 914 | DNA41 |
| 4 | 33579022 | CCGATATCAGAATATCCCTTAGG | 915 | X60 |
| 4 | 44748785 | AAGATGCATGAAAAAGCTTCAGT | 916 | X60 |
| 4 | 44812393 | TAGATATCTGCAGAACTCTCCGC | 917 | X60 |
| 4 | 45258647 | AACATACATCAATAACTTTCTTG | 918 | X60 |
| 4 | 46495164 | AAGATACTTGAATACCAATCAAG | 919 | X50 |
| 4 | 47192935 | TAAAGACCTGAATAACCTCAAG | 920 | RNA41 |
| 4 | 47840228 | AAGATATTGAATATACCTCAGG | 921 | RNA31 |
| 4 | 51965380 | TAGTTACCTGAATACACCTCTGG | 922 | X40 |
| 4 | 66291743 | TATATACCTGGAAAACCCTAAAG | 923 | X60 |
| 4 | 74170265 | TAGATACATAATAACCAACTGG | 924 | RNA41 |
| 4 | 84374124 | GAGATACTTGAATCCCTCAGG | 925 | RNA22 |
| 4 | 87976264 | AAGATACCTGTATGACACTGTGT | 926 | X50 |
| 4 | 88117912 | AAGATACCTAAATAACAAGCTGG | 927 | X40 |
| 4 | 90779595 | AGGATACATGCATAACCCATGAG | 928 | X60 |
| 4 | 91244542 | AAGATCCAGAATAATTCTCTGG | 929 | RNA31 |
| 4 | 91936467 | AAGATACATGAAAAATTCTCTCA | 930 | X60 |
| 4 | 93373949 | AATATACCCTAATAAGCCTTCTG | 931 | X60 |
| 4 | 93711948 | AAGATGGCTGAATAGAACCTTCCAG | 932 | DNA42 |
| 4 | 96659665 | AATATACCTTATTATCCTTCAGA | 933 | X60 |
| 4 | 100450684 | CAGATACAAGAGTACTCCTCAGG | 934 | X60 |
| 4 | 101268626 | TCTATACCTAAATAAACCTAAGG | 935 | X60 |
| 4 | 104738004 | TAGATACCTCAATAATTCTCTCT | 936 | X60 |
| 4 | 115433239 | AAATAACATAAATAACCCTCAGA | 937 | X60 |
| 4 | 115953135 | CAGAAGCTGGATAGCCCTCGGG | 938 | RNA41 |
| 4 | 136101368 | AAGAACATGAGTAACCCTAAGG | 939 | RNA31 |
| 4 | 136644335 | AAGATACTTGAAAAACACCAGGT | 940 | X60 |
| 4 | 136853658 | AAGAGAACTGAAAAGCCTCAAG | 941 | RNA41 |
| 4 | 144234750 | AAGATACCAAATAACTCTCTGG | 942 | RNA21 |
| 4 | 146835606 | AATATGCCTGTAACCCTCAAG | 943 | RNA32 |
| 4 | 149064984 | AAGCTGACTGAAGAGCCCTTAGG | 944 | X60 |
| 4 | 155932126 | AAAATTCATGAAGAACCCTGGGT | 945 | X60 |
| 4 | 157312624 | AAGATACGTGAATAACTCAGGAT | 946 | X60 |
| 4 | 159332385 | AAGATATCTGAACAATTCTAAGG | 947 | X50 |
| 4 | 160192361 | AAGATACTTGAATCACTGTCAGT | 948 | X50 |
| 4 | 168412887 | AAGATCCTGAATAATTCTCTGG | 949 | RNA21 |
| 4 | 170886954 | AAGAAGCCTGGATAGAACTCTGG | 950 | X60 |
| 4 | 172543878 | TTGATACCTGAATAACACTCCAG | 951 | X40 |
| 4 | 172763007 | AAAAAAAATGAATTACCCTCATG | 952 | X60 |
| 4 | 174561024 | GAGATCCAGAATTACCCTTGGG | 953 | RNA41 |
| 4 | 181671436 | AACATACCTAAATAACTCCTGGC | 954 | X60 |
| 4 | 184625030 | AATCTACCTGATGACCCTCGGC | 955 | RNA41 |
| 4 | 186075007 | AAGTTAACTGTAAAACAGCCTCAGG | 956 | DNA42 |
| 5 | 6252615 | AAGAAATCTGAAAGCCCTGGGG | 957 | RNA41 |
| 5 | 7102627 | GAGATACCTGCATAACACTTAAT | 958 | X60 |
| 5 | 7274614 | CAGATAACTGAACAACCAGATGG | 959 | X60 |
| 5 | 7657678 | AACTTAGGTGATTAACCCTCACG | 960 | X60 |
| 5 | 8704833 | ATGATACTGAATAAGTCTCAGG | 961 | RNA31 |
| 5 | 9774717 | AAGATCCAGAATAATTCTCTGG | 929 | RNA31 |
| 5 | 13575913 | AGAATACCTAGTGACCCTCAGG | 962 | RNA41 |
| 5 | 16123391 | AACAGACCTTCATAGCCCTCAGA | 963 | X60 |
| 5 | 16404802 | TATATACCTAAATAACCTAGGG | 964 | RNA41 |
| 5 | 20733472 | AAGATCTCTGAAATGCCCTGAGG | 965 | X60 |
| 5 | 23248793 | AACTTAACATAATAACCTTCAGG | 966 | X60 |
| 5 | 34351741 | ATGATAGTGAATAATCCTCATG | 967 | RNA41 |
| 5 | 35773444 | AAGATACGAGAATAACCTCAAGA | 968 | X60 |
| 5 | 35946321 | AAACTACCTGGATGACCCTCTGA | 969 | X50 |
| 5 | 36662538 | AAGAAGATGAATTACTCTCTGG | 970 | RNA41 |
| 5 | 42904833 | AAGATACAGAGTAACTCTTGGG | 971 | RNA41 |
| 5 | 43693099 | GAGATAGCTGAATAATCCCTCAG | 972 | X60 |
| 5 | 45541710 | AAGATACATCAGTAAGCCACAGT | 973 | X60 |
| 5 | 55453226 | AAAATACATTAATAAAACTAAGG | 974 | X60 |
| 5 | 58609559 | AGTAGAGGTGAATAACCCTCAGC | 975 | X60 |
| 5 | 60295257 | CAGATACTTAAATAACCATAAGG | 976 | X50 |
| 5 | 61555769 | AAGAACCTGACAAGCCCTCAGA | 977 | RNA41 |
| 5 | 66999062 | AAGATCCATCAATAAACCACGTG | 978 | X60 |
| 5 | 69412657 | AAGATACTTTTAAAACCCAGTGG | 979 | X60 |
| 5 | 73013090 | AAGATCCTGAATTACTCTCAAG | 980 | RNA31 |
| 5 | 73504738 | AAGATACCTGAACAACTCCACAC | 981 | X60 |
| 5 | 75225969 | AAGCTGACTGAAGAGCCCTAGGG | 982 | X60 |
| 5 | 78444765 | TTGATACCTGTATTACACTCATG | 983 | X60 |
| 5 | 82799696 | AAGATACAGAGAATAACCCTCACA | 984 | DNA41 |
| 5 | 83300276 | AAAATACCTCACTAGCTCTCCAG | 985 | X60 |
| 5 | 85150663 | AAAATAATTGAAAAACTCTCTGT | 986 | X60 |
| 5 | 87098398 | ATAAGAACAGAATAACCTTCTGG | 987 | X60 |
| 5 | 91842929 | AAGAGTCATGCATAGCCCTCCAG | 988 | X60 |
| 5 | 105774459 | AAGATACTGAATAAACTCCTGC | 989 | RNA41 |
| 5 | 106733933 | AAGAAACACAAATAACCATCAGA | 990 | X60 |
| 5 | 108874504 | GAGATGCTGAATAACTCTCTGG | 991 | RNA31 |
| 5 | 112311434 | AAGATACTGAGTATCTCACAGG | 992 | RNA41 |
| 5 | 112422645 | AAGACACCAAGATAGCACCCTCGGG | 993 | DNA42 |
| 5 | 113833519 | AGTATACCTTAATACCCCCTGG | 994 | RNA41 |
| 5 | 114129926 | ATTATACCTAATAACCCTATGG | 995 | RNA31 |
| 5 | 117372593 | AATATAGCCCAATATCCCTCATG | 996 | X60 |
| 5 | 118452920 | CAGATACCTGAATGATCCTTTTC | 997 | X60 |
| 5 | 119760952 | AAGAAAGCTGAGTAGTCCTCAGA | 998 | X60 |
| 5 | 132792147 | AAGGGACAGGAAGAACCCTGAGG | 999 | X60 |
| 5 | 132904762 | AAGATAGCTGTATAACCTTTATC | 1000 | X60 |
| 5 | 137163670 | AAGTTAGCGGAACTCACCCTCAGG | 1001 | DNA41 |
| 5 | 137764269 | AAGAGAGCTAGCTAGCCCTCTGG | 1002 | X60 |
| 5 | 142640990 | AGGATTTCTGGATAACACTTTGG | 1003 | X60 |
| 5 | 143734240 | GAAGTACCTGAAAAACCCTCTGC | 1004 | X50 |
| 5 | 148112086 | GAGGTACTTGAATCACCATCAAG | 1005 | X60 |
| 5 | 151722432 | TAGCTTACTGAATAACCCTAAGG | 1006 | X50 |
| 5 | 152708508 | AAGAGGCATGAATAACCCTGTTC | 1007 | X60 |
| 5 | 153529703 | CAGTTACGAATAACCCTCAGA | 1008 | RNA32 |
| 5 | 156251323 | AAGATACTGAAAAACCCTCTGA | 1009 | RNA21 |
| 5 | 160330029 | AACAGACATGAAGAAGGCTCAGG | 1010 | X60 |
| 5 | 163829739 | ACCATACCTGAAGGACCATCTTG | 1011 | X60 |
| 5 | 164401431 | AAGAGACCTTAAAACTCTCTGT | 1012 | RNA41 |
| 5 | 165782539 | ACAAGACCAAAATAACCCACAGG | 1013 | X60 |
| 5 | 172047699 | ACGATGGCAGAACAAACCTCAGG | 1014 | X60 |
| 5 | 173042104 | AAGATACCTCAAACACCAGCCGT | 1015 | X60 |
| 5 | 175751428 | AAGACACCTAAATATCCCTGGGA | 1016 | X50 |
| 5 | 177550455 | AAGATACTGACTAATCATCTGC | 1017 | RNA41 |
| 6 | 2810238 | TAGACACCTGAGTCACCCTCTTA | 1018 | X60 |
| 6 | 3633347 | GTGATACCAGATTAACCTCTGG | 1019 | RNA41 |
| 6 | 3993855 | AGAGTAACTGAATAACCCTACAG | 1020 | X60 |
| 6 | 6543792 | TTTGTACCAGAATAACCCTCCTG | 1021 | X60 |
| 6 | 8845584 | AAATTAACTGCATAACCCTGGGT | 1022 | X60 |
| 6 | 12146644 | AAAAAACTTGAATTACCTTCTAG | 1023 | X60 |
| 6 | 13274573 | CTGAAACCTAAATAATCCCCCGG | 1024 | X60 |
| 6 | 15494007 | AAGACCCAGGAATCACACTCTGG | 1025 | X60 |
| 6 | 16159742 | AGAAGACCTGAATACCCCCAGG | 1026 | RNA41 |
| 6 | 17837365 | CAAATACCTAAAGAACTCTCCTG | 1027 | X60 |
| 6 | 18241159 | CCTATACCTAATAACCTTCAGG | 1028 | RNA41 |
| 6 | 20501819 | AAGATACCTGGAAAACTCCCAAA | 1029 | X60 |
| 6 | 22811364 | TAGACACCTAATAATCCCCAGG | 1030 | RNA41 |
| 6 | 24130572 | GTGATACCTGTCAGACCCTCGGG | 1031 | X60 |
| 6 | 25968782 | AAGATACCAGAATTCCCCTCTTC | 1032 | X50 |
| 6 | 26726581 | AAGATGGCTGAGAAAAACTCAGG | 1033 | X60 |
| 6 | 26775081 | AAGATGGCTGAGAAAAACTCAGG | 1033 | X60 |
| 6 | 28642665 | CGTGTACCAGAATCACCCTCAGG | 1034 | X60 |
| 6 | 28976992 | AAGAACTTGTAGAACCATCAGG | 1035 | RNA41 |
| 6 | 31728324 | AAGATACCCCATCACCCCTCCCG | 1036 | X60 |
| 6 | 31925117 | AAGATCAGCAGAAGAACCTTCTGG | 1037 | DNA41 |
| 6 | 32569518 | AGTATACCTAAACAAACCTCAGA | 1038 | X60 |
| 6 | 35414348 | AAGATCCTGCATACCCTTCTGT | 1039 | RNA41 |
| 6 | 39979448 | AAGATCCAGATTAACCCTCTAG | 1040 | RNA31 |
| 6 | 40805097 | AACATCCCTGAAGACCCTTGAGG | 1041 | X60 |
| 6 | 41733389 | AAGATACCTGGGTCCCCATTTGG | 1042 | X60 |
| 6 | 42264231 | AAGATCCTTAAATACCCTCTGG | 1043 | RNA31 |
| 6 | 42676866 | AAGATAACTAACTCACCTTCCCG | 1044 | X60 |
| 6 | 45506487 | ATGATATATGAACAACCCTCTGG | 1045 | X40 |
| 6 | 45565147 | AACATACTCGAATACCCCTCAAA | 1046 | X60 |
| 6 | 45812353 | AGCTTACCTGCTTAACCCTCAGG | 1047 | X50 |
| 6 | 45989719 | AAGATACCAAAATTCCCCAATGG | 1048 | X60 |
| 6 | 46206185 | ACGATACTGGAATAAGCCTTTGA | 1049 | X60 |
| 6 | 51499203 | CAGTACCTCAACAACCCCCTGG | 1050 | RNA41 |
| 6 | 51857715 | AATATCCTGAATAAACCTCTAG | 1051 | RNA31 |
| 6 | 57915493 | AAGACACCTGATAAAAACTCTGT | 1052 | X60 |
| 6 | 62452292 | AAGATACAGAATAAACCTAAGG | 1053 | RNA31 |
| 6 | 66308858 | GAGATACTTGAACAACTCACTGG | 1054 | X50 |
| 6 | 66899926 | AAGAAACCAGAGAAACCTTCGAG | 1055 | X60 |
| 6 | 71004311 | AAAGTACCTAAATAACCAACCAG | 1056 | X60 |
| 6 | 76467643 | AAGAAGGTGAATAACACTTAGG | 1057 | RNA41 |
| 6 | 78402401 | AAGATACCTGGCTAGCCATATGC | 1058 | X60 |
| 6 | 79368236 | AAGCTACCAGAGGAACAATCAGG | 1059 | X60 |
| 6 | 84651006 | CATTTACTGAATAACCCTTTGG | 1060 | RNA41 |
| 6 | 84877021 | GATAAACATGAAGGACCCTCAGG | 1061 | X60 |
| 6 | 89636030 | AACGTACCTGAACAACCCTCAGG | 1062 | X30 |
| 6 | 90026983 | ACACTACCTGAATGACCCTCAAG | 1063 | X50 |
| 6 | 91316610 | AATATACATGAAACACACTTAGG | 1064 | X60 |
| 6 | 100261928 | AAGATACCTAAATGTCCATCAAC | 1065 | X60 |
| 6 | 101477606 | CAGATATGAATAAACCTCTAG | 1066 | RNA32 |
| 6 | 104427293 | AATAGTACTCAATAAACCTCTGG | 1067 | X60 |
| 6 | 105452361 | AGTATACATGAATAGCCCTCAGG | 1068 | X40 |
| 6 | 113288211 | TTGCTACCTGAATAACCCTCTTG | 1069 | X40 |
| 6 | 125169983 | AAGATATCTGAGGAAGCGTCTTG | 1070 | X60 |
| 6 | 125494646 | AAGATACCTGAAACCCTCTGG | 1071 | RNA02 |
| 6 | 126401280 | CAGATATTGAAAAACCCTCTGG | 1072 | RNA31 |
| 6 | 127951944 | AAGGTATCCAAATAACCCTTTGG | 1073 | X50 |
| 6 | 133766716 | TAAATACCTGAACAACTCTAGGG | 1074 | X50 |
| 6 | 134020048 | AAGATTACATGAGTACCCCTCCTG | 1075 | DNA41 |
| 6 | 141080346 | ATGATAGTGAATAACTCTCTTG | 1076 | RNA41 |
| 6 | 141657228 | AAGATATCTGAAAAATCCACAAA | 1077 | X60 |
| 6 | 142866995 | AAGATTTCTTATAACCCTCTGG | 1078 | RNA31 |
| 6 | 146355335 | AAGATACTCTGAATAACTTTCTGG | 1079 | DNA21 |
| 6 | 147553748 | AAGTCATCTGAATAACCCTCAAG | 1080 | X40 |
| 6 | 152311384 | AAGATACGTGCAATAACTATCAAG | 1081 | DNA41 |
| 6 | 158194025 | AAGATACATTAGTAACATTTTGG | 1082 | X60 |
| 6 | 159249441 | AAGAAACACTTAAAAACCATCTGG | 1083 | DNA41 |
| 6 | 159877092 | TAGATACCTGTATAACCACCACC | 1084 | X60 |
| 6 | 163714704 | AACTTACCTGAACATGCCCCTGG | 1085 | X60 |
| 6 | 166082374 | TAGATACATGGATTAACTTCTGG | 1086 | X60 |
| 6 | 168015970 | AAGACAGCAGTAAAACACTCTGG | 1087 | X60 |
| 6 | 168145686 | AAGATCTGGAAGAACTCTCTGG | 1088 | RNA41 |
| 7 | 5143278 | AAGAAAGGTGAGCAACACTCGGG | 1089 | X60 |
| 7 | 5180429 | AAGATACTTTAAAAAACCCCTGC | 1090 | X60 |
| 7 | 12098480 | AATATACCTAGCTAAGCCTCAGA | 1091 | X60 |
| 7 | 16189181 | AAGATAGCCTGAGTCACACTCTTG | 1092 | DNA41 |
| 7 | 17175165 | AAGAAAACAGCGTAAGCCTCAGG | 1093 | X60 |
| 7 | 18301478 | ATGAAACCTAAATAAGTCTCTGG | 1094 | X50 |
| 7 | 18326887 | TGTTTACCTGAATAACCTTCAGG | 1095 | X50 |
| 7 | 20063992 | AAGATATCTGAAAAGCCCACTTT | 1096 | X60 |
| 7 | 21393775 | TGTAAACCTGGATAACCCTCTAG | 1097 | X60 |
| 7 | 22673635 | AAGTATCATGAATACCCTCAGG | 1098 | RNA41 |
| 7 | 25237966 | AAGATCCTATATAACCCTCTGA | 1099 | RNA31 |
| 7 | 28451369 | AAAATACCTGAATAACCTGGGCC | 1100 | X60 |
| 7 | 36309411 | AAGTTACCAGAACAACCCTTAGG | 1101 | X40 |
| 7 | 43099959 | AAGAATTTGAATAACTCTCTAG | 1102 | RNA41 |
| 7 | 45063943 | AGGATACCTGAATCCCTCCAG | 1103 | RNA22 |
| 7 | 46108303 | GAGACACCTGAATAAGTGTCTGG | 1104 | X50 |
| 7 | 46457470 | AAGCTAGTGAAAAACCATCAGG | 1105 | RNA41 |
| 7 | 47819173 | AGGATACTTGAATATCCCTGCCT | 1106 | X60 |
| 7 | 49066063 | CAGATACTGAAAAACACTCTGG | 1107 | RNA31 |
| 7 | 49306954 | AAGAAATCTGGATAACCCCCAAT | 1108 | X60 |
| 7 | 60892285 | AACATACCCAAAAAAACCTCTGA | 1109 | X60 |
| 7 | 61597579 | AACATACCCAAAAAAACCTCTGA | 1109 | X60 |
| 7 | 62026418 | AACATACCCAAAAAAACCTCTGA | 1109 | X60 |
| 7 | 78658625 | AAAATATCCAAATAACCCCCTGG | 1110 | X50 |
| 7 | 81886792 | AAGATATCTGAATAATCATCAGG | 1111 | X30 |
| 7 | 88664778 | AAGATACTGAGTAACACTGAAG | 1112 | RNA41 |
| 7 | 89093321 | AAGTTACCTAAATAACTTTGG | 1113 | RNA32 |
| 7 | 89117479 | ACCATAATTGATTAACTCTCTGG | 1114 | X60 |
| 7 | 94742185 | AAGAAACCTAAGTAAACCTCTAA | 1115 | X60 |
| 7 | 96159184 | AAGATACATCATCACCCTCCTG | 1116 | RNA41 |
| 7 | 96499495 | AAGACACATAAGGAACCCTCATG | 1117 | X60 |
| 7 | 101395824 | GAGATACCTGAGCTGCCCTCAGC | 1118 | X60 |
| 7 | 104765414 | GAGATACCTAAATAACCTTCCAG | 1119 | X40 |
| 7 | 107527319 | AAGATACGAATAATCCTCCGA | 1120 | RNA22 |
| 7 | 114126788 | ATTAAACCAAAATAACCCTCGGG | 1121 | X50 |
| 7 | 117090821 | CACAAACCTTAATAACCCTCAAG | 1122 | X50 |
| 7 | 117393513 | AAGATAAAAAAATACCCCTAGGG | 1123 | X60 |
| 7 | 123985680 | AAGATATCTGAAAAAGTCTTGAG | 1124 | X60 |
| 7 | 124105262 | GAGATAACTGAATAACCATTTGG | 1125 | X40 |
| 7 | 125205185 | AAGATATCTGTAAAACCCTTCAG | 1126 | X50 |
| 7 | 125899502 | AACATACATGAAAAATCCTCAAC | 1127 | X60 |
| 7 | 127268120 | AAGGTAACTGGATAGCCATCTGC | 1128 | X60 |
| 7 | 132695120 | AAGAGACCTGAGTCACCCTGTCT | 1129 | X60 |
| 7 | 134060777 | AAGATAAATGAATTTCCTTCTGT | 1130 | X60 |
| 7 | 140628498 | AAGATACGGGAAATCCCCTTTGG | 1131 | X60 |
| 7 | 146763269 | CAGATATCAGATAACCCTATGG | 1132 | RNA41 |
| 7 | 153436410 | CAGATGCTTGTAAAACCATCAGG | 1133 | X60 |
| 7 | 153479243 | ACAGTAGTTGCATAACCCTCTGG | 1134 | X60 |
| 7 | 155749430 | AAGATTCAGCACTAACCCACAGG | 1135 | X60 |
| 7 | 157980250 | GAGATACTGAATTACCCTCTGG | 1136 | RNA21 |
| 8 | 4038549 | AAGAGACATGCATAATCTTCAGG | 1137 | X50 |
| 8 | 5643554 | AAGTAAACTGAATACCTTCTGG | 1138 | RNA41 |
| 8 | 7420667 | AAGAAACCACTATAACCATCAGT | 1139 | X60 |
| 8 | 7890852 | AAGAAACCACTATAACCATCAGT | 1139 | X60 |
| 8 | 19687879 | CAGATACTGTATAACCCTCAGA | 1140 | RNA31 |
| 8 | 21016005 | AATGTAAATGTATAACCCTCTGT | 1141 | X60 |
| 8 | 29936242 | AAGTTAACTGTAAAACAGCCTCAGG | 956 | DNA42 |
| 8 | 36495615 | AGGATACCATAATAACCAGCATG | 1142 | X60 |
| 8 | 43072291 | GCAATACCTGAATAACCCATTGT | 1143 | X60 |
| 8 | 47579895 | AAGATACCAGACCATCTCCCAGG | 1144 | X60 |
| 8 | 49597827 | AAGATCTGAATAGCACCCTGG | 1145 | RNA32 |
| 8 | 55071567 | AAGATCACAGGACAACCCTCCGC | 1146 | X60 |
| 8 | 55401326 | AAGATTCATGATAACCATCATG | 1147 | RNA41 |
| 8 | 60813307 | CAGGTACCTGGAGAACCCTAGAG | 1148 | X60 |
| 8 | 61779630 | AAGATACCTGAACACCCTACTGG | 1149 | X40 |
| 8 | 64267393 | TAGCTAGCTGATAACACTCTGG | 1150 | RNA41 |
| 8 | 65828227 | ATTATACTGAATAACCTTCCAG | 1151 | RNA41 |
| 8 | 66202960 | AAGTTACCTGCATCAAACTCATG | 1152 | X60 |
| 8 | 66947451 | AAGATACAGAATAACCCTCTAG | 1153 | RNA21 |
| 8 | 67331610 | GATATACTCTAATAACCCTCAAG | 1154 | X60 |
| 8 | 67691390 | AAGATACATAAATCACTTTCCAG | 1155 | X60 |
| 8 | 67694023 | AAAATGCCTAATAGACCTCTGG | 1156 | RNA41 |
| 8 | 68072298 | AAAACACCTGAAAAATCCTCCAC | 1157 | X60 |
| 8 | 73416526 | AAGAAACACTGAATGTCCCTCTTG | 1158 | DNA41 |
| 8 | 74109927 | GTGAAACCTAAATAACCCTCAGA | 1159 | X50 |
| 8 | 75900398 | AATATACCAGAATAGTTCTCAGT | 1160 | X60 |
| 8 | 76479079 | AAGATACTGAATATTCCTCAGG | 1161 | RNA21 |
| 8 | 78222169 | GAGATACTTGAATAACCATCTCA | 1162 | X50 |
| 8 | 80098340 | AAAGTACATTAAAAACCTTCTGG | 1163 | X60 |
| 8 | 80176030 | AAGATAATTGAATAGCCATCTTA | 1164 | X60 |
| 8 | 80682169 | AACAAACCCGTAAAACCCTCACG | 1165 | X60 |
| 8 | 83187784 | AAGATAGTTAAATATCCCCCTGT | 1166 | X60 |
| 8 | 88225407 | AAGATAATAAATAACCCTCAAG | 1167 | RNA31 |
| 8 | 91354172 | AAGCTACTTGATAACCCTATGG | 1168 | RNA31 |
| 8 | 102629148 | ATTATACCTGAATCCCTCAGG | 1169 | RNA22 |
| 8 | 106844104 | AAGTTATCCTAATAACCCTATGG | 1170 | X50 |
| 8 | 106983770 | ATGTTTACTGAATACCCCTCTGG | 1171 | X50 |
| 8 | 108954887 | AAGGGACCTGAAATTCCCTGAGG | 1172 | X60 |
| 8 | 115458181 | TAGATAACAGAATGACTCACAGG | 1173 | X60 |
| 8 | 119894846 | AAGATTCTGAATAGACCCCAGG | 1174 | RNA41 |
| 8 | 120688940 | AACATACCCAAATACTCTCAGG | 1175 | RNA41 |
| 8 | 121544316 | AAGATACCTCAATAAGACTCGGG | 1176 | X30 |
| 8 | 124209633 | TAGATACTGAAAATCTCTCAGG | 1177 | RNA41 |
| 8 | 124951793 | AGAATACAAGAATAACCCTGGGG | 1178 | X50 |
| 8 | 125028680 | AAGATACCTGAAATTCCTGCAGA | 1179 | X60 |
| 8 | 125768967 | CTGGTACTTAATAACCCTCAGG | 1180 | RNA41 |
| 8 | 130261595 | GAGATACCTAACACACACTCTGG | 1181 | X60 |
| 8 | 139484036 | ACAATACCTGAAAAACTCCCTTG | 1182 | X60 |
| 8 | 140142948 | CAGATACATTAAAACCCTCTGG | 1183 | RNA31 |
| 8 | 141381027 | CAGAACCCACAATAAGCCTCTGG | 1184 | X60 |
| 9 | 1548217 | AATAACATGAATAACACTCAAG | 1185 | RNA41 |
| 9 | 2362898 | AAGTAACCCAAATAACCCCAGG | 1186 | RNA41 |
| 9 | 3085581 | AAGATACAGAATTTCCCTTTGG | 1187 | RNA41 |
| 9 | 7499375 | AAGGTCCCTGAGCCACCCTCCAG | 1188 | X60 |
| 9 | 7701793 | AAGATCTGGAACAACTCTCTGG | 1189 | RNA41 |
| 9 | 9668247 | AACACTATTGAATAACCATCTGG | 1190 | X60 |
| 9 | 13025629 | GGGATACCTGAATATTCTCTGG | 1191 | RNA41 |
| 9 | 13825298 | AAGATGCCTGCACATCCCTCCTT | 1192 | X60 |
| 9 | 15566128 | AAGATACATGAATTACCAAAAAG | 1193 | X60 |
| 9 | 18157881 | AAGATGCTTGAAGTAGCTTCAGG | 1194 | X60 |
| 9 | 21582692 | TAGATACCTCTTATAACCCTCCAG | 1195 | DNA41 |
| 9 | 22799849 | AAGATACATCAATAAACCTGATT | 1196 | X60 |
| 9 | 22914887 | AAGATAGTCCTATAACTCTCTGG | 1197 | X60 |
| 9 | 27875283 | AAAATTAGTGGATAAACCTCTGG | 1198 | X60 |
| 9 | 28235239 | AAGATCCTGAAGAATTCTCTGA | 1199 | RNA41 |
| 9 | 29142022 | AGAATACCTGAACAACACTCTAG | 1200 | X50 |
| 9 | 33293321 | ATTAAACCTGAAACCCTCAGG | 1201 | RNA32 |
| 9 | 33907178 | AAGATAGCTAAATAACCTCTGA | 1202 | RNA31 |
| 9 | 36483605 | GAGACAACTGATTATCCCTCAAG | 1203 | X60 |
| 9 | 39480043 | AATTTACCAGAATAGCCCTCTGA | 1204 | X50 |
| 9 | 66885197 | AATTTACCAGAATAGCCCTCTGA | 1204 | X50 |
| 9 | 74963383 | AAGATACTGAAATACCCCTATGG | 1205 | X50 |
| 9 | 81338482 | AAGGTAAATGAGTAATCCTTTGG | 1206 | X60 |
| 9 | 82995745 | AAGATTACTTGAAGAAGCCTCTGA | 1207 | DNA41 |
| 9 | 85121255 | AAAGTAGCTGAATAAACCTCAAG | 1208 | X50 |
| 9 | 88846233 | AAGATAACTGAAATGCCTTCGAG | 1209 | X60 |
| 9 | 89929285 | ACTATTCCTGAATAACCCTTTGG | 1210 | X40 |
| 9 | 94468528 | AACATCCTGAATCAACCTCTGC | 1211 | RNA41 |
| 9 | 96771534 | GAAATACTGAGTACCCCTCAGG | 1212 | RNA41 |
| 9 | 97299066 | TAGATCTAGAATAAGCCTCTGG | 1213 | RNA41 |
| 9 | 100767516 | AAGATACCCAAATAACCATCAGA | 1214 | X40 |
| 9 | 107058386 | AAGACAGCTAACTAACTCTCGGG | 1215 | X50 |
| 9 | 107981569 | AAAGTAGCTGAACAGCCCTCAGG | 1216 | X50 |
| 9 | 109732394 | AAGATACCTCATTAATCATCACA | 1217 | X60 |
| 9 | 110545175 | AAGATATGGAATCAACCTCAGG | 1218 | RNA41 |
| 9 | 112078020 | AAGATACCTAATAACCACAGGG | 1219 | RNA31 |
| 9 | 114633862 | ACAGCACCTGAATCACACTCTGG | 1220 | X60 |
| 9 | 114864429 | AAGATACAAAAACAACCGACTGG | 1221 | X60 |
| 9 | 114970717 | AAGATACTCAATAAACCTCAAG | 1222 | RNA31 |
| 9 | 116496855 | ATGATAGTGAATAATTCTCAGG | 1223 | RNA41 |
| 9 | 123598985 | AAGACACATAAACCACTCTCAGG | 1224 | X60 |
| 9 | 125297490 | AAGATACTGGATAACCTTCCAG | 1225 | RNA31 |
| 9 | 125378327 | ATGATAATGAATAACCCTTGGG | 1226 | RNA31 |
| 9 | 125911093 | AAGACACTGAAAAACCCTCAAG | 1227 | RNA31 |
| 9 | 127691320 | AAGATAGCAGATTAGTCCTCAGT | 1228 | X60 |
| 9 | 127974450 | AAGAGATCGGGATAAGCCTTTGG | 1229 | X60 |
| 10 | 7147046 | TAAGTACCCAAATAAGCCTCTGG | 1230 | X60 |
| 10 | 7993040 | AAGATATCTGAATATGGACCAGG | 1231 | X60 |
| 10 | 11705444 | AAGATAGCTAAGAATCCCTCCAG | 1232 | X60 |
| 10 | 13360457 | TAGTTACAAGAATAACCCCAGG | 1233 | RNA41 |
| 10 | 14735911 | TAGATACATAATAGCCCTTTGG | 1234 | RNA41 |
| 10 | 15941531 | AAGAGCCCTGAATAAGCTTTAGG | 1235 | X50 |
| 10 | 16541599 | AAGATACTGAATAAACCCGAAG | 1236 | RNA41 |
| 10 | 21114219 | AAGATATCTGGATAATCCCCAAA | 1237 | X60 |
| 10 | 27972145 | AATATACCTTGAATACCCCTCCCT | 1238 | DNA41 |
| 10 | 32570562 | GGGATACCTTAACAACCCTGTGG | 1239 | X50 |
| 10 | 35982871 | AAAATACCTGACAGAACCACTGG | 1240 | X60 |
| 10 | 38157649 | AAAATACCTGAGTGACCCTAGAA | 1241 | X60 |
| 10 | 47125548 | AAGATTTGTGAATGACCCTAATG | 1242 | X60 |
| 10 | 50305665 | AAGATACCAGTATACTCTCTGG | 1243 | RNA31 |
| 10 | 51383143 | AAGATCCCTGAACAACACCAAAG | 1244 | X60 |
| 10 | 54571271 | AAGATACCAGTCCCACCCTCTTG | 1245 | X60 |
| 10 | 55277105 | TAGATACTCTCAATGACCCTCTGA | 1246 | DNA41 |
| 10 | 59699528 | AAGTTACTTAAATAGCTCTCTGC | 1247 | X60 |
| 10 | 62667353 | AAGATGCTTGAATTTCCCTAATG | 1248 | X60 |
| 10 | 82421522 | AAGAGATCTGGATCACCCCCAGC | 1249 | X60 |
| 10 | 83225274 | AAGATATTTGAATATTCCCTAGG | 1250 | X60 |
| 10 | 84218985 | TAATTACCAGAATAACCCTATGA | 1251 | X60 |
| 10 | 90306612 | AAGATACCTGAAATACCTGGGT | 1252 | RNA41 |
| 10 | 94280573 | AAGGTACCTGAGTAAACATTCTG | 1253 | X60 |
| 10 | 102517636 | AAGATACATGAATGAATTCAGG | 1254 | RNA41 |
| 10 | 102734271 | CAGATACCTAAGAACCCTGACG | 1255 | RNA41 |
| 10 | 106248382 | AGTATAACAGAATAACCCTATGT | 1256 | X60 |
| 10 | 118171466 | AACATATCTGAATATCTCTCTAA | 1257 | X60 |
| 10 | 119789592 | AAGATCCTGCCTCAACCTCTGG | 1258 | RNA41 |
| 10 | 120632845 | AAGATACCAAGCTAATCCTCTGC | 1259 | X60 |
| 10 | 121862898 | GAGATTTCTGAATAACCCACCCT | 1260 | X60 |
| 10 | 121868681 | GAGAGGCCTGAGTAGCCCACGGG | 1261 | X60 |
| 10 | 122274421 | AAGGAAACTGGAGAACTCTCCGG | 1262 | X60 |
| 10 | 130321175 | AAGATACTTGAATAACCATTTCA | 1263 | X50 |
| 10 | 131549720 | TGCTTACATGAATAACCCTCCAG | 1264 | X60 |
| 11 | 2376222 | TCTGTACCTGGATAACCCCCTGG | 1265 | X60 |
| 11 | 3277015 | AAGGTAACTGACAAACCATCTGA | 1266 | X60 |
| 11 | 3322831 | AAGGTAACTGACAAACCATCTGA | 1266 | X60 |
| 11 | 3502236 | AAAATAAATGAATAAAACTGTGG | 1267 | X60 |
| 11 | 4864723 | AAGTCACCAGTTTAACACTCAGG | 1268 | X60 |
| 11 | 7440757 | AAGATACCAGAATAAATCATTCTAG | 1269 | DNA42 |
| 11 | 12052022 | TAAATACATGAATAACCATTAGG | 1270 | X50 |
| 11 | 12138824 | AAAAGCCCTGATCAAACCTCAGG | 1271 | X60 |
| 11 | 12410906 | CACTTACCTGTATAACCTCAGG | 1272 | RNA41 |
| 11 | 14162519 | AAGATACTTGCAGAACCATCTGA | 1273 | X50 |
| 11 | 15458757 | AAGATCTGAATTTCCATCAGG | 1274 | RNA32 |
| 11 | 22689538 | AAGATATACATACTAACCCTCTGG | 1275 | DNA41 |
| 11 | 22781693 | GAGTACCATAATAAACCTCAGG | 1276 | RNA41 |
| 11 | 22831675 | AAAGAACCTAAATAAGCCTCTTG | 1277 | X60 |
| 11 | 25615424 | AAGACATTAAAATAACCCACAGG | 1278 | X60 |
| 11 | 25752459 | AATATACCTGGAAAACCCACACC | 1279 | X60 |
| 11 | 26574272 | AAGACACATGAATATCACTAATG | 1280 | X60 |
| 11 | 26949218 | AAGATATTGAATAACCCACATT | 1281 | RNA41 |
| 11 | 26997914 | AACATCCCAGAATGACCCACAGC | 1282 | X60 |
| 11 | 28826023 | AAGAAAGCTGGCTAGCTCTCTGG | 1283 | X60 |
| 11 | 32956605 | AAGATAACTGACTTGACCCTGTGG | 1284 | DNA41 |
| 11 | 36609914 | AAGATATGAATAAAACTCTGG | 1285 | RNA22 |
| 11 | 50574461 | AAGCTATCTGAGAAACCCTTTTG | 1286 | X60 |
| 11 | 58705310 | CAGATACCTAATAACCACACGG | 1287 | RNA41 |
| 11 | 63223967 | AAGATACCTGAAATTATTTCAGG | 1288 | X60 |
| 11 | 79064018 | TTGATACCTAAATACCCTGTGG | 1289 | RNA41 |
| 11 | 80186841 | TAAATACATGAATAATCCTCGGG | 1290 | X40 |
| 11 | 81449300 | AATTAACCTACATAACCCTCAGT | 1291 | X60 |
| 11 | 83977145 | AAGATTCTTAAATAACCCACTTT | 1292 | X60 |
| 11 | 87592156 | TAGAGACATGAAAAACCCTCCAA | 836 | X60 |
| 11 | 88339518 | AAGATTTAAGAATGAACCTCAGG | 1293 | X60 |
| 11 | 88892935 | AAGATACAGAATTTCCCTTTGG | 1187 | RNA41 |
| 11 | 92568878 | TGGATACCTGTCAACCCTCTGG | 1294 | RNA41 |
| 11 | 101689415 | AAGATCCGTGAATAAACCACAGC | 1295 | X50 |
| 11 | 104364397 | AACATACACGAATACCTCACAGG | 1296 | X60 |
| 11 | 106039497 | AAGATGATAAACAACCCTCTGG | 1297 | RNA41 |
| 11 | 109887670 | TAGATCCTAATTAACCCTCAGA | 1298 | RNA41 |
| 11 | 114155888 | AAGATACAGGTGTAGCCCTCCTG | 1299 | X60 |
| 11 | 117119305 | CTGATATGTGAAAAACCCTAAGG | 1300 | X60 |
| 12 | 3649402 | AACATACTGAACCAGCCTCTGG | 1301 | RNA41 |
| 12 | 3696467 | AAGACACGAGAAGAACCTTCTGA | 1302 | X60 |
| 12 | 3830100 | AAGACACTTGAATACCACTCTTT | 1303 | X60 |
| 12 | 4704350 | TACATACCTTGATAACCTTCAGG | 1304 | X50 |
| 12 | 8120901 | AAGTTACCTGAACAAACCTGCAA | 1305 | X60 |
| 12 | 9334202 | AAAAAACTAGAAGAACCCTTTGG | 1306 | X60 |
| 12 | 10687002 | AAGATCCCTGAATTTCCATCAGA | 1307 | X50 |
| 12 | 14689862 | AAAATACCTGCATACCCTCAGG | 1308 | RNA21 |
| 12 | 20320965 | AACTTACATGAATTACTCTTAGG | 1309 | X60 |
| 12 | 22372837 | AACATTTCTCAATATCCCTTTGG | 1310 | X60 |
| 12 | 26607410 | CAGATAACTGAATAACCCTCTGT | 1311 | X30 |
| 12 | 28330833 | TAAATACCTATAACCCACTGG | 1312 | RNA32 |
| 12 | 28550781 | GAGATACCTGAATATTCTTCCAA | 1313 | X60 |
| 12 | 32209572 | ATTATATCTGAATATCCTCTGG | 1314 | RNA41 |
| 12 | 45545836 | ATGATACCCAATACCCCTCCAG | 1315 | RNA41 |
| 12 | 47016633 | CAGATACCTGAATCTCCTTCTTT | 1316 | X60 |
| 12 | 49068780 | CAGTTACCTGGATAACTCCCTGG | 1317 | X50 |
| 12 | 54882194 | AAAATACTAGAATAACCAGCTTG | 1318 | X60 |
| 12 | 61361291 | AAGACTCAGGAATATCACTCAGG | 1319 | X60 |
| 12 | 66409389 | AAGATCCAGAAGAATCATCTGG | 1320 | RNA41 |
| 12 | 72361250 | AAAACACCTGAATAAATCCCATG | 1321 | X60 |
| 12 | 73122159 | AACATCACTGAAGAACCCTGAAG | 1322 | X60 |
| 12 | 74390201 | AAAATACCTCATAGCCCTCTGC | 1323 | RNA41 |
| 12 | 77975069 | AAAATAGCTTAATAATGCTCAGT | 1324 | X60 |
| 12 | 78463857 | AAGTTCCCTGAACACACCTCTGG | 1325 | X50 |
| 12 | 79756510 | ACTATACTGACTAACCCTCTAG | 1326 | RNA41 |
| 12 | 79913270 | AGAATATCTTCATAACCTTCGGG | 1327 | X60 |
| 12 | 81976639 | AGAAAACCTGAATAACCTATGG | 1328 | RNA41 |
| 12 | 87296671 | AAGATATTCAAATAACCCTGCTG | 1329 | X60 |
| 12 | 98856708 | GAGATACTGAATAACCTCTGGG | 1330 | RNA41 |
| 12 | 105221258 | AAGATAGCTGCTAACCCTGAGT | 1331 | RNA41 |
| 12 | 106415644 | AAAATAAATGAATAACCATCAGA | 1332 | X50 |
| 12 | 109568847 | AAGGTACTAGAAAACCCTGTGG | 1333 | RNA41 |
| 12 | 124304548 | AAGACACTGCCAAACCCTCCGG | 1334 | RNA41 |
| 12 | 128916634 | AAGATACATGAATGGCCAACGCG | 1335 | X60 |
| 12 | 131173514 | CAGAGACCTGCATAGCACTGAGG | 1336 | X60 |
| 12 | 131502294 | AAGATATCTGAAAATCCCTGCGC | 1337 | X50 |
| 13 | 20297900 | AAGAACACTGAGAAAACCCTCTGG | 1338 | DNA41 |
| 13 | 22964102 | AAGAAACCTCCATATCCATCGTG | 1339 | X60 |
| 13 | 24389118 | AAGAAACCTCCATATCCATCGTG | 1339 | X60 |
| 13 | 25266108 | AAGGTACCTTAACAACATTTTGG | 1340 | X60 |
| 13 | 26448879 | AAGGTGACTGAAGGACCCTTGGG | 1341 | X60 |
| 13 | 26553083 | ACGATAACTGAACAGCTCTCAAG | 1342 | X60 |
| 13 | 34458374 | AAGAGGGCTTAATAACCTTCAAG | 1343 | X60 |
| 13 | 39980150 | AAGATAACTGGATAGCTCTATGA | 1344 | X60 |
| 13 | 43747762 | AAGATTCAGCAATACCCTCTGG | 1345 | RNA41 |
| 13 | 50325631 | CAAAAACCAGAAAACCCTCAGG | 1346 | RNA41 |
| 13 | 60126783 | CATATACCAAAATAACCCATGGG | 1347 | X60 |
| 13 | 61481200 | AAAATACAAATAACCCTCAGA | 1348 | RNA32 |
| 13 | 66207288 | AAAATACCTGAATAAACCTGAAG | 1349 | X40 |
| 13 | 68049114 | AAGATAACTTAATAGGCCTCCAC | 1350 | X60 |
| 13 | 68754577 | AAGATGGCTGAAAAAGCCTTTCG | 1351 | X60 |
| 13 | 74802880 | AAGCTGACTGAAGAGCCCTTGGG | 894 | X60 |
| 13 | 77274559 | AAGTTACCAGATAACCCACAGG | 1352 | RNA31 |
| 13 | 84432474 | CAGATACCTGGTTAAACATCACG | 1353 | X60 |
| 13 | 86737129 | AAGATACATGAATGGCCAACAGG | 1354 | X50 |
| 13 | 92119936 | AAGCTACCAGCATAGCCCACTAG | 1355 | X60 |
| 13 | 109759900 | AAGAAAGCTGGAAAACACTCCAG | 1356 | X60 |
| 13 | 111418659 | AAGATGCCTGAGTCTCCCCCGTG | 1357 | X60 |
| 13 | 112083112 | AAGGAAACTGAATAACCCTCAGA | 1358 | X40 |
| 13 | 113351476 | CTGAGAACTGAATAAACCTCGAG | 1359 | X60 |
| 14 | 18485266 | AAGGTTACAGAATAAAACTCTGG | 1360 | X60 |
| 14 | 20357994 | CAGGATACTGAATAACCCTCAGA | 1361 | X60 |
| 14 | 21233079 | CCATTACATGAATAACCTTCAGG | 1362 | X60 |
| 14 | 22348176 | AAGACACCTGGATAACCATCAGG | 1363 | X30 |
| 14 | 26263145 | AAATTATGAAAAACCCTCAGG | 1364 | RNA32 |
| 14 | 30878091 | AAGATACTTGACAACTCTCTGA | 1365 | RNA41 |
| 14 | 31153973 | AAGATAGATGAATGACCCACTAC | 1366 | X60 |
| 14 | 35231283 | AAGATACTTAAATGATCCTTGGC | 1367 | X60 |
| 14 | 37392538 | AATATACCTAAATAACTTACAGC | 1368 | X60 |
| 14 | 40710593 | AAGATAACTGGATAGCCATATGC | 1369 | X60 |
| 14 | 40860782 | AACAAACATGAAAAACACTCAGC | 1370 | X60 |
| 14 | 41931495 | AAGATACCTAAATATATATCTGA | 1371 | X60 |
| 14 | 42141012 | AGGATGACTGAAAAATCCCCAGG | 1372 | X60 |
| 14 | 49513652 | AAGATGACTGCTTAACCCCCAGT | 1373 | X60 |
| 14 | 51112581 | AAGATACCAAAATGTAACTCAGG | 1374 | X60 |
| 14 | 52885591 | AAGATAACTTAAAAACTCTAAGG | 1375 | X50 |
| 14 | 52900831 | ACAGAACCTGAATAGCCCTAGGG | 1376 | X60 |
| 14 | 53020328 | AAGATGCCTGAACTAGTCCTTGGG | 1377 | DNA41 |
| 14 | 56099999 | AAAATAACTGAAAACCCTCAAC | 1378 | RNA41 |
| 14 | 59879739 | AACATACATCCACAACCATCAGG | 1379 | X60 |
| 14 | 64921531 | AAGATACATGAATAAGCACCATG | 1380 | X50 |
| 14 | 66348379 | CATATACTTGAATAACCAACTGG | 1381 | X50 |
| 14 | 68160233 | AAGATCTTAATAATCATCTGG | 1382 | RNA32 |
| 14 | 72604917 | AAGAAACCCGAGTCCCTCTGG | 1383 | RNA32 |
| 14 | 74660460 | AAGATATCTCATATCACTCAGG | 1384 | RNA41 |
| 14 | 74867740 | ACAATACCTTGAATAACCCACAAG | 1385 | DNA41 |
| 14 | 77627074 | AAGATACATAAATAACCTCACAG | 1386 | X60 |
| 14 | 80214772 | AAGTAACAGAATAATCCTAAGG | 1387 | RNA41 |
| 14 | 81206628 | GAATAACCTGAATAACCCCCAGA | 1388 | X60 |
| 14 | 82199597 | AAATTACCTAAATAACCCAAGGC | 1389 | X60 |
| 14 | 82935226 | AAGGTACCTGAATATTGTTCTGT | 1390 | X60 |
| 14 | 84727246 | AAGACAGCTGGGTATCTCTCTGG | 1391 | X60 |
| 14 | 87353900 | CTGATAGTGAATAAGCCTCAGG | 1392 | RNA41 |
| 14 | 87564479 | ATGATAGTGAATAAGTCTCAGG | 1393 | RNA41 |
| 14 | 90316482 | TAGATATTTGAATAACCATTTAG | 1394 | X60 |
| 14 | 94330884 | AAGATGCCCTGAGCAACCCTCCTG | 1395 | DNA41 |
| 14 | 100626641 | ATGATCTCTGAATGGCCTTCAGG | 1396 | X60 |
| 14 | 104781000 | CGTGTACCTGAATGACCCACGGG | 1397 | X60 |
| 14 | 106194663 | TAGATACTGAGAAAGCCTCTGG | 1398 | RNA41 |
| 15 | 26338242 | AAGTTATCTAAAAACCCTCTAG | 1399 | RNA41 |
| 15 | 26400480 | AAGATATCTGAAAAATTCTCAAA | 1400 | X60 |
| 15 | 36010542 | AAGTAAACTGAAAACCTTCTGG | 1401 | RNA41 |
| 15 | 37986317 | AATATAACTGAATAAAACTCTTT | 1402 | X60 |
| 15 | 38076935 | TAGCTACATGAAAACCCTGGGG | 1403 | RNA41 |
| 15 | 40609022 | ATAATACTGAATAACCCTTTGA | 1404 | RNA41 |
| 15 | 43079813 | CTTTTACCTGAATACCCTCAGG | 1405 | RNA41 |
| 15 | 44348352 | AAGATGACTGAAGAGCCCTTGGG | 1406 | X50 |
| 15 | 49430075 | ATGAGCCCAGAAGAACCCTCTTG | 1407 | X60 |
| 15 | 57756788 | GAGATACCTGAAAAATCCTGGCT | 1408 | X60 |
| 15 | 58607272 | TGTATACCAGAATCACCCTAGGG | 1409 | X60 |
| 15 | 60876750 | CAGATACCTGGTAACTCTCAGG | 1410 | RNA31 |
| 15 | 61064287 | AAATTACCTGGACAACCTTCGCG | 1411 | X60 |
| 15 | 63004747 | AAGATACATGAATAACCTTGTCA | 1412 | X50 |
| 15 | 63156318 | AAGATACATTAGAACCCTCTGT | 1413 | RNA41 |
| 15 | 69510497 | AAGATATATGAATGGCCCTGAAG | 1414 | X60 |
| 15 | 71127689 | AAGATACACAAACAGCCCACAGG | 1415 | X60 |
| 15 | 73446678 | AACATACCTGAAAAAACCTCAGC | 1416 | X40 |
| 15 | 74253079 | AGGATTCCAGAAGAAGCCTGTGG | 1417 | X60 |
| 15 | 75470662 | AAGAAACCTGGATTTACCTCTGT | 1418 | X60 |
| 15 | 77101670 | AGAATAGCTGAAGGACCCTGGGG | 1419 | X60 |
| 15 | 84875080 | AGGATGCCAGGGTAACCCACTGG | 1420 | X60 |
| 15 | 85440610 | TAGGTACCTGAATGACCTCAGG | 1421 | RNA31 |
| 15 | 85452623 | AAGATACCTGACATACCCTCCCC | 1422 | X50 |
| 15 | 90002805 | GAGATACATGAATGACCCTTTCA | 1423 | X60 |
| 15 | 94867496 | GTGATAGTGAATAACTCTCAGG | 1424 | RNA41 |
| 15 | 96462615 | AGGAAAGCTGAATAACTCTCTTA | 1425 | X60 |
| 15 | 96700894 | AAGAAACGCTAATAAACCTCAGG | 1426 | X50 |
| 15 | 99174006 | AACATTCCACACTAACCATCAGG | 1427 | X60 |
| 16 | 2950487 | AAGATACGAGAGAAACGCCCGGG | 1428 | X60 |
| 16 | 7926633 | CAATTACCAGAATAACCCACAGA | 1429 | X60 |
| 16 | 11910562 | AAGAGATTTGATAACCTTCTGG | 1430 | RNA41 |
| 16 | 14200710 | AAGATTCCTGATTCAGCCTCTGA | 1431 | X50 |
| 16 | 15502916 | AAGAAGCCAGACTAACACTGGGG | 1432 | X60 |
| 16 | 15969961 | CAAATAAATGAATAATCATCAGG | 1433 | X60 |
| 16 | 16048075 | AAGAGGCCTGACTCTCCCTCCAG | 1434 | X60 |
| 16 | 17024068 | AAGATACTTGTATAACCTCAAGA | 1435 | X60 |
| 16 | 17094952 | AACATACCTGAACAACCCTCAGG | 1436 | X20 |
| 16 | 22614186 | AAGATATTTATATACCCCTCCAG | 1437 | X60 |
| 16 | 24555817 | TAGTTACATGAAGAAACCTCTAG | 1438 | X60 |
| 16 | 25905845 | AAGATACATGCGTGAAGCCTCTGG | 1439 | DNA41 |
| 16 | 26382131 | ATGGTACCTGTACAAACTTCAGG | 1440 | X60 |
| 16 | 27966927 | AAGGCACCTGAAAGCTCTCTGG | 1441 | RNA41 |
| 16 | 35693983 | GAGATACCTGGAAAACCCCAGGC | 1442 | X60 |
| 16 | 46657396 | ATGTTAACAGAAGACCCCTCTGG | 1443 | X60 |
| 16 | 47691992 | TAGATAACTGGATACCCCACTGC | 1444 | X60 |
| 16 | 49245974 | AAAATTCCTGTCCAGCCCTCTGG | 1445 | X60 |
| 16 | 49984669 | AGGATGCCTGAAAAAACCTCAAA | 1446 | X60 |
| 16 | 51935176 | AAGATACATGAGAACCCTTTGC | 1447 | RNA41 |
| 16 | 52525199 | AAGATACATGAATAGCCCTCCAC | 1448 | X40 |
| 17 | 5340518 | TAAATACCTGAATAACCCATAGT | 1449 | X50 |
| 17 | 5857462 | TATATACATGTATAACCCACAGG | 1450 | X50 |
| 17 | 6194882 | AAGATACATTCTTAGCCCTCAAG | 1451 | X60 |
| 17 | 7932420 | AAGAAACCTTGTGAACCCTCAGT | 1452 | X60 |
| 17 | 14407307 | AAGAAATGGATAGCCCTCTGG | 1453 | RNA32 |
| 17 | 21332996 | AAAATAGCTTAAAAAGCCTGTGG | 1454 | X60 |
| 17 | 27457685 | AGGGTGCCCCAACAACCCTCGGG | 1455 | X60 |
| 17 | 28706042 | AAGAAATGTGGGTAAGCCTCAGG | 1456 | X60 |
| 17 | 29645114 | ATCATATCTGAATAACTCTCAAC | 1457 | X60 |
| 17 | 32458400 | AACAAGCCTGTATAACCCTCATG | 1458 | X50 |
| 17 | 34969762 | GTGATACTGAATAAGTCTCAGG | 1459 | RNA41 |
| 17 | 37872545 | AACATACATGAATAATCTTCAAA | 1460 | X60 |
| 17 | 39300993 | ATTATACCTCAATATCCCTCTGG | 1461 | X40 |
| 17 | 44931191 | AAGATACATGAAAAACACTGGCT | 1462 | X60 |
| 17 | 47455028 | AACATACATGAATAATCTTCAAA | 1460 | X60 |
| 17 | 47541148 | AAGATACCTGTACAACACTATAC | 1463 | X60 |
| 17 | 54308512 | CAGATACCTCATTTACCCTGATG | 1464 | X60 |
| 17 | 65806019 | CAGATACTTATAACCCTCTGG | 1465 | RNA22 |
| 17 | 67990176 | AAAATACTTGAAAAATCCCTCAGT | 1466 | DNA41 |
| 17 | 70972434 | AAGATCAAGAATAACTGTCAGG | 1467 | RNA41 |
| 17 | 81310828 | AAGACACTTGTCTAGTCCTCTGG | 1468 | X60 |
| 18 | 8119646 | AAGAATCCGGAAAAACCCTATGC | 1469 | X60 |
| 18 | 10478571 | AAGACAGCTGGAGAACTCTCAGG | 1470 | X50 |
| 18 | 11443150 | AAGAAAAATGAACAAACCTCAGA | 1471 | X60 |
| 18 | 11651294 | AAGTTACGTGAATAGGACTCAGT | 1472 | X60 |
| 18 | 13336259 | AAGATAAAGAACAACTCTCTGG | 1473 | RNA41 |
| 18 | 21942917 | CAGATACACAGATAACCCCCAGG | 1474 | X60 |
| 18 | 24883127 | AAGAAACTTGAAAAATCCCAGG | 1475 | RNA41 |
| 18 | 35027674 | CAGATAACAGAAAAACCCTGTTG | 1476 | X60 |
| 18 | 36792668 | AAGATACCCAGATCCCCCTCCAG | 1477 | X60 |
| 18 | 36915438 | TAGATATTCTGAATATACCTCTGG | 1478 | DNA41 |
| 18 | 39891882 | CAGATACATGAAATAATCCTCCAG | 1479 | DNA41 |
| 18 | 40348238 | AGTCATCCTGAATAACCCTCATG | 1480 | X60 |
| 18 | 47612935 | GCCATACCAAATAACCCTCTGG | 1481 | RNA41 |
| 18 | 49237013 | AAGATACCTGGATAAGCAACTGC | 1482 | X50 |
| 18 | 49759577 | AAGAAACCTATAGAACCCTGAGT | 1483 | X60 |
| 18 | 52354807 | AAGAAAACAGAATAAACCTCTAA | 1484 | X60 |
| 18 | 53136651 | AAGATACCTTATCAACCCTAAAG | 1485 | X50 |
| 18 | 54113085 | CAGAAATATAAAAAACCCTCAGG | 1486 | X60 |
| 18 | 55667190 | AAGATTCAAGAAAGACCCTCTGC | 1487 | X60 |
| 18 | 56622476 | TAAATACTGAATAACCCTGTGA | 1488 | RNA41 |
| 18 | 58463120 | GAGATCTCAGCATAACTCTCTGG | 1489 | X60 |
| 18 | 66313025 | AAGATACCTTATTTACCTATGG | 1490 | RNA41 |
| 18 | 68281088 | TTCATACCTAAATAACCCTTAGA | 1491 | X60 |
| 18 | 69322487 | AAGATACCTGAATAACCTAAGAC | 1492 | X50 |
| 18 | 74469327 | AAGATACATAATAATCATCTGT | 1493 | RNA41 |
| 18 | 77464690 | AAGAGCCCTTGCTAACCATCTGG | 1494 | X60 |
| 19 | 11998269 | AAAGTATCTGAATAACACTTCTG | 1495 | X60 |
| 19 | 12455264 | AGCCTACCTAAATAGCCCTAGGG | 1496 | X60 |
| 19 | 27693648 | CAGACACCTGAATGACCCCAGGC | 1497 | X60 |
| 19 | 28546228 | CACTGACCTGAATCACCCCCAGG | 1498 | X60 |
| 19 | 37641018 | GAAATACTGAATAATCCTCAGG | 1499 | RNA31 |
| 19 | 38143521 | AAGACACAGAAAGATCCCTCTGG | 1500 | X60 |
| 19 | 42798163 | AAGGTACCAGATGAGCCCTTGGG | 1501 | X60 |
| 19 | 45644796 | AGGATACCTCCCAAATCCTCTGG | 1502 | X60 |
| 19 | 46147476 | CAAATACTTGAAAAGCCCTCGAG | 1503 | X60 |
| 19 | 52963761 | TAAATATGAATGACCCTCAGG | 1504 | RNA32 |
| 19 | 53485175 | CAGATATCTGAAGATCCCTCCAG | 1505 | X50 |
| 20 | 1471262 | ACAGAACCTGTATAACCCTCCAG | 1506 | X60 |
| 20 | 2545286 | AAGAAATCTAGAATACCCCTAGGG | 1507 | DNA41 |
| 20 | 6093655 | AAGTTAAATGAATGACCCTGACCGG | 1508 | DNA42 |
| 20 | 7232430 | AAGATATTTGATCAACCCTTGGA | 1509 | X60 |
| 20 | 10350390 | AGGTAACATCAATATCCCTCCGG | 1510 | X60 |
| 20 | 12411793 | AACGTACCTGAATAACTCATAAG | 1511 | X60 |
| 20 | 13449167 | AAGATACCAGCATAGTCCTCCTG | 1512 | X50 |
| 20 | 13559179 | AAGATATCTGAAGAGCCTTCCCA | 1513 | X60 |
| 20 | 18449496 | AAGATACCTGAATTTACCATGAG | 1514 | X60 |
| 20 | 19443923 | AAGATACTTTATTAACTCTCAAG | 1515 | X50 |
| 20 | 22704701 | TAGATATGTGAATTAACTTCTGG | 1516 | X60 |
| 20 | 23658111 | AAGATACCTGATCACACATCAGA | 1517 | X60 |
| 20 | 37569891 | CAGATACCTCAATAACCCTGATG | 1518 | X40 |
| 20 | 44858917 | AAGATACTTGGATAATGCTTGGT | 1519 | X60 |
| 20 | 45794486 | AAGGTATCTGAATTACCCTCAAG | 1520 | X40 |
| 20 | 52287275 | CTGAGACCTGAGTAACTCTCATG | 1521 | X60 |
| 20 | 56292197 | AAGAAAATGAATAACCCTACAG | 1522 | RNA41 |
| 20 | 60198378 | TAGATACATGAAAAACCCTTCAG | 1523 | X50 |
| 20 | 60509505 | TAGATGCTTAAATGACCCTCTGC | 1524 | X60 |
| 21 | 17021098 | TAGGATCCTGGATAACCCTCCAG | 1525 | X60 |
| 21 | 17566032 | TTGATACTTGAATAACCATCTGA | 1526 | X50 |
| 21 | 17907925 | AAGAAACCAATAACCCTCAGG | 1527 | RNA12 |
| 21 | 19274949 | AAGGAACCAGAATTACTCTCAGT | 1528 | X60 |
| 21 | 24464330 | CAGAAACCAGAATAACCTTCAGG | 1529 | X40 |
| 21 | 24537041 | AAAATTCCTGAATAGCTCTCTGG | 1530 | X40 |
| 21 | 26666529 | TAGAGACATGAAAAACCCTCCAA | 836 | X60 |
| 21 | 30710727 | ATGATAGTGAATAACACTCATG | 1531 | RNA41 |
| 21 | 30757521 | AGGATACAGAATATCCATCTGG | 1532 | RNA41 |
| 21 | 31767749 | AATCTACCTGAAAAGCCCTCTGG | 1533 | X40 |
| 21 | 33249604 | CTGATACCAGATAACCCTGAGG | 1534 | RNA41 |
| 21 | 45566319 | CAGATATCTGAATAACCCACCAG | 1535 | X40 |
| 21 | 46274280 | AAGATACATGGATAATGTTCAGG | 1536 | X50 |
| 21 | 46379614 | AAGAAACATGAAGAAAACTCAGC | 1537 | X60 |
| 22 | 15415612 | AAGGTTACAGAATAAAACTCTGG | 1360 | X60 |
| 22 | 16210764 | AAAATACATGGAAAATCCTCATG | 1538 | X60 |
| 22 | 18016369 | ATTATACCTGAATAAACCTGACT | 1539 | X60 |
| 22 | 22356999 | GATTTACCAGAAAAACCCTCTGG | 1540 | X50 |
| 22 | 22409053 | GATTGACCAGAATAACCCTCTGG | 1541 | X50 |
| 22 | 26261319 | AAGATACATCGAATAACCCTTCTA | 1542 | DNA41 |
| 22 | 31956781 | AAGGCAACTGAAGATCCTTCAGG | 1543 | X60 |
| 22 | 48095647 | AAGATATCTGAATTCAGCTCTTG | 1544 | X60 |
| X | 3121703 | AAGAAAACAGAATAAACCTCTCA | 1545 | X60 |
| X | 3288787 | AAGATAGCTGATGAAATATCAGG | 1546 | X60 |
| X | 6286346 | ATGATAGTGAATAAGCCTCAGG | 1547 | RNA31 |
| X | 15276107 | AAGATTCATGTACAAACCTCATG | 1548 | X60 |
| X | 18754961 | AAGACACATGAAGAAAACTGAGG | 1549 | X60 |
| X | 19389428 | AAGTTGACTGAAACCCTCTGG | 1550 | RNA32 |
| X | 25123524 | GAGATACCCTAGATAACCCTCAGA | 1551 | DNA41 |
| X | 33500389 | GTGATAACTGAATAACCCTGCTC | 1552 | X60 |
| X | 57574816 | GAGATAACTGCATAGCCCTAGGT | 1553 | X60 |
| X | 58085053 | GAGACACCTGAACGACCTCAGG | 1554 | RNA41 |
| X | 58098997 | AAGACACCTGACTAACCCCAGGC | 1555 | X50 |
| X | 58100889 | AAGACACCTGACTAACCCCAGGC | 1555 | X50 |
| X | 58123415 | TAGACACCTGAACAACCCCAGGC | 1556 | X60 |
| X | 58198267 | AAGACACCTGGCTGACCCCAGG | 1557 | RNA41 |
| X | 58199277 | AAGACACCTGAGCAACCTCAGG | 1558 | RNA31 |
| X | 58401983 | AAGATATCTGAGCAACACTCTGT | 1559 | X50 |
| X | 63325513 | GAGATATGTGAATAAAACTCTGA | 1560 | X60 |
| X | 63786600 | CAGAAGCTGAATGACCCTTTGG | 1561 | RNA41 |
| X | 63945361 | AAAATAACTGATAAATCCTCTGA | 1562 | X60 |
| X | 65679966 | AAGCTCCTGCATAGCCCACAGG | 1563 | RNA41 |
| X | 70140322 | AACATACCTAAATATACCCTGG | 1564 | RNA41 |
| X | 70754250 | AAGCTGACTGAAGAGCCCTTGGG | 894 | X60 |
| X | 72198434 | TAGATACCTGACTTTCCCACTTG | 1565 | X60 |
| X | 73418101 | AAGATTCCTGAAGCCTCCTCAGA | 1566 | X60 |
| X | 73819519 | CATATACTGAATAACCATCTGG | 1567 | RNA31 |
| X | 84823869 | AAGATATCTGAAATGCCCTAGAG | 1568 | X60 |
| X | 89194879 | AAATAGCCTGAATAACCCTAGTG | 1569 | X60 |
| X | 89316606 | AACAAACATGAATAACACTAAGC | 1570 | X60 |
| X | 91030898 | AAGAAATCTGACAAACCTTTAGG | 1571 | X60 |
| X | 91177495 | GTGATACTGAATAAGTCTCAGG | 1459 | RNA41 |
| X | 99969578 | AAGATCCAGAAGAACTCTCTGA | 1572 | RNA41 |
| X | 107292941 | TAGATACCTAAATAGCCCATGGG | 1573 | X50 |
| X | 108681302 | AAGAAACCTCTATAAGCCTCTTA | 1574 | X60 |
| X | 109943949 | AATCTACTGAATAACTCTCAGG | 1575 | RNA31 |
| X | 111810669 | ATGAATACTGAATAACATTCAGG | 1576 | X60 |
| X | 113640910 | AAGATACCAATAACCCTCAAA | 1577 | RNA22 |
| X | 117399450 | AATGTACCCGAACAACCCTCAGG | 1578 | X40 |
| X | 120228774 | CAGATAGCTGAAAGAACACTCAGG | 1579 | DNA41 |
| X | 125113165 | AACATAACTGAATAACCATAAGG | 1580 | X40 |
| X | 126715614 | AATCAACCTGAATATCCATCAGT | 1581 | X60 |
| X | 130340267 | AAGATACCCATTCACCCTCTGG | 1582 | RNA31 |
| X | 130463899 | AAAGAACCTAAAAAACCCTCTTG | 1583 | X60 |
| X | 132229997 | AAGATAGGGGAAAGCCCTCTGG | 1584 | RNA41 |
| X | 138021160 | AAGGCAAATGAATAACCCACAGC | 1585 | X60 |
| X | 139830410 | AAAATACAAATAACCCTCAGT | 1586 | RNA32 |
| X | 144953782 | AAGATCCAGAAGAATTCTCTGG | 1587 | RNA41 |
| X | 150328565 | AGAATACCTGAATACCCCCAGA | 1588 | RNA41 |
| X | 154034869 | CAAATACCTTAATCACCATGAGG | 1589 | X60 |
| Y | 4605941 | AAGAAATCTGACAAACCTTTAGG | 1571 | X60 |
| Y | 4641256 | GTGATACTGAATAAGTCTCAGG | 1459 | RNA41 |
| Y | 6194908 | AAGATGCCAACATAAAGCTCAGG | 1590 | X60 |
| Y | 13359292 | TAAATACCTATAACCCTGAGG | 1591 | RNA32 |
| Y | 16565563 | AGCACACATGAATAACCCTAAGG | 1592 | X50 |
| Y | 22230617 | AAGATCCCAGAATAACTACTGG | 1593 | RNA41 |

TABLE 14
ANGPTL3 gRNA off-target site validation in human primary hepatocytes

| | | Editing % | | |
|---|---|---|---|---|
| Chromosome | Location | treated | control | Net Editing % |
| 1 | 62604219 | 61.93 | 0.39 | 61.54 |
| 1 | 2.28E+08 | 0.75 | 0.81 | −0.06 |
| 1 | 2E+08 | 0.1 | 0.03 | 0.07 |
| 1 | 59422147 | 0.32 | 0.4 | −0.08 |
| 1 | 76436411 | 0.3 | 0.26 | 0.04 |
| 1 | 19936662 | 0.26 | 0.2 | 0.06 |
| 1 | 1.8E+08 | 0.47 | 0.55 | −0.08 |
| 2 | 1.7E+08 | 0.18 | 0.1 | 0.08 |
| 2 | 17555591 | 0.09 | 0.12 | −0.03 |
| 2 | 87443936 | 0.27 | 0.26 | 0.01 |
| 2 | 2.26E+08 | 0.13 | 0.19 | −0.06 |
| 2 | 1.22E+08 | 0.48 | 0.62 | −0.14 |
| 2 | 1.84E+08 | 0.26 | 0.36 | −0.1 |
| 2 | 1.88E+08 | 0.26 | 0.22 | 0.04 |
| 3 | 8738135 | 0.28 | 0.23 | 0.05 |
| 3 | 539550 | 1.24 | 0.44 | 0.8 |
| 3 | 1.21E+08 | 0.26 | 0.27 | −0.01 |
| 3 | 99319950 | 0.21 | 0.22 | −0.01 |
| 4 | 1.73E+08 | 0.22 | 0.22 | 0 |
| 4 | 1.44E+08 | 0.48 | 0.54 | −0.06 |
| 4 | 51965380 | 0.09 | 0.08 | 0.01 |
| 4 | 1.01E+08 | 0.09 | 0.08 | 0.01 |
| 4 | 26200297 | 0.14 | 0.11 | 0.03 |
| 4 | 74170265 | 0.54 | 0.3 | 0.24 |
| 5 | 1.14E+08 | 0.16 | 0.13 | 0.03 |
| 5 | 1.56E+08 | 0.47 | 0.59 | −0.12 |
| 5 | 8704833 | 0 | 0 | 0 |
| 5 | 16404802 | 0.15 | 0.19 | −0.04 |
| 6 | 1.13E+08 | 0.09 | 0.11 | −0.02 |
| 6 | 45506487 | 0.3 | 0.36 | −0.06 |
| 6 | 89636030 | 0.28 | 0.3 | −0.02 |
| 6 | 18241159 | 0.08 | 0.1 | −0.02 |
| 6 | 1.05E+08 | 0.45 | 0.39 | 0.06 |
| 6 | 84651006 | 0.15 | 0.11 | 0.04 |
| 6 | 1.26E+08 | 0.17 | 0.14 | 0.03 |
| 6 | 1.34E+08 | 0.23 | 0.29 | −0.06 |
| 6 | 22811364 | 0.3 | 0.31 | −0.01 |
| 6 | 6543792 | 0.08 | 0.15 | −0.07 |
| 6 | 3993855 | 0.39 | 0.45 | −0.06 |
| 6 | 51857715 | 0.19 | 0.29 | −0.1 |
| 6 | 90026983 | 0.28 | 0.31 | −0.03 |
| 6 | 1.48E+08 | 0.15 | 0.17 | −0.02 |
| 6 | 1.46E+08 | 0.32 | 0.35 | −0.03 |
| 7 | 1.58E+08 | 0.5 | 0.45 | 0.05 |
| 7 | 1.05E+08 | 0.4 | 0.61 | −0.21 |
| 7 | 18326887 | 0.03 | 0 | 0.03 |
| 7 | 81886792 | 0.23 | 0.47 | −0.24 |
| 7 | 1.24E+08 | 0.62 | 0.44 | 0.18 |
| 7 | 1.14E+08 | 0.41 | 0 | 0.41 |
| 8 | 66947451 | 17.71 | 0.67 | 17.04 |
| 8 | 19687879 | 0.19 | 0.26 | −0.07 |
| 8 | 76479079 | 0.44 | 0.44 | 0 |
| 8 | 1.09E+08 | 0.14 | 0.23 | −0.09 |
| 8 | 88225407 | 0.44 | 0.57 | −0.13 |
| 8 | 1.4E+08 | 0.29 | 0.34 | −0.05 |
| 8 | 1.22E+08 | 0.42 | 0.57 | −0.15 |
| 9 | 89929285 | 0.15 | 0.21 | −0.06 |
| 9 | 1.01E+08 | 0.41 | 0.49 | −0.08 |
| 10 | 32570562 | 0.17 | 0.23 | −0.06 |
| 11 | 2376222 | 0.05 | 0.11 | −0.06 |
| 11 | 58705310 | 0.36 | 0.39 | −0.03 |
| 11 | 80186841 | 0.24 | 0.24 | 0 |
| 11 | 12052022 | 0.35 | 0.32 | 0.03 |
| 12 | 26607410 | 0.41 | 0.46 | −0.05 |
| 12 | 64120945 | 0.26 | 0.27 | −0.01 |
| 12 | 98856708 | 0.34 | 0.42 | −0.08 |
| 12 | 71164415 | 0.42 | 0.37 | 0.05 |
| 13 | 60126783 | 0.23 | 0.22 | 0.01 |
| 13 | 1.12E+08 | 0.59 | 0.76 | −0.17 |
| 14 | 20357994 | 2.53 | 0.43 | 2.1 |
| 14 | 66348379 | 0.21 | 0.22 | −0.01 |
| 14 | 81206628 | 0.28 | 0.28 | 0 |
| 14 | 22348176 | 0.74 | 0.68 | 0.06 |
| 14 | 76759328 | 0.07 | 0.04 | 0.03 |
| 15 | 94867496 | 0.32 | 0.42 | −0.1 |
| 15 | 60876750 | 0.3 | 0.27 | 0.03 |
| 15 | 43079813 | 100 | 99.93 | 0.07 |
| 16 | 17094952 | 7.87 | 1.57 | 6.3 |
| 16 | 52525199 | 0.83 | 0.69 | 0.14 |
| 17 | 39300993 | 0.08 | 0.11 | −0.03 |
| 18 | 21942917 | 0.48 | 0.65 | −0.17 |
| 18 | 47612935 | 0.24 | 0.3 | −0.06 |
| 19 | 37641018 | 0.4 | 0.34 | 0.06 |
| 20 | 60198378 | 0.4 | 0.35 | 0.05 |
| 21 | 45566319 | 0.26 | 0.35 | −0.09 |
| 21 | 17566032 | 0.15 | 0.18 | −0.03 |
| 21 | 17021098 | 0.19 | 0.17 | 0.02 |
| 22 | 18016369 | 0.08 | 0.21 | −0.13 |
| X | 1.07E+08 | 0.25 | 0.29 | −0.04 |
| X | 1.17E+08 | 0.24 | 0.2 | 0.04 |
| X | 21471705 | 0.42 | 0.4 | 0.02 |
| X | 73819519 | 0.25 | 0.3 | −0.05 |
| X | 6286346 | 0.58 | 0.83 | −0.25 |
| X | 1.14E+08 | 0.38 | 0.38 | 0 |

[0717] Modifications and/or truncations to either the spacer or tracr portion of the gRNA was assessed by alteration of the gRNA GA100 spacer (5′-AAGATACCTGAATAACCCTC-3′ (SEQ ID NO: 15)) (Table 15). The modifications to the guide can serve to improve on-target editing efficiency and/or improve off-target editing efficiency. Additionally, four different ABE8.8 mRNAs were assessed (MA004, MA040, MA041, MA045; Table 23), in two different experiments (separated in the table below). Each of the gRNAs with an equivalent amount of in vitro transcribed ABE8.8 mRNA (1:1 ratio by weight) were co-transfected into primary human hepatocytes and primary cynomolgus hepatocytes at 5000, 2500, and 1250 ng/RNA/mL and processed as described.

TABLE 15
gRNA and/or mRNA modifications improve gRNA specificity

| | | | | Human Primary Hepatocytes—Editing % at | | | | | |
|---|---|---|---|---|---|---|---|---|---|
| | | SEQ | | Position 6 (Dose, Replicate #) | | | | | |
| | Protospacer | ID | | 5000, | 5000, | 2500, | 2500, | 1250, | 1250, |
| gRNA | (5′-3′) | NO: | mRNA | rep 1 | rep 2 | rep 1 | rep 2 | rep 1 | rep 2 |
| GA441 | AAGATACCTG | 15 | MA004 | ND | 47.29 | 52.04 | 49.69 | 41.45 | 42.72 |
| | AATAACCCTC | | | | | | | | |
| GA442 | AAGATACCTG | 15 | MA004 | 35.34 | 32.48 | 35.2 | 35.78 | 31.54 | 27.9 |
| | AATAACCCTC | | | | | | | | |
| GA472 | AAGATACCTG | 15 | MA004 | 37.65 | 36.08 | 37.98 | 32.46 | 28.85 | 32.1 |
| | AATAACCCTC | | | | | | | | |
| GA473 | AAGATACCTG | 15 | MA004 | 37.9 | 31.23 | 37.55 | 35.45 | 28.07 | 26.92 |
| | AATAACCCTC | | | | | | | | |
| GA474 | AAGATACCTG | 15 | MA004 | 30.59 | 39.55 | 37.46 | 37.26 | 28.79 | 25.37 |
| | AATAACCCTC | | | | | | | | |
| GA475 | AGATACCTGA | 248 | MA004 | 36.82 | 37.79 | 37.96 | 40.49 | 28.11 | 28.81 |
| | ATAACCCTC | | | | | | | | |
| GA476 | GATACCTGAAT | 249 | MA004 | 37.2 | 37.7 | 42.27 | 40.86 | 31.97 | 31.48 |
| | AACCCTC | | | | | | | | |
| GA477 | ATACCTGAATA | 250 | MA004 | 25.59 | 24.9 | 27.3 | 25.25 | 19.23 | 19.19 |
| | ACCCTC | | | | | | | | |
| GA441 | AAGATACCTG | 15 | MA040 | 43.09 | 45.18 | 29.68 | 47.56 | 41.53 | 35.98 |
| | AATAACCCTC | | | | | | | | |
| GA442 | AAGATACCTG | 15 | MA040 | 41.76 | 43.74 | 41.43 | 41.19 | 31.04 | 32.85 |
| | AATAACCCTC | | | | | | | | |
| GA472 | AAGATACCTG | 15 | MA040 | 41.15 | 42.31 | 40.66 | 40.5 | 31.38 | 28.23 |
| | AATAACCCTC | | | | | | | | |
| GA473 | AAGATACCTG | 15 | MA040 | 39.8 | 39 | 40.85 | 34.58 | 29.19 | 28.19 |
| | AATAACCCTC | | | | | | | | |
| GA474 | AAGATACCTG | 15 | MA040 | 38.99 | 33.48 | 30.43 | 34.63 | 24.83 | 22.76 |
| | AATAACCCTC | | | | | | | | |
| GA475 | AGATACCTGA | 248 | MA040 | 37.64 | 39.98 | 37.03 | 39.31 | 28.67 | 26.83 |
| | ATAACCCTC | | | | | | | | |
| GA476 | GATACCTGAAT | 249 | MA040 | 41.08 | 39.14 | 37.69 | 38.01 | 28.8 | 27.26 |
| | AACCCTC | | | | | | | | |
| GA477 | ATACCTGAATA | 250 | MA040 | 20.51 | 19.43 | 22.64 | 22.01 | 15.69 | 16.61 |
| | ACCCTC | | | | | | | | |
| GA441 | AAGATACCTG | 15 | MA041 | 28.97 | 20.87 | 31.35 | 37.98 | 27.9 | 27.48 |
| | AATAACCCTC | | | | | | | | |
| GA442 | AAGATACCTG | 15 | MA041 | 26.39 | 25.73 | 29.01 | 27.38 | 20.18 | 20.53 |
| | AATAACCCTC | | | | | | | | |
| GA472 | AAGATACCTG | 15 | MA041 | 27.32 | 29.91 | 28.54 | 28.29 | 23.4 | 23.15 |
| | AATAACCCTC | | | | | | | | |
| GA473 | AAGATACCTG | 15 | MA041 | 19.75 | 19.89 | 19.6 | 17.62 | 14.97 | 14.04 |
| | AATAACCCTC | | | | | | | | |
| GA474 | AAGATACCTG | 15 | MA041 | 22.56 | 20.87 | 18.86 | 17.38 | 15.4 | 14.14 |
| | AATAACCCTC | | | | | | | | |
| GA475 | AGATACCTGA | 248 | MA041 | 31.47 | 29.18 | 27.34 | 23.98 | 17.67 | 18.89 |
| | ATAACCCTC | | | | | | | | |
| GA476 | GATACCTGAAT | 249 | MA041 | 31.01 | 33.84 | 29.37 | 28.62 | 19.77 | 21.75 |
| | AACCCTC | | | | | | | | |
| GA477 | ATACCTGAATA | 250 | MA041 | 3.7 | 2.53 | 3.92 | 3.47 | 2.96 | 3.24 |
| | ACCCTC | | | | | | | | |
| | | | | Human Primary Hepatocytes-Editing % at | | | | | |
| Verve | | SEQ | Verve | Position 6 (Dose, Replicate #) | | | | | |
| gRNA | Photospacer | ID | mRNA | 5000, | 5000, | 2500, | 2500, | 1250, | 1250, |
| ID | (5′-3′) | NO: | ID | rep 1 | rep 2 | rep 1 | rep 2 | rep 1 | rep 2 |
| GA441 | AAGATACCTG | 15 | MA004 | 33.26 | 34.23 | 42 | 36.89 | 34.57 | 31.5 |
| | AATAACCCTC | | | | | | | | |
| GA442 | AAGATACCTG | 15 | MA004 | 27.1 | 35.52 | 36.03 | 32.59 | 28.21 | 32.14 |
| | AATAACCCTC | | | | | | | | |
| GA472 | AAGATACCTG | 15 | MA004 | 32.58 | 22.71 | 27.15 | 38.51 | 29.44 | 32.3 |
| | AATAACCCTC | | | | | | | | |
| GA473 | AAGATACCTG | 15 | MA004 | 28.63 | 27.84 | 18.2 | 36.76 | 31.84 | 29.58 |
| | AATAACCCTC | | | | | | | | |
| GA474 | AAGATACCTG | 15 | MA004 | 25.26 | 22.74 | 26.59 | 35.61 | 28.96 | 26.24 |
| | AATAACCCTC | | | | | | | | |
| GA475 | AGATACCTGA | 248 | MA004 | 28.61 | 34.79 | 30.52 | 35.29 | 29.14 | 30.03 |
| | ATAACCCTC | | | | | | | | |
| GA476 | GATACCTGAAT | 249 | MA004 | 31.45 | 27.75 | 31.88 | 32.11 | 26.99 | 30.15 |
| | AACCCTC | | | | | | | | |
| GA477 | ATACCTGAATA | 250 | MA004 | 15.07 | 13.4 | 15.01 | 18.73 | 16.78 | 16.96 |
| | ACCCTC | | | | | | | | |
| GA441 | AAGATACCTG | 15 | MA045 | 20.49 | 21.6 | 26.32 | 26.13 | 24.37 | 25.48 |
| | AATAACCCTC | | | | | | | | |
| GA442 | AAGATACCTG | 15 | MA045 | 25.65 | 17.51 | 25.36 | 18.73 | 18.54 | 20.34 |
| | AATAACCCTC | | | | | | | | |
| GA472 | AAGATACCTG | 15 | MA045 | 20.87 | 15.13 | 19.67 | 19.28 | 19.07 | ND |
| | AATAACCCTC | | | | | | | | |
| GA473 | AAGATACCTG | 15 | MA045 | 14.84 | 14.05 | 20.14 | 15.95 | 15.95 | 16.71 |
| | AATAACCCTC | | | | | | | | |
| GA474 | AAGATACCTG | 15 | MA045 | 15.81 | 16.04 | 17.08 | 20.15 | 15.02 | 14.33 |
| | AATAACCCTC | | | | | | | | |
| GA475 | AGATACCTGA | 248 | MA045 | 24.33 | 31.08 | 25.52 | 28.55 | 20.61 | 21.1 |
| | ATAACCCTC | | | | | | | | |
| GA476 | GATACCTGAAT | 249 | MA045 | 25.43 | 24.26 | 23.45 | 26.05 | 21.47 | 23.35 |
| | AACCCTC | | | | | | | | |
| GA477 | ATACCTGAATA | 250 | MA045 | 5.06 | 2.84 | 3.07 | 4.65 | 3.75 | 3.01 |
| | ACCCTC | | | | | | | | |

[0718] Off-target analysis for altered gRNA/mRNA combinations at the highest dose of 5,000 ng/RNA/mL was performed for two sites previously identified that showed off-target editing (Table 16). The calculated editing percentage across the protospacer was totaled, and the negative control editing % was subtracted. This data shows that modifications to the guide and/or to the ABE mRNA improve off-target editing efficiency.

TABLE 16
Modifications to the guide and/or to the ABE mRNA
improve off-target editing efficiency.

| | | Human Primary Hepatocytes—SUM total | |
|---|---|---|---|
| | | editing % (all positions) minus control, | |
| | | AVG of ~2 replicates | |
| gRNA | mRNA | OT Site A | OT Site B |
| GA441 | MA004 | 9.785 | 1.605 |
| | MA040 | 7.17 | 0.85 |
| | MA041 | −0.1 | −0.27 |
| GA442 | MA004 | 7.65 | 0.77 |
| | MA040 | 6.97 | 0.64 |
| | MA041 | −0.005 | −0.17 |
| GA472 | MA004 | 0.36 | −0.13 |
| | MA040 | 0.78 | −0.185 |
| | MA041 | −0.035 | −0.205 |
| GA473 | MA004 | −0.145 | −0.135 |
| | MA040 | −0.1 | −0.215 |
| | MA041 | −0.085 | −0.19 |
| GA474 | MA004 | 1.075 | 0.03 |
| | MA040 | 1.545 | 0.39 |
| | MA041 | −0.095 | −0.14 |
| GA475 | MA004 | 2.79 | 0.39 |
| | MA040 | 1.68 | ND |
| | MA041 | −0.13 | −0.205 |
| GA476 | MA004 | 0.48 | 0.385 |
| | MA040 | 0.785 | 0.295 |
| | MA041 | −0.17 | ND |
| GA477 | MA004 | −0.13 | −0.215 |
| | MA040 | −0.48 | −0.23 |
| | MA041 | −0.225 | −0.14 |
| | | Human Primary Hepatocytes—SUM | |
| | | total editing % (all positions) AVG of | |
| | | ~2 replicates | |
| GA441 | MA004 | 6.575 | 2.345 |
| | MA045 | 1.36 | 0.865 |
| GA442 | MA004 | 7.315 | 1.75 |
| | MA045 | 1.355 | 0.895 |
| GA472 | MA004 | 2.195 | 1.005 |
| | MA045 | 1.19 | 0.87 |
| GA473 | MA004 | 1.47 | 1.025 |
| | MA045 | 1.495 | 0.98 |
| GA474 | MA004 | 2.145 | 1.055 |
| | MA045 | 1.405 | 0.9 |
| GA475 | MA004 | 3.67 | 1.825 |
| | MA045 | 1.39 | 0.955 |
| GA476 | MA004 | 1.775 | 1.675 |
| | MA045 | 1.505 | 0.84 |
| GA477 | MA004 | 1.31 | 0.975 |
| | MA045 | 1.135 | 0.83 |

[0719] Lipid nanoparticles containing ABE8.8 mRNA and a gRNA matching the human/cynomolgus 5′-CCCGCACCTTGGCGCAGCGG-3′ (SEQ ID NO: 13) sequence (GA066) that targets the splice donor at the 5′ end of PCSK9 intron 1 were formulated at a 1:1 ratio by weight. The LNPs were administered to primary human hepatocytes and primary cynomolgus hepatocytes, using various dilutions to assess for editing activity at different concentrations of test article. LNP containing Cas9 mRNA and a gRNA matching a protospacer sequence in another gene, ANGPTL3, as a positive control was used for these experiments. This Cas9 mRNA/gRNA combination were chosen because it had been previously observed to produce high levels of genome-editing activity in primary human hepatocytes, primary cynomolgus hepatocytes, and cynomolgus liver in vivo. It was observed the ABE8.8/GA066 LNP substantially outperformed the control LNP with respect to editing, displaying much higher potency in both human and cynomolgus hepatocytes (FIG. 15).

### Example 5. Pcsk9 Gene Editing in Mice

[0720] LNPs containing SpCas9 mRNA and mouse Pcsk9-targeting gRNA with different tracr designs (GA052, GA053, GA054, and GA055) at a 1:1 weight ratio were formulated. Wild-type C57BL/6 mice were dosed with 2 mg/kg of the LNP test article. Seven days after dosing, the mice were euthanized and genomic DNA was harvested from mouse liver, and then assessed for editing of the target site with next-generation sequencing. GA052, GA054, and GA055 all outperformed GA053 that had a previously disclosed tracr design (FIG. 16).

### Example 6. Pcsk9 Base Editing in Mice

[0721] LNPs containing ABE8.8 mRNA and a mouse Pcsk9-targeting gRNA at a 1:1 weight ratio were formulated. This gRNA matches the 5′-CCCATACCTTGGAGCAACGG-3′ (SEQ ID NO: 69) protospacer sequence, which is the mouse ortholog of the human 5′-CCCGCACCTTGGCGCAGCGG-3′ (SEQ ID NO: 13) sequence (matched by GA066, GA095, GA096, GA097 and GA346) that targets the splice donor at the 5′ end of PCSK9 intron 1. Wild-type C57BL/6 mice were dosed with 2 mg/kg of the LNP test article via the lateral tail vein or retro-orbital in a total volume of 10 ml/kg. Seven days after dosing, the mice were euthanized and genomic DNA was harvested from mouse liver, and then assessed for base editing of the target splice site with next-generation sequencing. Approximately 60% editing of the target splice site was observed (mouse Pcsk9 intron 1 splice donor) (FIG. 17), providing a preclinical proof of concept of a base-editing therapy knocking down PCSK9 in the liver in vivo.

[0722] In a subsequent study, LNPs containing ABE8.8 mRNA and a mouse Pcsk9-targeting gRNA at a 1:1 weight ratio were formulated, and dosed in wild-type C57BL/6 mice at doses ranging from 0-2.0 mg total RNA/kg. The low dose of 0.05 mg RNA/kg showed high editing (>45%), while saturation of base editing occurred around 0.25 mg RNA/kg dose (FIG. 18).

[0723] In an additional study, LNPs containing ABE8.8 mRNA and a mouse Pcsk9-targeting gRNA were formulated at different weight ratios of mRNA and gRNA ranging from 1:1-1:6 and 2:1-6:1. This gRNA matches the 5′-CCCATACCTTGGAGCAACGG-3′ (SEQ ID NO: 69) protospacer sequence, which is the mouse ortholog of the human 5′-CCCGCACCTTGGCGCAGCGG-3′ (SEQ ID NO: 13) sequence (matched by GA066, GA095, GA096, GA097 and GA346) that targets the splice donor at the 5′ end of PCSK9 intron 1. Wild-type mice were dosed with the LNP at 0.05 mg/kg total RNA dose. Additionally, two individual LNPs constituted with the same mRNA and two guides, GA255 and GA257, which matches the 5′-CCCATACCTTGGAGCAACGG-3′ (SEQ ID NO: 69) protospacer sequence but has modifications to the tracr to improve stability, were also injected into mice. Seven days after dosing, the mice were euthanized and genomic DNA was harvested from mouse liver, and then assessed for base editing of the target splice site with next-generation sequencing (FIG. 19). Base editing was comparable between many of the ratios, with 1:6 and 6:1 (gRNA: mRNA) performing the poorest. The guides with modifications to the tracr had increased editing efficiency.

### Example 7. Angptl3 Base Editing in Mice

[0724] LNPs containing ABE8.8 mRNA and mouse Angptl3-targeting gRNAs (GA258, GA259, GA260, GA349, GA353) at a 1:1 weight ratio were formulated. Wild-type C57BL/6 mice were dosed with LNP test article at 0.05 mg/kg total RNA dose. The mice were later euthanized and genomic DNA was harvested from mouse liver, and then assessed for base editing of the target splice site with next-generation sequencing (FIG. 20).

### In Vivo Evaluation in Non-Human Primates (NHP)

### Example 8. Evaluation of PCSK9/ABE

[0725] First, a 2-week study was performed to evaluate editing of the PCSK9 gene in cynomolgus monkeys using specific gRNA and base editor nuclease ABE 8.8 through administration of LNPs (FIG. 21). The ABE8.8/GA066 LNP was administered to cynomolgus monkeys via intravenous infusion at two doses, 3 mg/kg (n=3 animals) and 1 mg/kg (n=2 animals) with the intent of producing high-level base editing of PCSK9 gene in the liver. Two weeks after administration of test article, blood samples were collected for clinical chemistry assays and PCSK9 ELISA assay, and the animals underwent necropsy for collection of liver samples, 2 samples each from each of the 4 lobes of the liver (8 in total from each animal).

[0726] Editing analysis of the liver specimens was performed by next generation sequencing. At the 3 mg/kg dose, a mean of 55% editing of the adenine base at the target splice site in the liver samples was observed; at the 1 mg/kg dose, a mean of 24% editing of the adenine base at the target splice site in the liver samples was observed (FIG. 22). For PCSK9 ELISA analysis, blood samples were collected from the animals on days D-10, D-7 and D-5 pre-dose (average shown) as well as on D8 and D15 post-dose. At 2 weeks after dosing there was a mean 76% reduction in the blood PCSK9 protein level compared to pre-dosing levels in the 3 mg/kg group (FIG. 23), and a mean 32% reduction in the blood PCSK9 protein level in the 1 mg/kg group (Table 17). Low density lipoprotein cholesterol (LDL-C) was determined in serum samples taken pre-dose and on D8 and D15 using a standard clinical analyzer (Table 18). There was a mean 57% reduction in the blood low-density lipoprotein cholesterol (LDL-C) level in the 3 mg/kg group (FIG. 24), and a mean 25% reduction in the blood LDL-C level in the 1 mg/kg group.

TABLE 17
Circulating PCSK9 protein levels decrease
after PCSK9 gRNA/ABE editing

| | Dose | | | | | Reduction |
|---|---|---|---|---|---|---|
| | (total | | Concentration | | | from basal |
| PCSK9 | RNA, | Animal | (ng/ml) | | | on D15 |
| Group | mg/kg) | ID | Basal | D8 | D15 | (%) |
| 1 | 0 | 1001 | 432 | 387 | 366 | 15 |
| 2 | 1 | 2001 | 324 | 285 | 227 | 30 |
| 2 | 1 | 2002 | 144 | 116 | 95 | 34 |
| 3 | 3 | 3001 | 254 | 16 | 28 | 89 |
| 3 | 3 | 3002 | 170 | 34 | 31 | 82 |
| 3 | 3 | 3003 | 253 | 65 | 109 | 57 |

TABLE 18
LDL-C reduction after editing of the PCSK9 gene

| | Dose | | LDL-C | | | Reduction |
|---|---|---|---|---|---|---|
| | (total | | concentration | | | from basal |
| | RNA, | Animal | (mg/dl) | | | on D15 |
| Group | mg/kg) | ID | Basal | D8 | D15 | (%) |
| 1 | 0 | 1001 | 76.7 | 70 | 57 | 26 |
| 2 | 1 | 2001 | 72.3 | 55 | 54 | 25 |
| 2 | 1 | 2002 | 69.0 | 53 | 52 | 25 |
| 3 | 3 | 3001 | 57.0 | 23 | 17 | 70 |
| 3 | 3 | 3002 | 60.0 | 25 | 22 | 63 |
| 3 | 3 | 3003 | 107.7 | 88 | 66 | 39 |

[0727] In a subsequent experiment, LNPs were delivered in monkeys via intravenous infusion at a 1.0 mg/kg dose. For three monkeys that underwent necropsy at 2 weeks after LNP infusion, there was a mean 63% base editing frequency of the PCSK9 splice site adenine in the liver, with no bystander base editing observed elsewhere in the protospacer (FIG. 25); there was a mean indel frequency of 0.5%. The editing was accompanied by a mean 81% reduction in blood PCSK9 levels and a mean 65% reduction in blood LDL-C levels. For two monkeys that underwent necropsy at 24 hours after LNP infusion, there was a mean 48% editing frequency.

[0728] In a subsequent short-term dose-response study (0.5, 1.0, and 1.5 mg/kg doses, three monkeys each, with necropsy at 2 weeks), all doses achieved >50% mean base editing rates; PCSK9 editing and reductions in PCSK9 protein and LDL-C appeared to saturate at doses ≥1.0 mg/kg (FIG. 26).

[0729] In these studies we assessed liver function tests and in some groups noted moderate rises in AST and ALT that largely resolved by the end of the first week and entirely resolved by 2 weeks after LNP infusion, with no adverse health events observed in any of the animals. In assaying base editing in a wide variety of tissues, we found that the liver was the predominant site of editing, with much lower editing observed in the spleen and adrenal glands and minimal editing observed elsewhere (FIG. 27).

TABLE 25
Numeric formats of tissue distribution of editing of the PCSK9 exon
1 splice donor adenine base in three animals, as shown in FIG. 27.

| | control | | | |
|---|---|---|---|---|
| Tissue | NHP | NHP #1 | NHP #2 | NHP #3 |
| Liver | 0.12 | 59.49 | 73.83 | 55.10 |
| Spleen | 0.02 | 5.25 | 7.99 | 5.67 |
| Adrenal gland (left) | 0.02 | 1.81 | 7.49 | 1.79 |
| Adrenal gland (right) | 0.10 | 1.54 | 0.22 | 2.18 |
| Kidney (left) | 0.10 | 0.63 | 0.89 | 0.24 |
| Kidney (right) | 0.06 | 0.64 | 0.27 | 0.32 |
| Skin (injection site) | 0.13 | 0.08 | 1.47 | 1.56 |
| Mandibular lymph | 0.06 | 0.15 | 0.48 | 0.43 |
| nodes (left) | | | | |
| Mandibular lymph | 0.06 | 0.18 | 0.17 | 0.96 |
| nodes (right) | | | | |
| Mesenteric lymph nodes | 0.04 | 0.12 | 0.15 | 0.12 |
| Testis (left) | 0.13 | 0.11 | 0.06 | 0.38 |
| Testis (right) | 0.07 | 0.16 | 0.09 | 0.38 |
| Epididymis (left) | 0.09 | 0.12 | 0.58 | 0.83 |
| Epididymis (right) | 0.80 | 0.25 | 0.79 | 0.52 |
| Skeletal muscle | 0.16 | 0.40 | 0.33 | 0.07 |
| Duodenum | 0.07 | 0.30 | 0.83 | 0.26 |
| Jejunum | 0.06 | 0.19 | 0.28 | 0.58 |
| Colon | 0.08 | 0.07 | 0.08 | 0.13 |
| Lung (left) | 0.01 | 0.16 | 0.22 | 0.18 |
| Lung (right) | 0.10 | 0.54 | 0.24 | 0.16 |
| Brain | 0.12 | 0.17 | 0.05 | 0.15 |

[0730] In an additional study, different tracr designs were assessed. LNPs were delivered in NHPs via intravenous infusion at a 1.0 mg/kg total RNA dose, unless otherwise specified. Base editing of the liver was assessed, and several guides outperformed GA066 with the literature tracr (FIG. 28).

[0731] In the same NHP study, LNPs containing either: 1) Cas9 mRNA and a gRNA matching 5′-CCCGCACCTTGGCGCAGCGG-3′ (SEQ ID NO: 13) (GA097) protospacer sequence; or 2) ABE8.8 mRNA and gRNA matching 5′-CCCGCACCTTGGCGCAGCGG-3′ (SEQ ID NO: 13) (GA097) protospacer sequence, were delivered intravenously into NHPs. Importantly, the method by which classical CRISPR/Cas9 disrupts a gene by ultimately introducing an indel, is different than base editing where a base mutation has occurred. Further, a target region that is highly amenable to CRISPR/Cas9 editing does not necessarily mean base editing at that location will occur, and vice versa. This is highlighted in the NHP study, where the LNP containing SpCas9/gRNA resulted in low liver editing in the NHPs (<5%), while the LNP containing ABE8.8/gRNA had significantly higher editing close to 40% (FIG. 29) with a dose (1 mg/kg) lower than the SpCas9/gRNA dose (1.5 mg/kg).

[0732] In another study, two LNPs were compared for base editing activity after delivery in NHPs via intravenous infusion at doses ranging from 0.5 mg/kg-3.0 mg/kg. Both LNPs showed high efficacy, with the first LNP (LNP #1) outperforming the second LNP (LNP #2), at doses as low as 0.5 mg/kg having greater than 50% average editing (FIG. 30). Similar to past experiments, the PCSK9 protein levels decreased significantly upon high level of base editing at the splice site, decreasing circulating PCSK9 protein by 80-90% (FIG. 31).

[0733] In a long-term study (four animals, with liver biopsy at 2 weeks) LNPs were introduced via intravenous infusion at a higher dose of 3.0 mg/kg to assess drug tolerability and the durability of PCSK9 protein and LDL-C reductions resulting from PCSK9 editing. The liver biopsy samples showed a mean 66% base editing frequency (FIG. 32). Blood PCSK9 protein levels reached a trough by 1 week and have remained stable thereafter out to at least 6 months, settling at approximately 90% reductions (FIG. 33). Blood LDL-C and lipoprotein (a) [Lp(a)]levels have similarly achieved stable troughs persisting to 8 months, settling at ≈60% and ≈35% reductions, respectively (FIG. 34, FIG. 35).

[0734] There were transient, moderate rises in AST and ALT that entirely resolved by 2 weeks following LNP infusion (FIG. 36), with no changes in any other liver function tests and no adverse health events observed to date (FIG. 37). Importantly, the persistence of PCSK9 and LDL-C reductions for 8 months with no late AST and ALT elevations demonstrates that such a response, whatever its scale, does not adversely impact the treatment's efficacy.

[0735] To evaluate ABE8.8/gRNA (protospacer matching GA346) LNP-mediated off-target editing in primary cyno hepatocytes and monkey liver samples, ONE-seq was performed with a synthetic cynomolgus genomic library selected by homology to the gRNA spacer sequence. This library was treated with ABE8.8 protein and PCSK9 gRNA, and the top 48 ONE-seq-nominated sites (FIG. 38)—of which the PCSK9 target site was the very top site—was assessed with next-generation sequencing of targeted PCR amplicons from LNP-treated versus untreated NHP samples (FIG. 39).

[0736] In LNP-treated primary cynomolgus hepatocytes, besides editing at the PCSK9 target site, there was off-target editing (mean <1%) evident at only one site, designated C5, which has poor homology to the human genome (FIG. 39). Assessing the same 48 sites in liver samples from monkeys that were treated with a 1.0 mg/kg LNP dose (from the aforementioned dose-response study), low-level off-target editing (mean <1%) only at the C5 site (FIG. 40) was observed. No off-target editing with a 0.5 mg/kg LNP dose and only low-level off-target editing with a 1.5 mg/kg LNP dose (mean <1%) were detected.

### Example 9. Evaluation of ANGPTL3/ABE

[0737] Similar to the NHP studies performed with the ABE/PCSK9 guide(s), LNPs formulated with ABE8.8 mRNA and a gRNA with the 5′-AAGATACCTGAATAACTCTC-3′ (SEQ ID NO: 14) (GA067) cynomolgus spacer was administered to cynomolgus monkeys via intravenous infusion at two doses, 3 mg/kg (n=3 animals) and 1 mg/kg (n=2 animals) with the intent of producing high-level base editing of ANGPTL3 in the liver. Two weeks after administration of test article, blood samples were collected for clinical chemistry assays and ANGPTL3 ELISA assay, and the animals underwent necropsy for collection of liver samples. Small segments from the center and periphery of each lobe of the liver were excised and flash frozen in liquid nitrogen and stored at −86 to −60° C. Splice-site editing was analyzed by next generation sequencing, confirming that base change occurred. At the highest dose (3 mg/kg), a mean of 61% editing of the adenine base was observed at the target splice site in the liver; at the lowest dose (1 mg/kg), the editing observed was 28% at the target splice site in the liver (Table 19).

[0738] In addition, blood samples were collected pre-dose, on D7 and D15 post-dose to determine serum ANGPTL3, and triglycerides. At two weeks after dosing there was a mean 90% and 31% reduction in the blood ANGPTL3 protein level compared to pre-dosing levels in the higher (3 mg/kg) and lower (1 mg/kg) dosing groups (Table 20).

TABLE 19
Liver Editing in cynomolgus monkeys

| | Dose | | Mean ± |
|---|---|---|---|
| | (total RNA, | Animal | standard |
| Group | mg/kg) | ID | deviation |
| 1 | 0 | 1001 | 0.25 ± 0.06 |
| 4 | 1 | 4001 | 39.6 ± 2.7 |
| 4 | 1 | 4002 | 15.1 ± 3.9 |
| 5 | 3 | 5001 | 61.2 ± 3.2 |
| 5 | 3 | 5002 | 56.4 ± 5.2 |
| 5 | 3 | 5003 | 64.3 ± 2.6 |

TABLE 20
Knockdown of circulating cynomolgus monkey ANGPTL3
following gene editing using ABE

| | Dose | | | | | Reduction |
|---|---|---|---|---|---|---|
| | (total | | Concentration | | | from basal |
| | RNA, | Animal | (ng/ml) | | | on D15 |
| Group | mg/kg) | ID | Basal | D8 | D15 | (%) |
| 1 | 0 | 1001 | 39 | 47 | 41 | −7 |
| 4 | 1 | 4001 | 56 | 15 | 31 | 45 |
| 4 | 1 | 4002 | 38 | 22 | 31 | 17 |
| 5 | 3 | 5001 | 31 | 1 | 1 | 98 |
| 5 | 3 | 5002 | 33 | 11 | 9 | 72 |
| 5 | 3 | 5003 | 70 | 1 | 1 | 99 |

[0739] Triglycerides were determined in serum samples taken pre-dose and on D8 and D15 using a standard clinical analyzer. Serum triglyceride reduction in response to LNP-mediated ANGPTL3 base editing with ABE8.8 and GA067 are summarized in Table 21. The levels of triglycerides were reduced by 24% and 59% in response to doses of 1 mg/kg and 3 mg/kg base editor ABE8.8 and GA067 targeting ANGPTL3.

TABLE 21
Triglyceride reduction in response to ANGPTL3 gene in liver

| | Dose | | Triglyceride | | | Reduction |
|---|---|---|---|---|---|---|
| | (total | | concentration | | | from basal |
| | RNA, | Animal | (mg/dl) | | | on D15 |
| Group | mg/kg) | ID | Basal | D8 | D15 | (%) |
| 1 | 0 | 1001 | 31.3 | 43 | 41 | −31 |
| 4 | 1 | 4001 | 71.0 | 46 | 49 | 31 |
| 4 | 1 | 4002 | 67.7 | 52 | 56 | 17 |
| 5 | 3 | 5001 | 59.3 | 23 | 21 | 65 |
| 5 | 3 | 5002 | 41.3 | 33 | 25 | 40 |
| 5 | 3 | 5003 | 55.0 | 27 | 15 | 73 |

[0740] In another independent study, the same ABE8.8/GA067 LNP was administered to cynomolgus monkeys via intravenous infusion at a dose of 3 mg/kg (n=3 animals) with the intent of producing high-level base editing of ANGPTL3 in the liver. Two weeks after administration of test article, blood samples were collected for clinical chemistry assays, and the animals underwent a liver biopsy for collection of liver samples. At the 3 mg/kg dose, a mean of 60% editing of the adenine base at the target splice site was achieved in the liver biopsy samples. Concordantly, at 2 weeks after dosing there was a mean 95% reduction in the blood ANGPTL3 protein level compared to pre-dosing levels and there was a mean 64% reduction in the blood triglyceride level (FIG. 41). These results provide an additional preclinical proof of concept of a base-editing therapy knocking down ANGPTL3 in the liver in vivo and effecting reductions in blood ANGPTL3 protein and triglyceride levels.

### Example 10. Evaluation of Dual PCSK9 and ANGPTL3 Base Editing

[0741] To assess whether it was possible to affect simultaneous base editing of PCSK9 and ANGPTL3 with a single test article, LNPs were formulated containing a mix of three components: ABE8.8 mRNA, PCSK9-targeting gRNA (GA095), and ANGPTL3-targeting gRNA (GA098) at a 2:1:1 weight ratio. Primary human hepatocytes were incubated with various dilutions of the LNPs. Three days after incubation, genomic DNA was harvested from the hepatocytes, and then assessed for base editing of the target splice site with next-generation sequencing. At the highest LNP concentrations, ˜40% editing of the PCSK9 splice site (intron 1 splice donor) and ˜40% editing of the ANGPTL3 splice site (intron 6 splice donor) was observed (FIG. 42), demonstrating the feasibility of dual gene disruption in human hepatocytes with a single test article and providing a preclinical proof of concept of a single base-editing therapy simultaneously knocking down PCSK9 and ANGPTL3, which would be predicted to substantially reduce both blood LDL cholesterol levels and blood triglyceride levels in human recipients. An advantage of this approach is that because the base editors do not require double strand breaks (DSBs) for editing, in contrast to standard CRISPR-Cas9, there is substantially lower risk of chromosomal rearrangements or other structural changes inherent in the simultaneous targeting of two different sites in the genome.

[0742] A follow-up NHP study was performed to address: 1) if a second dose of administered LNPs administered can cause editing of the target gene; 2) if a different target can be base edited. LNPs formulated with ABE8.8 mRNA and either a gRNA targeting PCSK9 (GA346) or a gRNA targeting ANGPTL3 (GA347) was administered to cynomolgus monkeys via intravenous infusion at doses ranging from 0.5-2 mg/kg. Two weeks after administration of test article, biopsies were performed to assess for base editing. After 30 days from the initiation of the study, the opposite LNP was administered. Following a second biopsy after an additional 2 weeks, the gDNA was extracted, and base editing was assessed using next generation sequencing. The findings from this study show that high level editing of both the PCSK9 and ANGPTL3 targets are achieved after the first and second doses of LNPs (FIG. 43). Blood samples were collected on both biopsy timepoints and show significant decrease of around 90% in circulating PCSK9 and ANGPTL3 after subsequent dosing with 1 mg/kg LNPs (FIG. 44). In the same study an LNP encpasualting ABE8.8 mRNA, PCSK9 gRNA GA346 and ANGPTL3 gRNA GA347 at 1:0.5:0.5 weight ratio was adminstered at 2 mg/kg total RNA dose, which resulted in rubust synchronized PCSK9 and ANGPTL3 gene editing (FIG. 44, top and bottom data labelled GA346+GA347 (D1)-top and bottom panels show PSCK9 and ANGPTL3 editing). The data demonstrate that robust multi-gene editing is possible with single 1-dose administration of ABE base editor mRNA and two or more gRNAs targeting two or more genes of interest in mammals (and/or mammalian cell). FIG. 44 mirrors corresponding knowckdown of ANGPTL3 (bottom) and PCSK9 (top) proteins.

[0743] In another study, NHPs were repeat dosed with LNPs (FIG. 45). NHPs were dosed with LNP #1 and LNP #2 formulated with ABE8.8 mRNA MA004 and a gRNA targeting PCSK9 (GA097) via intravenous infusion at a total RNA doses of 0.5 mg/kg. NHPs received an additional LNP dose on day 30 and on day 60. Liver biopsies from Day 14, Day 46, and Day75 were extracted for adenosine base editing analysis. All gDNA was extracted, and base editing was assessed using next generation sequencing. These results demonstrate that repeat dosing of LNP containing ABE8.8 mRNA and PCSK9 gRNA causes additive base editing in the liver, as editing efficiency was near 30% after the first dose of LNP, while over 50% after the third dose LNP. It was also observed that the magnitude of additive editing was LNP-dependent.

[0744] Further, repeat dosing of LNPs reduced PCSK9 protein levels in NHPs (FIG. 46). The PCSK9 protein levels were monitored over 90 days in NHPs that were repeat dosed with LNPs formulated with ABE8.8 mRNA MA004 and a gRNA targeting PCSK9 (GA097). NHPs were dosed via intravenous infusion at a total RNA dose of 0.5 mg/kg at days 0, 30, and 60 (arrow is illustrated on graph to depict dosing). For description of analysis of PCSK9 protein levels, see detailed methods section. Compared to basal levels, PCSK9 protein dropped by nearly 40% after the initial dose of LNP, but upon additional doses, decreased even further.

[0745] Liver markers were assessed following repeat dosing of LNPs (FIG. 47). ALT, AST, total bilirubin, and creatine kinase levels were assessed up to 71 days in NHPs that were repeat dosed with LNPs formulated with ABE8.8 mRNA MA004 and a gRNA targeting PCSK9 (GA097). NHPs were dosed via intravenous infusion at a total RNA dose of 0.5 mg/kg at days 0, 30, and 60, which is shown as D1, D2 and D3 on graph, respectively. Liver biopsy was performed at days 14 and 46 which is shown as B1 and B2 on graph, respectively. Blood was collected at multiple timepoints, as described on the graph. Although ALT and AST minimally rose upon dosing, this was a transient response that returned to normal after a period of several days. Similarly, Creatine Kinase levels increased upon dosing, with the largest effect seen after the first dose, and returned to basal levels after a period of several days.

[0746] The liver enzymes, LDH, GLDH, GGT, and ALP, were assessed in NHPs that were repeat dosed with LNPs formulated with ABE8.8 mRNA MA004 and a gRNA targeting PCSK9 (GA097) (FIG. 48). NHPs were dosed via intravenous infusion at a total RNA doses of 0.5 mg/kg at days 0, 30, and 60. Blood was collected at multiple timepoints, as described on the graph. Although LDH and GLDH rose upon dosing, this was a transient response that returned to normal after a period of several days.

[0747] Further, long-term adenine base editing of ANGPTL3 was assessed in non-human primates (FIG. 49). Cynomolgus monkeys received an intravenous infusion of a 3 mg/kg dose of an LNP formulation with ABE8.8 mRNA MA004 and ANGPTL3 gRNA GA067. Blood was collected at timepoints specified and the graph, and ANGPTL3 protein levels (FIG. 49A) and triglyceride levels (FIG. 49B) were analyzed. As compared to controls, both ANGPTL3 protein levels (96% reduction) and triglyceride levels substantially decreased upon base editing of the gene, and remain stably reduced for more than 170 days.

[0748] Cytokine activation and immune response were assessed in NHPs receiving LNPs. In one set of studies, cynomolgus monkeys received intravenous infusions of 0.5 mg/kg doses at three specified time points (FIG. 50A and FIG. 50B) of an LNP formulation with ABE8.8 mRNA MA004 and PCSK9 gRNA GA346. Blood was collected at timepoints specified and the graph, and IP-10 and MCP-1 were analyzed. These results demonstrated: 1) that NHPs receiving LNPs had no evidence of cytokine activation nor immune response, as compared to control; and 2) that repeat dosing of the same LNP does not elicit cytokine activation nor an immune response.

[0749] In additional studies, IL-6, MCP-1, and SC5b-9 (FIG. 50C, FIG. 50D, and FIG. 50E, respectively) were analyzed at different time points from blood collected from NHPs that received an intravenous infusion of 1.0 mg/kg total RNA dose of LNP formulated with MA004 and PCSK9 gRNA GA346. This caused minimal cytokine/complement activation that returned to baseline by/before 336 hours, as compared to control.

### Example 11. Evaluation of SpCa9-Mediated On-Target Editing Efficiency

[0750] Gene editing of ANGPTL3 or PCSK9 in non-human primates was assessed. Cynomolgus monkeys received an intravenous infusion of a 1.5 mg/kg dose of an LNP formulation with SpCas9 mRNA MS004 and one gRNA targeting either ANGPTL3 (GA261-GA263) or PCSK9 (GA266-GA271). Upon necropsy after 2 weeks, two pieces from each liver lobe (8 pieces total) were isolated and gDNA was extracted. Samples were processed as described in the detailed methods section. Indel % was analyzed for each separate piece and are graphed as individual points (FIG. 51). High editing efficiency was observed in most NHP livers. LDL-C levels were measured (FIG. 52). All NHPs that received LNPs with SpCas9 mRNA/PCSK9 gRNA had at least 35% reduction in circulating LDL-C levels. Although more modest, LNPs with SpCas9 mRNA/ANGPTL3 gRNA had 10-25% reduction in circulating LDL-C levels. Additionally, NHPs that received LNPs with SpCas9 mRNA/ANGPTL3 gRNA had around 10-50% reduction in triglyceride levels (FIG. 53). NHPs that received LNPs with SpCas9 mRNA/PCSK9 gRNA did not show a significant reduction in triglyceride levels.

[0751] Cynomolgus primary hepatocytes were transfected at 2500, 1250, and 625 ng/test article/mL with SpCas9 mRNA MS002 and a gRNA targeting PCSK9 with modifications to the tracr. Genomic DNA was processed, sequenced, and analyzed as described in the detailed methods section. GA266 was transfected independently twice to serve as two positive controls. Almost all transfections resulted in high editing efficiency compared to positive control, while GA405 had slightly lower editing efficiency.

TABLE 22
Modifications to guides retain on-target editing efficiency
in cynomolgus primary hepatocytes.

| | Cynomolgus Primary Hepatocytes- | | | | | |
|---|---|---|---|---|---|---|
| | % Editing (dose, replicate #) | | | | | |
| | 2500, | 2500, | 1250, | 1250, | 625, | 625, |
| gRNA | rep1 | rep2 | rep1 | rep2 | rep1 | rep2 |
| GA266, #1 | 56.51 | 49.95 | 51.81 | 55.2 | 44.53 | 42.53 |
| GA266, #2 | 50.34 | 48.3 | 43.56 | 46.2 | 39.75 | 36.59 |
| GA395 | 43.91 | 49.53 | 41.48 | 44.35 | 33.87 | 34.57 |
| GA396 | 53.98 | 56.84 | 56.02 | 52.02 | 44.44 | 41.53 |
| GA397 | 56.65 | 58.59 | 56.47 | 58.68 | 40.72 | 46.28 |
| GA398 | 59.85 | 63.97 | 56.45 | 55.21 | 39.09 | 44 |
| GA399 | 58.97 | 62.75 | 55.55 | 53.02 | 37.75 | 41.8 |
| GA401 | 53.74 | 52.79 | 49.12 | 48.83 | 38.33 | 38.77 |
| GA402 | 45.58 | 55.34 | 44.46 | 47.93 | 35.05 | 40.31 |
| GA403 | 52.62 | 55.84 | 50.5 | 47.13 | 38.28 | 35.58 |
| GA404 | 48.3 | 50.59 | 41.68 | 35.04 | 31.63 | 30.16 |
| GA405 | 41.85 | 47.33 | 35.84 | 35.88 | 26.2 | 26.36 |
| GA406 | 57.17 | 51.45 | 45.11 | 43.68 | 37.58 | 40.31 |
| GA408 | 50.4 | 46.92 | 47.21 | 49.8 | 36.7 | 37.14 |

[0752] PACE-modifications to the gRNA have been previously demonstrated to reduce off-target editing efficiency. Human primary hepatocytes were transfected at 2500, 1250, 500, and 250 ng/test article/mL with SpCas9 mRNA MS002 and a gRNA targeting PCSK9 with modifications to the tracr. Genomic DNA was processed, sequenced, and analyzed as described in the detailed methods section. GA156 was transfected to serve as a positive control. GA248 and GA249 contain PACE-modifications to the gRNA that have previously been demonstrated to decrease off-target editing efficiency. Indeed, although GA248 and GA249 had lower on-target editing compared to the unmodified gRNA, GA156 (FIG. 54A), GA248 and GA249 showed decreased off-target editing at an identified off-target site (FIG. 54B).

[0753] ABE mRNA sequences-MA004, MA019, MA020, and MA021-were evaluated for their GC content (FIG. 55A). In general, MA004 sequence has a higher GC content than MA019, MA020, MA021, and ABE8.8m sequences. GC levels in sequence MA004 are also elevated (above 60%) in certain regions throughout the ABE sequence such as the TadA domain, N-terminal linker, and C-terminal linker, as well as various sub-regions. For all sequences, GC levels below 60% are shaded in gray to provide contrast to the elevated GC regions. GC content is calculated by determining the relative amount of G and C within a given 25 nucleotide stretch across the entire mRNA sequence, i.e. for every 25 nucleotides, the sum of G's and C's is divided by the total number of nucleotides. This comparison shows that mRNA MA004 sequence has a distinct distribution and enrichment of G and C nucleotides relative to other mRNA sequences.

[0754] The region-specific GC characterization of sequence MA004 is further illustrated (FIG. 55). The graph in each row shows the GC content in every 1,000-nucleotide stretch comprising the full ABE coding sequence (4,767 nt). The GC content is particularly high in the 5′ end of the sequence, which includes the TadA region and the N-terminal linker. The GC content is also high various parts of the Cas9 nickase and in the 3′ end of the ABE sequence; there the high GC % is centered around the linker region instead of the NLS. Sub-regions with high GC content are delineated by where GC reaches a threshold level of 60%. GC content in each sub-region is calculated by determining the number of G and C nucleotides divided by the total number of nucleotides for each sub-region.

TABLE 26
GC comparison of ABE-encoding nucleotides, MA004, MA019,
MA020, MA021, and ABE8.8m

| | | | | | | |
|---|---|---|---|---|---|---|
| ABE sequence | MA004 | MA019 | MA020 | MA021 | ABE8.8m | ΔGC* |

Region-specific GC %

| | | | | | | |
|---|---|---|---|---|---|---|
| Total sequence | 63 | 54 | 47 | 54 | 55 | 11 |
| TadA | 70 | 58 | 54 | 60 | 54 | 14 |
| (nt: 1-501) | | | | | | |
| N-terminal | 79 | 64 | 65 | 54 | 59 | 19 |
| linker | | | | | | |
| (nt: 502-597) | | | | | | |
| Cas9 nickase | 62 | 54 | 45 | 53 | 56 | 10 |
| (nt: 598-4698) | | | | | | |
| C-terminal | 83 | 58 | 67 | 58 | 60 | 22 |
| linker | | | | | | |
| (nt: 4699-4710) | | | | | | |
| NLS | 63 | 53 | 49 | 60 | 48 | 11 |
| (nt: 4711-4767) | | | | | | |

Sub-region GC %

| | | | | | | |
|---|---|---|---|---|---|---|
| nt: 27-109 | 75 | 59 | 55 | 63 | 59 | 16 |
| nt: 111-213 | 73 | 56 | 55 | 66 | 57 | 15 |
| nt: 250-385 | 71 | 60 | 57 | 62 | 57 | 12 |
| nt: 389-475 | 70 | 59 | 56 | 54 | 53 | 15 |
| nt: 479-601 | 76 | 62 | 61 | 65 | 55 | 15 |
| nt: 615-661 | 72 | 64 | 51 | 66 | 68 | 10 |
| nt: 699-714 | 75 | 63 | 63 | 56 | 69 | 12 |
| nt: 735-829 | 74 | 62 | 54 | 61 | 61 | 15 |
| nt: 1192-1345 | 67 | 58 | 51 | 55 | 61 | 11 |
| nt: 1363-1627 | 66 | 58 | 52 | 55 | 61 | 10 |
| nt: 1661-1706 | 70 | 57 | 57 | 65 | 63 | 10 |
| nt: 1735-1880 | 66 | 54 | 52 | 57 | 60 | 10 |
| nt: 1938-1999 | 71 | 60 | 55 | 63 | 60 | 12 |
| nt: 2023-2073 | 63 | 55 | 45 | 53 | 63 | 9 |
| nt: 2184-2231 | 67 | 60 | 54 | 63 | 60 | 8 |
| nt: 2542-2600 | 71 | 63 | 51 | 53 | 64 | 13 |
| nt: 2719-2798 | 69 | 56 | 54 | 65 | 64 | 9 |
| nt: 3294-3334 | 73 | 61 | 54 | 61 | 66 | 13 |
| nt: 3542-3584 | 72 | 67 | 58 | 72 | 67 | 6 |
| nt: 3745-3864 | 67 | 54 | 53 | 57 | 62 | 11 |
| nt: 3977-4045 | 65 | 57 | 48 | 59 | 59 | 9 |
| nt: 4207-4286 | 70 | 56 | 54 | 66 | 59 | 11 |
| nt: 4427-4517 | 65 | 60 | 51 | 53 | 55 | 10 |
| nt: 4537-4569 | 73 | 58 | 48 | 64 | 61 | 15 |
| nt: 4583-4741 | 67 | 58 | 49 | 57 | 61 | 11 |

*ΔGC is the difference between the GC content of sequence MA004 CDS (cDNA sequence) and the average of sequences MA019 CDS, MA020 CDS, MA021 CDS, and ABE8.8m.

[0755] The editing efficiency of these mRNA constructs were assessed in mice (FIG. 55B). These mRNAs, MA004, MA019, MA020, and MA021 code for the same ABE protein sequence but have different nucleotide sequence optimizations. The only difference between these groups is the mRNA sequence; the mRNAs have the same base modifications, and each group used the same LNP formulation and gRNA. Each group was administered intravenously to mouse, and a low dose of 0.05 mg/kg was used in this study to achieve sub-saturating levels of liver editing to resolve efficacy differences. At day 5 post-dose, gDNA was isolated and base editing was assessed by next generation sequencing. These results demonstrate that mRNA sequence changes can affect adenosine base editing performance in vivo.

### Additional Details of Methods Described

[0756] Plating, culturing, and transfection of primary hepatocytes. Primary human liver hepatocytes (PHH) and primary cynomolgus liver hepatocytes (PCH) from BioIVT were cultured per the manufacturer's protocol. Briefly, primary human hepatocytes and primary cyno hepatocytes were obtained as frozen aliquots from BioIVT. Four lots of primary human hepatocytes, each derived from a de-identified individual donor, were used for the experiments: STL (main donor) was used for all experiments, including screening experiments and off-target experiments; HLY, JLP, and TLY were used for off-target experiments. The HFG lot of primary cyno hepatocytes were used for experiments. Following the manufacturer's instructions, cells were thawed and rinsed prior to plating in 24-well plates that had been coated with bovine collagen overnight, with a density of approximate 350,000 cells/well in INVITROGRO hepatocyte medium supplemented with TORPEDO antibiotic mix (BioIVT). The cells were thawed and resuspended in hepatocyte thawing medium followed by centrifugation at 100 g for 10 min at 4° C. The supernatant was discarded, and the pelleted cells resuspended in hepatocyte plating medium. Each vial contains approximately 5 million cells that were used for plating one 24-well plate. Plated cells were allowed to settle and adhere for 4-6 h in a tissue culture incubator at 37° C. under 5% CO₂ atmosphere. After incubation, cells were checked for monolayer formation. The incubating media were then replaced with fresh hepatocyte maintenance media (complete INVITROGRO medium obtained from BioIVT, the cell line provider). The cells thus became ready for transfection. Each of the gRNAs were co-transfected with an equivalent amount of in vitro transcribed ABE8.8 mRNA (1:1 ratio by molecular weight) into primary human hepatocytes via MessengerMax reagent (Lipofectamine), using various dilutions to assess for editing activity at different concentrations of test article. MessengerMAX from Thermo Fisher is used for transfection. Solution A: desired amount of guide RNA is mixed with 1:1 wt ratio of mRNA in OptiMEM. Solution B: MessengerMAX in OptiMEM. After mixing solutions A and B, the mixture was incubated at room temperature for 20 min. 60 μL of the incubated solution was added dropwise to each cell wells. For protospacer sequences that were a perfect match to the corresponding cynomolgous monkey PCSK9 or ANGPTL3 gene sequence, each gRNA was also co-transfected with an equivalent amount of ABE8.8 mRNA (1:1 ratio by molecular weight) into primary cynomolgous hepatocytes, and followed the same transfection protocol. The cells were then allowed to remain at 37° C. for 3 days. Cells were harvested and prepared for genomic DNA extraction using either a Thermo Kingfisher, or Qiagen DNEasy blood and Tissue Kit, per manufacturer's instructions.

[0757] Bioinformatic analysis. Targeted amplicon sequencing data were analyzed with CRISPResso2 v2.0.31 in batch mode (CRISPRessoBatch). For Cas9 experiments, the following parameters were set: “—quantification_window_center-3 —quantification_window_size 5—min_frequency_alleles_around_cut_to_plot 0.1—max_rows_alleles_around_cut_to_plot 100”. For ABE experiments, the following parameters were set: “—default_min_aln_score 95—quantification_window_center-10—quantification_window_size 10 —base_editor_output—conversion_nuc_from A—conversion nuc_to G—min frequency_alleles around_cut_to_plot 0.1—max rows alleles around_cut_to_plot 100”. For NHP experiments, an additional parameter was set to exclude low quality reads: “—min_single_bp_quality 30”. Moreover, in all cases, the parameter “—max_paired_end_reads_overlap” was set to 2R-F+0.25*F, following FLASH recommendations (http://ccb.jhu.edu/software/FLASH/), where R was the read length and F was the amplicon length.

[0758] Editing was quantified from the

[0759] “Quantification_window_nucleotide_percentage_table.txt” output table as the percentage of reads that supported any A-to-G/C/T substitution in the main edited position (position 6 of the protospacer DNA sequence). Indels were quantified from the

[0760] “Alleles_frequency_table_around_sgRNA_*. txt” output table as the percentage of reads that supported insertions or deletions over a 5-bp window on either side of the nick site (at position-3 upstream of the PAM sequence), having excluded reads that supported deletions larger than 30 bp. For candidate off-target sites, editing was quantified from the “Alleles_frequency_table_around_sgRNA_*. txt” output table as the percentage of reads from alleles with an A->G substitution in the editing window (positions 1-10 in the PAM distal side of the protospacer), having excluded reads from alleles with deletions larger than 30 bp.

[0761] Reverse transcription. The collected cells were processed with the miRNeasy Mini Kit (QIAGEN) according to the manufacturer's instructions to isolate both large and small RNA species, with the other part harvested for genomic DNA to establish PCSK9 editing and thereby confirm base editor activity in the cells. Reverse transcription was performed using the iScript Reverse Transcription Supermix reagent according to the manufacturer's instructions, with four different primer pairs used for PCR amplification of transcripts spanning exon 1 and exon 2, with or without any portions of intron 1. Paired-end reads of 250-bp length generated using an Illumina MiSeq System, as described above, were trimmed for adapters using trimmomatic v0.39 with parameters “ILLUMINACLIP: NexteraPE-PE.fa: 2:30:10: 1: true LEADING: 3 TRAILING: 3 SLIDINGWINDOW: 4:15 MINLEN: 36”. Reads were then merged with FLASH v1.2.11³⁴ and aligned to the PCSK9 gene body with Bowtie2 v2.4.1 with parameters “—local—very-sensitive-local-k 1—np 0”. Gene annotations were obtained from Ensembl v98 (ftp://ftp.ensembl.org/pub/release-98/gtf/homo_sapiens/Homo_sapiens.GRCh38.98.gtf.gz). Alignments were filtered with samtools v1.10 and converted to BED format with the bedtools v2.25.0 bamtobed function. A minimum of 1000 mapped reads per sample were required and the end positions of mapped reads were tallied. Positions throughout PCSK9 intron 1 supported by a minimum of 10 reads in at least one treated sample are report.

[0762] ONE-seq analysis to predict candidate off-target sites. The design of a ONE-seq library starts with the computational identification of sites in a reference genome that have sequence homology to the on-target. For human ONE-seq libraries, the reference human genome (GRCh38, Ensembl v98, chromosomes ftp://ftp.ensembl.org/pub/release-98/fasta/homo_sapiens/dna/Homo_sapiens.GRCh38.dna. chromosome. {1-22,X,Y,MT}.fa and ftp://ftp.ensembl.org/pub/release-98/fasta/homo_sapiens/dna/Homo_sapiens.GRCh38.dna.nonchromosomal.fa), was searched for potential off-target sites with up to 6 mismatches to the protospacer sequence above, and sites with up to 4 mismatches plus up to 2 DNA or RNA bulges, using Cas-Designer v1.2 (http://www.rgenome.net/cas-designer/).

[0763] For the ONE-seq library pertaining to the cynomolgus monkey, the reference cynomolgus monkey genome (macFas5, Ensembl 98, chromosomes ftp://ftp.ensembl.org/pub/release-98/fasta/macaca_fascicularis/dna/Macaca_fascicularis.Macaca_fascicularis_5.0.dna.chromos ome. {1-20,X,MT}.fa.gz and ftp://ftp.ensembl.org/pub/release-98/fasta/macaca_fascicularis/dna/Macaca_fascicularis.Macaca_fascicularis_5.0.dna.nonchro mosomal.fa.gz) was searched using similar parameters.

[0764] Sites with up to 6 mismatches and no bulges are referred to using a X<number of mismatches><number of bulges>code. As such, the on-target site is labelled as X00; a site with 1 mismatch to the on-target and no bulges is labelled as X10, and so on. Sites with DNA bulges are referred to with a similar nomenclature, DNA<number of mismatches><number of bulges>. As such, a site with 4 mismatches to the on-target and 2 DNA bulges is labelled as DNA42. The same nomenclature is used for RNA bulges, but these are coded as RNA<number of mismatches><number of bulges>.

[0765] The protospacer sequences identified were extended by 10 nucleotides (nt) on both sides with adjacent sequence from the respective reference genome (these regions are herein referred to as the genomic context). These extended sequences were then padded by additional sequences up to a final length of approximately 200 nt, including 6 predefined constant regions of different nucleotide composition and sequence length; 2 copies of a 14-nt site-specific barcode, one on each side of the central protospacer sequence; and 2 distinct 11-nt unique molecular identifiers (UMIs), one on each side of the central protospacer sequence. The UMIs are used to correct for bias from PCR amplification, and the barcodes allow for the unambiguous identification of each site during analysis. The barcodes are selected from an initial list of 668,420 barcodes, which contain neither a CC nor a GG in their sequences, and each barcode has a Hamming distance of 2 from any other barcode. A custom Python script was used for designing the final library.

[0766] The final oligonucleotide libraries are synthesized by a commercial vendor (Agilent Technologies). Each library is PCR-amplified and subjected to 1.25×AMPure XP bead purification (Beckman Coulter). After incubation at 25° C. for 10 minutes in CutSmart buffer (New England Biolabs), RNP comprising 769 nM recombinant ABE8.8-m protein and 1.54 μM gRNA is mixed with 100 ng of the purified library and incubated at 37° C. for 8 hours. The RNP dose is derived from an analysis documenting that it is a super-saturating dose, ie, above the dose that achieves the maximum amount of on-target editing in the biochemical assay.

[0767] Proteinase K (New England Biolabs) is added to quench the reaction at 37° C. for 45 minutes, followed by 2x AMPure XP bead purification. The reaction is then serially incubated with EndoV (New England Biolabs) at 37° C. for 30 minutes, Klenow Fragment (New England Biolabs) at 37° C. for 30 minutes, and NEBNext Ultra II End Prep Enzyme Mix (New England Biolabs) at 20° C. for 30 minutes followed by 65° C. for 30 minutes, with 2×AMPure XP bead purification after each incubation. The reaction is ligated with an annealed adaptor oligonucleotide duplex at 20° C. for 1 hour to facilitate PCR amplification of the cleaved library products, followed by 2x AMPure XP bead purification. Size selection of the ligated reaction is performed on a PippinHT system (Sage Sciences) to isolate DNA of 150 to 200 bp on a 3% agarose gel cassette, followed by 2 rounds of PCR amplification to generate a barcoded library, which undergoes paired-end sequencing on an Illumina MiSeq System as described above.

[0768] Two cleavage products are obtained in a ONE-seq experiment. The PROTO side includes the part of the oligonucleotide upstream of the cleavage position, whereas the PAM side includes part of the oligonucleotide downstream of the cleavage position. In an ABE experiment, only the PROTO side is informative of editing activity (an A >G substitution); therefore, only this side is sequenced.

[0769] Paired-end reads were trimmed for sequencing adapters using trimmomatic v0.39 (Bolger et al., 2014) with custom Nextera adapters (PrefixPE/1: ACACTCTTTCCCTACACGACGCTCTTCCGATCT (SEQ ID NO: 3182); PrefixPE/2: GTGACTGGAGTTCAGACGTGTGCTCTTCCGATCT (SEQ ID NO: 3183); as specified in file) and parameters “ILLUMINACLIP: NEB_custom.fa: 2:30:10:1: true LEADING: 0 TRAILING: 0 SLIDINGWINDOW: 4:30 MINLEN: 36”. For experiments with lower sequencing quality (VOL014), these parameters were set to “ILLUMINACLIP NEB_custom.fa: 2:30:10:1: true LEADING: 2 TRAILING: 0 SLIDINGWINDOW: 30:30 MINLEN: 36”. Reads were then merged using FLASH v1.2.11 (Magoc and Salzberg, 2011) with parameters “--max-mismatch-density=0.25--max-overlap=160”. Merged reads were scanned for the constant sequences, barcodes and protospacer sequences unique to each site, and filtered to those with evidence of an A->G substitution in the editing window (defined as the 1-10 most PAM-distal positions of the protospacer). Duplicated reads were discarded.

[0770] For each site, the total number of edited reads was normalized to the total number of edited reads assigned to the on-target site, and this ratio defines the ONE-seq score for the site. Sites were ranked by ONE-seq score, and those with a score equal to or larger than 0.001, were selected for validation. This implies the sponsor follows up on sites that have down to 1000-fold less editing activity in the biochemical assay compared to editing of the on-target site. This threshold is based on the premise that in cells, if there is 100% on-target editing, 1/1000-fold less editing activity would translate to <0.1% off-target editing, which falls below the lower limit of detection of editing by NGS.

[0771] SureSelect. SureSelect panels were designed and purchased from Agilent Technologies. Bases in raw FASTQ files with quality lower than 30 were masked to Ns using seqtk v1.3-r106 (https://github.com/lh3/seqtk). Adapters were trimmed using the “Trimmer” script in Agilent's AGENT v2.0.5 tool. Reads were aligned to the GRCh38 reference human genome (ftp://ftp.ncbi.nlm.nih.gov/genomes/all/GCA/000/001/405/GCA_000001405.15_GRCh38/seq s_for_alignment_pipelines. ucsc_ids/GCA_000001405.15_GRCh38_no_alt_analysis_set.fna) using BWA MEM v 0.7.17-r1188 with parameter “—C”. Aligned reads were processed and duplicates were removed using the “LocatIt” script in Agilent's AGENT v2.0.5 tool, with parameters “-i-R—IB—OB—U-1<Covered.bed >”. Nucleotide distributions at each position in the editing window (positions 1-10 in the PAM distal side of the protospacer) were determined using perbase v0.6.3 (https://github.com/sstadick/perbase), with parameters “base-depth-F 3848”. Editing was quantified by summing the percentage of reads supporting an A→G substitution in the editing window.

[0772] RNA-seq for guide-independent off-target analysis. The RNA samples were processed and sequenced by GENEWIZ; following rRNA depletion, libraries were prepared and underwent 2×150-bp paired-end sequencing on an Illumina HiSeq System, with approximate 50 million reads per sample. RNA-seq variant calling for all samples was executed using GATK Best Practices. In short, reads were aligned using STAR to the GRCh38 reference genome (ftp.ncbi.nlm.nih.gov/genomes/all/GCA/000/001/405/GCA_000001405.15_GRCh38/seqs_fo r_alignment_pipelines.ucsc_ids/GCA_000001405.15_GRCh38_no_alt_analysis_set.fna.gz) with gencode v34 (ftp://ftp.ebi.ac.uk/pub/databases/gencode/Gencode_human/release_34/gencode.v34.primary assembly.annotation.gtf.gz). PCR duplicates were removed using GATK MarkDuplicates, followed by variant identification using GATK HaplotypeCaller. Variants were then filtered by excluding those with QD (Quality of Depth)<2.0 and FS (Fisher strand-evidence of strand bias)>30. All GATK analyses were performed with gatk4 v4.1.8.1.

[0773] Variants obtained as above were further filtered by comparison with untreated control samples as follows. (1) Nucleotide distributions at each identified variant in treated cells each untreated control sample and each treated sample using perbase v0.5.1 (https://github.com/sstadick/perbase). (2) For all variants covered by at least 20 reads in both treated and untreated conditions, RNA edits were identified as those that had the reference allele (A or T) in at least 95% of reads in all untreated control samples and the alternate allele (G or C) in at least one read in the treated sample. The above steps were executed with each of the ABE8.8-treated and SpCas9-treated samples.

[0774] Guide RNA synthesis. The guide RNAs shown in Table 1 were/are synthesized under solid phase oligonucleotide synthesis and deprotection conditions using controlled pore glass support and commercially available phosphoramidite monomers and oligonucleotide synthesis reagents (Methods in Molecular Biology, 1993, 20, 81-114; ACS Chem. Biol. 2015, 10, 1181-1187, incorporated herein by reference in its entirety). The spacer section of the guide RNAs were converted to the corresponding ribonucleotides except the first 1-3 nucleotides from the 5′-end. The first 1-3 nucleotides from the 5′-end was/were converted to the corresponding 2′-O-methylribonucleotide as outlined in Table 1. The deprotected guide RNAs were purified by HPLC and the integrity of each guide RNA was confirmed by mass spectrometric analysis. The observed mass of each guide RNA was conformed to calculated mass.

[0775] mRNA production by in vitro transcription (IVT) The mRNA described herein are produced by different methods well known in the art. One of such methods is in vitro transcription (IVT) using T7 polymerase or additional RNA polymerase variants. Typically, IVT of mRNA uses a linearized DNA template that comprises a T7 polymerase promoter and associated regulatory sequences, mRNA coding sequence (CDS), 3′ and 5′ untranslated regions (UTRs), poly A tail, and additional sequence elements to enhance mRNA stability and in vivo performance. Prior to IVT, the DNA template is in the form of a plasmid, PCR product, synthetic DNA product, or any other double-stranded DNA construct; linearization of the DNA template, typically with a restriction digestion enzyme, is performed to promote run-off transcription. A typical IVT reaction includes T7 polymerase, DNA template, RNase inhibitor, cap analog, inorganic pyrophosphatase, and naturally occurring ribonucleotide triphosphates (NTPs) such as GTP, ATP, CTP, UTP, or substitutions of natural NTPs with modified NTPs such as pseudouridine, N1-methylpseudouridine, 5′methylcytidine, 5-methoxyuridine, N6-methyladenosine, and N4-acetylcytidine. The cap analog can be added during transcription or supplemented after the IVT reaction using a capping enzyme; in both instances a 2′-O-methyl group, or additional 2′ chemical modification, is added to first initiating nucleotide to produce a cap-1 form of mRNA. In some instances, poly A tail is added to the mRNA after the IVT reaction using an RNA ligase enzyme. After IVT, in some cases DNase is added to the transcription mixture to remove DNA template; alternatively, residual DNA is removed with chromatography, precipitation, or tangential flow filtration. Purification and concentration of mRNA is performed with methods such as ion exchange chromatography, affinity chromatography, precipitation, ion-pairing reversed-phase chromatography, hydrogen bond chromatography, cellulose chromatography, reversed-phase chromatography, enzymatic reactions, size exclusion chromatography, and tangential flow filtration. Similar IVT and purification process are used to produce mRNA encoding luciferase, eGFP, SpCas9, Cas12b, CBE, and ABE; in all cases the DNA template, reaction conditions, and purification parameters are optimized for the specific gene of interest.

[0776] Lipid nanoparticle formulation and analysis. LNPs used were formulated as previously described (Conway, A. et al. 2019 Mol. Ther. 27, 866-877; Villiger, L. et al 2021 Nat. Blomed. Eng. 5, 179-189) and generated either by (1) microfluidic mixing using the Precision Nanosystems NanoAssemblr system according to the manufacturer's protocol, with some optimization for individual payloads or by (2) rapid inline mixing of a solution of lipid excipients in an organic solvent and an aqueous solution of gRNA and mRNA. The lipid solution generally comprises of a mixture of four formulation excipients namely: an amino lipid, a monomethoxypolyethylene glycol (or methoxypoluyethyle glycol) of average molecular weight 2000 Da conjugated to a lipid called PEG-Lipid, cholesterol and 1,2-distearoyl-sn-glycero-3-phosphocholine (DSPC), mixed in a predetermined molar ratio in ethanol. LNP composition comprised 40-65% of amino lipid, 2-20% DSPC, 1-5% PEG-Lipid, with the balance being cholesterol (all in mol %). The RNA aqueous solution contains a 1:1 by weight mixture of desired mRNA and guide RNA (gRNA) unless otherwise specified. For evaluating impact of mRNA to gRNA ratio, aqueous solution containing desired weight ratio of mRNA and gRNA were prepared prior to the preparation of corresponding LNPs, for evaluation; for example, the preparation of LNP test article to evaluate 6:1, 3:1, 2:1, 1:1, 1:2, 1:3 and 1:6 mRNA to gRNA ratio in mice (Example 6, FIG. 19). In some other instances, the mRNA and two gRNAs were mixed in 1:0.5:0.5 (mRNA: gRNA1: gRNA2) weight ratio to prepare LNPs containing desired mRNA and two gRNAs in a single test article (Example 10, FIG. 43). The aqueous solution of desired mRNA to gRNA was then mixed with the lipid excipients in ethanol by microfluidic or by rapid inline mixing. All LNPs for reported NHP studies were prepared by following the inline mixing protocols as described WO 2019/036028 A1, WO 2015/199952 A1, WO 2017/004143, WO 2020/081938 A1 and WO 2020/061426 A2. The PEG-Lipid used for the preparation of the NHP LNP test articles was selected from WO 2019/036028 A1, WO 2015/199952 A1. The LNP compositions and ionizable amino lipids were selected from the from Patent Publications WO/2017/004143A1, WO/2017/075531A1 and WO/2018/191719 A1. The ionizable amino lipids used for the preparation of LNP #1 and LNP #2 (Example 8, FIG. 30 & FIG. 45) were selected from the publication WO 2018/191719 A1. The resulting LNP formulations were subsequently dialyzed against test article buffer and filtered using a 0.2 μm sterile filter.

[0777] As an example, the LNPs used for cellular and NHP studies had an average hydrodynamic diameter range of 55 to 65 nm, with a polydispersity index of <0.2 as determined by dynamic light scattering and 85-98% total RNA encapsulation as measured by the Quant-iT Ribogreen Assay. The LNP particle size (Z-Ave, hydrodynamic diameter), polydispersity index and total RNA encapsulation were measured as described in the literature prior to administration.

[0778] As an example, the LNPs used for cellular and mouse studies had a particle size of 55-120 nm (Z-Ave, hydrodynamic diameter), with a polydispersity index of <0.2 as determined by dynamic light scattering (Malvern NanoZS Zetasizer) and 85-100% total RNA encapsulation as measured by the Quant-iT Ribogreen Assay (Thermo Fisher).

[0779] Genomic DNA extraction. The whole mouse liver or 100-200 mg of monkey liver was loaded into 2 mL lysing matrix tubes (MP Bio). Livers were lysed with 0.5 ml PBS for the mouse liver or 0.25 mL PBS for the monkey liver, using the FastPrep-24 system (MP Bio) according to the manufacturer's protocol. Genomic DNA was isolated from approximately 20 μL of mouse or monkey liver lysate using a bead-based extraction kit, MagMAX-96 DNA Multi-Sample Kit (Thermo-Fisher Scientific) on the KingFisher Flex automated extraction instrument (Thermo-Fisher Scientific) according to the manufacturer's protocols. For monkey liver biopsy samples, Qiagen DNEasy Blood & Tissue kit extraction was used to extract genomic DNA according to the manufacturer's instructions. Extracted genomic DNA was stored at 4° C. until further use or at −80° C. for long term storage.

[0780] PCSK9 protein levels quantified by ELISA. Blood samples were collected and processed to plasma following blood draw. The plasma cynomolgus PCSK9 levels were determined by ELISA using the described ELISA; briefly, test samples or standards of purified cynomolgus monkey PCSK9 diluted in assay diluent D (Biolegend, part #76384) were incubated with assay buffer A (Biolegend, part #78232) in a 96-well microplate coated with a monoclonal antibody specific for human PCSK9 (Biolegend, part #76157). After four washes with wash buffer (Biolegend, part #78233), a polyclonal antibody specific for human PCSK9 (Biolegend, part #76158) was incubated in individual wells. After four washes, avidin-HRP (Biolegend, part #77897) were next incubated in individual wells. After six washes, substrate solution F (Biolegend, part #79132), which contains TMB, was used to develop the plate. Optical density was determined using on a microplate reader set to 450 nm. Readings at 570 nm were subtracted from the readings at 450 nm to correct for optical imperfections in the plate. Blood samples were collected and processed to plasma following blood draw and stored at −86 to −60° C. until analysis.

[0781] ANGPTL3 protein levels quantified by ELISA. The plasma cynomolgus ANGPTL3 levels were determined by ELISA; briefly, test samples or standards of purified cynomolgus monkey ANGPTL3 diluted in calibrator diluent RD6Q (R&D, part #895128) were incubated with assay diluent RD1-76 (R&D, part #895812) in a 96-well microplate coated with a monoclonal antibody specific for human ANGPTL3 (R&D, part #893734). After four washes with wash buffer (R&D, part #895003), human ANGPTL3 conjugate (R&D, part #893735) which contains a polyclonal antibody specific for human ANGPTL3 conjugated to horseradish peroxidase (HRP) were next incubated in individual wells. After four washes, TMB substrate solution (R&D, part #895000 and 895001) was used to develop the plate. Optical density was determined using on a microplate reader set to 450 nm. Readings at 540 nm were subtracted from the readings at 450 nm to correct for optical imperfections in the plate.

[0782] Quantifying lipid levels. Reagent kits each analyte contain reagent, cholesterol, triglycerides and HDL-C are quantified using absorbance measurements of specific enzymatic reaction products. LDL-C is determined indirectly. Most of the circulating cholesterol is found in three major lipoprotein fractions: very low-density lipoproteins (VLDL), LDL and HDL. [Total C]=[VLDL-C]+[LDL-C]+[HDL-C]. Thus the LDL-C can be calculated from measured values of total cholesterol, triglycerides and HDL-C according to the relationship: [LDL-C]=[total C]−[HDL-C]−[TG]/5, where [TG]/5 is an estimate of VLDL-cholesterol expressed. These results provide a preclinical proof of concept of a base-editing therapy knocking down PCSK9 in the human liver in vivo and effecting reductions in blood PCSK9 protein and LDL-C levels.

[0783] Direct measurement of triglyceride levels. A clinical analyzer instrument is used to measure a ‘lipid panel’ in serum samples. This entails the direct measurement of cholesterol (total C), triglycerides (TG) and high-density lipoprotein cholesterol (HDL-C). A reagent kit specific for triglycerides contains buffers, calibrators, blanks and controls. Using the provided reagents, serum samples from the study are analyzed. Triglycerides are measured using a series of coupled enzymatic reactions. H₂O₂ is the end product of the last one and its absorbance at 500 nm is used to quantify the analyte. The color intensity is proportional to triglyceride concentrations. All values are reported in mg/dL.

[0784] LNP treatment of mice. The mouse studies were approved by the Institutional Animal Care and Use Committee of the Charles River Accelerator and Development Lab (CRADL), where the studies were performed. Female C57BL/6J mice were obtained from The Jackson Laboratory and used for experiments at 8-10 weeks of age, with random assignment of animals to various experimental groups. LNP were administered to the mice via injection into the lateral tail vein and/or retro-orbital injection of the of the venous sinus (Lab Anim 2011; 40 (5): 155-160) at mg/kg doses that correspond to mg of total RNA per animal weight (kilogram). The dose is calculated based on total RNA that constitute the amount of mRNA and gRNA, after formulating the LNP. One week following treatment, the mice were euthanized unless otherwise stated, and liver samples were obtained on necropsy and processed with the KingFisher Flex Purification System according to the manufacturer's instructions to isolate genomic DNA.

[0785] LNP treatment of NHPs. The NHP studies were approved by the Institutional Animal Care and Use Committees of Envol Biomedical and Altasciences, respectively. NHPs studies were performed at Envol Biomedical (study #VTP2001) and Altasciences (study #1388.02, 04, 05, 09, and 11), with both studies using Macaca fascicularis) of Cambodian origin. The animals were 2-3 years of age and 2-3 kilograms in weight at the time of study initiation. All the animals were genotyped at the PCSK9 and/or ANGPTL3 editing site(s) to ensure that any animals receiving LNPs were homozygous for the protospacer DNA sequences perfectly matching the gRNA sequence, and animals were randomly assigned to various experimental groups. The animals were premedicated with 1 mg/kg dexamethasone, 0.5 mg/kg famotidine, and 5 mg/kg diphenhydramine prior to LNP administration unless otherwise stated. The LNP were administered using a temporary catheter inserted into a peripheral vein connected to a primed infusion line, over the course of 1 hour (+/−5 minutes). Dose formulations were administered at a volume of 6 ml/kg, unless otherwise specified, and dosed at mg/kg corresponding to mg of total RNA per animal weight (kilogram). The dose is calculated based on total RNA that constitute the amount of mRNA and gRNA, after formulating the LNP. The appropriate volume based on the weight of the animal was delivered using an infusion pump. Control animals received phosphate-buffered saline instead of LNP under the same infusion conditions. When there are two LNPs constituted from amino lipid 1 and amino lipid 2 used in the same NHP study, the test articles are identified as LNP #1 and LNP #2 where mRNA and gRNA used for preparing these LNPs are the same. If there is only one LNP composition used in a study, the test article is identified as LNP

[0786] For blood chemistry samples, animals were fasted for at least 4 hours before collection via peripheral venipuncture. NHP studies generally followed collection on the following schedule: day-10, day-7, day-5, day 1 (6 hours after LNP infusion), day 2, day 3, day 5, day 8, and day 15. In the long-term study, samples were also collected at day 21 and day 28 and have generally been collected every 2 weeks thereafter and analyzed by the study site for LDL cholesterol, HDL cholesterol, total cholesterol, triglycerides, AST, and ALT. For each analyte, the mean of the values at day-10, day-7, and day-5 were regarded as the baseline value. A portion of each blood sample was sent to the investigators for PCSK9 or ANGPTL3 protein measurement.

[0787] Analysis of cytokine levels. The serum cynomolgus IL-6, MCP-1 and IP-10 levels were determined by U-PLEX Biomarker Group 1 (NHP) Assays (Meso Scale Discovery, #K15068L-2) according to manufacturer's instruction. Briefly, U-PLEX (Meso Scale Discovery, #N05230) plate was incubated overnight at 4° C. with linker-coupled capture antibodies (MCP-1 antibody; Meso Scale Discovery, #C26UG-3, IL-6 antibody; Meso Scale Discovery, #C21TX-3, IP-10 antibody; Meso Scale Discovery, #C21UF-3). After 3 washes with PBS-T (PBS containing 0.05% Tween 20), test samples or Calibrator standards (Calibrator 1; Meso Scale Discovery, #C0060-2, Calibrator 2: Meso Scale Discovery, #C0061-2) were incubated with assay diluent 43 (Meso Scale Discovery, #R⁵⁰AG-2), which contains serum, blockers and preservatives, at room temperature for an hour. After 3 washes, SULFO-TAG conjugated detection antibodies for IL-6 (Meso Scale Discovery, #D26TX-3), MCP-1 (Meso Scale Discovery, #D26UG-3) and IP-10 (Meso Scale Discovery, #D21UF-3) were incubated in individual wells at at room temperature for an hour. After 3 washes and adding Gold™ read buffer B (Meso Scale Discovery, #R60AM-2) to each well, the plate was analyzed by MSD instrument (Meso Scale Discovery, #R31QQ-3.

TABLE 23
ABE variant sequences
MA004 mRNA and protein sequences

| | | | SEQ ID |
|---|---|---|---|
| Region | Sequence | | NO |
| Full | mRNA | AGGAAAu′AAGAGAGAAAAGAAGAGu′AAGAAGAAAu′ | 2192 |
| sequence | | Au′AAGAGCCACCAu′GAGCGAGGu′GGAGu′u′CAGCCA | |
| | | CGAGu′ACu′GGAu′GCGGCACGCCCu′GACCCu′GGCCAA | |
| | | GCGGGCCCGGGACGAGCGGGAGGu′GCCCGu′GGGCGC | |
| | | CGu′GCu′GGu′GCu′GAACAACCGGGu′GAu′CGGCGAGG | |
| | | GCu′GGAACCGGGCCAu′CGGCCu′GCACGACCCCACCG | |
| | | CCCACGCCGAGAu′CAu′GGCCCu′GCGGCAGGGCGGCCu | |
| | | ′GGu′GAu′GCAGAACu′ACCGGCu′GAu′CGACGCCACCCu | |
| | | ′Gu′ACGu′GACCu′u′CGAGCCCu′GCGu′GAu′Gu′GCGCCG | |
| | | GCGCCAu′GAu′CCACAGCCGGAu′CGGCCGGGu′GGu′Gu | |
| | | ′u′CGGCGu′GCGGAACGCCAAGACCGGCGCCGCCGGCA | |
| | | GCCu′GAu′GGACGu′GCu′GCACCACCCCGGCAu′GAACC | |
| | | ACCGGGu′GGAGAu′CACCGAGGGCAu′CCu′GGCCGACG | |
| | | AGu′GCGCCGCCCu′GCu′Gu′GCCGGu′u′Cu′u′CCGGAu′G | |
| | | CCCCGGCGGGu′Gu′u′CAACGCCCAGAAGAAGGCCCAG | |
| | | AGCAGCACCGACAGCGGCGGCAGCAGCGGCGGCAGCA | |
| | | GCGGCAGCGAGACACCCGGCACCAGCGAGAGCGCCAC | |
| | | CCCCGAGAGCAGCGGCGGCAGCAGCGGCGGCAGCGAC | |
| | | AAGAAGu′ACAGCAu′CGGCCu′GGCCAu′CGGCACCAAC | |
| | | AGCGu′GGGCu′GGGCCGu′GAu′CACCGACGAGu′ACAA | |
| | | GGu′GCCCAGCAAGAAGu′u′CAAGGu′GCu′GGGCAACA | |
| | | CCGACCGGCACAGCAu′CAAGAAGAACCu′GAu′CGGCG | |
| | | CCCu′GCu′Gu′u′CGACAGCGGCGAGACAGCCGAGGCCA | |
| | | CCCGGCu′GAAGCGGACCGCCCGGCGGCGGu′ACACCC | |
| | | GGCGGAAGAACCGGAu′Cu′GCu′ACCu′GCAGGAGAu′Cu | |
| | | ′u′CAGCAACGAGAu′GGCCAAGGu′GGACGACAGCu′u′C | |
| | | u′u′CCACCGGCu′GGAGGAGAGCu′u′CCu′GGu′GGAGGA | |
| | | GGACAAGAAGCACGAGCGGCACCCCAu′Cu′u′CGGCAA | |
| | | CAu′CGu′GGACGAGGu′GGCCu′ACCACGAGAAGu′ACCC | |
| | | CACCAu′Cu′ACCACCu′GCGGAAGAAGCu′GGu′GGACAG | |
| | | CACCGACAAGGCCGACCu′GCGGCu′GAu′Cu′ACCu′GGC | |
| | | CCu′GGCCCACAu′GAu′CAAGu′u′CCGGGGCCACu′u′CCu | |
| | | ′GAu′CGAGGGCGACCu′GAACCCCGACAACAGCGACGu′ | |
| | | GGACAAGCu′Gu′u′CAu′CCAGCu′GGu′GCAGACCu′ACA | |
| | | ACCAGCu′Gu′u′CGAGGAGAACCCCAu′CAACGCCAGCG | |
| | | GCGu′GGACGCCAAGGCCAu′CCu′GAGCGCCCGGCu′GA | |
| | | GCAAGAGCCGGCGGCu′GGAGAACCu′GAu′CGCCCAGC | |
| | | u′GCCCGGCGAGAAGAAGAACGGCCu′Gu′u′CGGCAACC | |
| | | u′GAu′CGCCCu′GAGCCu′GGGCCu′GACCCCCAACu′u′CA | |
| | | AGAGCAACu′u′CGACCu′GGCCGAGGACGCCAAGCu′GC | |
| | | AGCu′GAGCAAGGACACCu′ACGACGACGACCu′GGACA | |
| | | ACCu′GCu′GGCCCAGAu′CGGCGACCAGu′ACGCCGACC | |
| | | u′Gu′u′CCu′GGCCGCCAAGAACCu′GAGCGACGCCAu′CC | |
| | | u′GCu′GAGCGACAu′CCu′GCGGGu′GAACACCGAGAu′C | |
| | | ACCAAGGCCCCCCu′GAGCGCCAGCAu′GAu′CAAGCGG | |
| | | u′ACGACGAGCACCACCAGGACCu′GACCCu′GCu′GAAG | |
| | | GCCCu′GGu′GCGGCAGCAGCu′GCCCGAGAAGu′ACAAG | |
| | | GAGAu′Cu′u′Cu′u′CGACCAGAGCAAGAACGGCu′ACGC | |
| | | CGGCu′ACAu′CGACGGCGGCGCCAGCCAGGAGGAGu′u′ | |
| | | Cu′ACAAGu′u′CAu′CAAGCCCAu′CCu′GGAGAAGAu′GG | |
| | | ACGGCACCGAGGAGCu′GCu′GGu′GAAGCu′GAACCGGG | |
| | | AGGACCu′GCu′GCGGAAGCAGCGGACCu′u′CGACAACG | |
| | | GCAGCAu′CCCCCACCAGAu′CCACCu′GGGCGAGCu′GC | |
| | | ACGCCAu′CCu′GCGGCGGCAGGAGGACu′u′Cu′ACCCCu′ | |
| | | u′CCu′GAAGGACAACCGGGAGAAGAu′CGAGAAGAu′CC | |
| | | u′GACCu′u′CCGGAu′CCCCu′ACu′ACGu′GGGCCCCCu′G | |
| | | GCCCGGGGCAACAGCCGGu′u′CGCCu′GGAu′GACCCGC | |
| | | AAGAGCGAGGAGACAAu′CACCCCCu′GGAACu′u′CGAG | |
| | | GAGGu′GGu′GGACAAGGGCGCCAGCGCCCAGAGCu′u′C | |
| | | Au′CGAGCGGAu′GACCAACu′u′CGACAAGAACCu′GCCC | |
| | | AACGAGAAGGu′GCu′GCCCAAGCACAGCCu′GCu′Gu′AC | |
| | | GAGu′ACu′u′CACCGu′Gu′ACAACGAGCu′GACCAAGGu′ | |
| | | GAAGu′ACGu′GACCGAGGGCAu′GCGGAAGCCCGCCu′u′ | |
| | | CCu′GAGCGGCGAGCAGAAGAAGGCCAu′CGu′GGACCu′ | |
| | | GCu′Gu′u′CAAGACCAACCGGAAGGu′GACCGu′GAAGC | |
| | | AGCu′GAAGGAGGACu′ACu′u′CAAGAAGAu′CGAGu′GC | |
| | | u′u′CGACAGCGu′GGAGAu′CAGCGGCGu′GGAGGACCG | |
| | | Gu′u′CAACGCCAGCCu′GGGCACCu′ACCACGACCu′GCu′ | |
| | | GAAGAu′CAu′CAAGGACAAGGACu′u′CCu′GGACAACG | |
| | | AGGAGAACGAGGACAu′CCu′GGAGGACAu′CGu′GCu′G | |
| | | ACCCu′GACCCu′Gu′u′CGAGGACCGGGAGAu′GAu′CGA | |
| | | GGAGCGGCu′GAAGACCu′ACGCCCACCu′Gu′u′CGACGA | |
| | | CAAGGu′GAu′GAAGCAGCu′GAAGCGGCGGCGGu′ACAC | |
| | | CGGCu′GGGGCCGGCu′GAGCCGGAAGCu′GAu′CAACGG | |
| | | CAu′CCGGGACAAGCAGAGCGGCAAGACCAu′CCu′GGA | |
| | | Cu′u′CCu′CAAGAGCGACGGCu′u′CGCCAACCGGAACu′u | |
| | | ′CAu′GCAGCu′GAu′CCACGACGACAGCCu′GACCu′u′CA | |
| | | AGGAGGACAu′CCAGAAGGCCCAGGu′GAGCGGCCAGG | |
| | | GCGACAGCCu′GCACGAGCACAu′CGCCAACCu′GGCCG | |
| | | GCAGCCCCGCCAu′CAAGAAGGGCAu′CCu′GCAGACCG | |
| | | u′GAAGGu′GGu′GGACGAGCu′GGu′GAAGGu′GAu′GGGC | |
| | | CGGCACAAGCCCGAGAACAu′CGu′GAu′CGAGAu′GGCC | |
| | | CGGGAGAACCAGACCACCCAGAAGGGCCAGAAGAAC | |
| | | AGCCGGGAGCGGAu′GAAGCGGAu′CGAGGAGGGCAu′C | |
| | | AAGGAGCu′GGGCAGCCAGAu′CCu′GAAGGAGCACCCC | |
| | | Gu′GGAGAACACCCAGCu′GCAGAACGAGAAGCu′Gu′AC | |
| | | Cu′Gu′ACu′ACCu′GCAGAACGGCCGGGACAu′Gu′ACGu′ | |
| | | GGACCAGGAGCu′GGACAu′CAACCGGCu′GAGCGACu′A | |
| | | CGACGu′GGACCACAu′CGu′GCCCCAGAGCu′u′CCu′GAA | |
| | | GGACGACAGCAu′CGACAACAAGGu′GCu′GACCCGGAG | |
| | | CGACAAGAACCGGGGCAAGAGCGACAACGu′GCCCAG | |
| | | CGAGGAGGu′GGu′GAAGAAGAu′GAAGAACu′ACu′GGC | |
| | | GGCAGCu′GCu′GAACGCCAAGCu′GAu′CACCCAGCGGA | |
| | | AGu′u′CGACAACCu′GACCAAGGCCGAGCGGGGCGGCC | |
| | | u′GAGCGAGCu′GGACAAGGCCGGCu′u′CAu′CAAGCGGC | |
| | | AGCu′GGu′GGAGACACGGCAGAu′CACCAAGCACGu′GG | |
| | | CCCAGAu′CCu′GGACAGCCGGAu′GAACACCAAGu′ACG | |
| | | ACGAGAACGACAAGCu′GAu′CCGGGAGGu′GAAGGu′G | |
| | | Au′CACCCu′CAAGAGCAAGCu′GGu′GAGCGACu′u′CCG | |
| | | GAAGGACu′u′CCAGu′u′Cu′ACAAGGu′GCGGGAGAu′CA | |
| | | ACAACu′ACCACCACGCCCACGACGCCu′ACCu′GAACG | |
| | | CCGu′GGu′GGGCACCGCCCu′GAu′CAAGAAGu′ACCCCA | |
| | | AGCu′GGAGAGCGAGu′u′CGu′Gu′ACGGCGACu′ACAAG | |
| | | Gu′Gu′ACGACGu′GCGGAAGAu′GAu′CGCCAAGAGCGA | |
| | | GCAGGAGAu′CGGCAAGGCCACCGCCAAGu′ACu′u′Cu′u | |
| | | ′Cu′ACAGCAACAu′CAu′GAACu′u′Cu′u′CAAGACCGAGA | |
| | | u′CACCCu′GGCCAACGGCGAGAu′CCGGAAGCGGCCCCu | |
| | | ′GAu′CGAGACAAACGGCGAGACAGGCGAGAu′CGu′Gu′ | |
| | | GGGACAAGGGCCGGGACu′u′CGCCACCGu′GCGGAAGG | |
| | | u′GCu′GAGCAu′GCCCCAGGu′GAACAu′CGu′GAAGAAG | |
| | | ACCGAGGu′GCAGACCGGCGGCu′u′CAGCAAGGAGAGC | |
| | | Au′CCu′GCCCAAGCGGAACAGCGACAAGCu′GAu′CGCC | |
| | | CGGAAGAAGGACu′GGGACCCCAAGAAGu′ACGGCGGC | |
| | | u′u′CGACAGCCCCACCGu′GGCCu′ACAGCGu′GCu′GGu′ | |
| | | GGu′GGCCAAGGu′GGAGAAGGGCAAGAGCAAGAAGCu | |
| | | ′CAAGAGCGu′GAAGGAGCu′GCu′GGGCAu′CACCAu′CA | |
| | | u′GGAGCGGAGCAGCu′u′CGAGAAGAACCCCAu′CGACu′ | |
| | | u′CCu′GGAGGCCAAGGGCu′ACAAGGAGGu′GAAGAAG | |
| | | GACCu′GAu′CAu′CAAGCu′GCCCAAGu′ACAGCCu′Gu′u′ | |
| | | CGAGCu′GGAGAACGGCCGGAAGCGGAu′GCu′GGCCAG | |
| | | CGCCGGCGAGCu′GCAGAAGGGCAACGAGCu′GGCCCu′ | |
| | | GCCCAGCAAGu′ACGu′GAACu′u′CCu′Gu′ACCu′GGCCA | |
| | | GCCACu′ACGAGAAGCu′GAAGGGCAGCCCCGAGGACA | |
| | | ACGAGCAGAAGCAGCu′Gu′u′CGu′GGAGCAGCACAAGC | |
| | | ACu′ACCu′GGACGAGAu′CAu′CGAGCAGAu′CAGCGAGu | |
| | | ′u′CAGCAAGCGGGu′GAu′CCu′GGCCGACGCCAACCu′G | |
| | | GACAAGGu′GCu′GAGCGCCu′ACAACAAGCACCGGGAC | |
| | | AAGCCCAu′CCGGGAGCAGGCCGAGAACAu′CAu′CCAC | |
| | | Cu′Gu′u′CACCCu′GACCAACCu′GGGCGCCCCCGCCGCCu | |
| | | ′u′CAAGu′ACu′u′CGACACCACCAu′CGACCGGAAGCGGu | |
| | | ′ACACCAGCACCAAGGAGGu′GCu′GGACGCCACCCu′GA | |
| | | u′CCACCAGAGCAu′CACCGGCCu′Gu′ACGAGACACGGA | |
| | | u′CGACCu′GAGCCAGCu′GGGCGGCGACGAGGGCGCCG | |
| | | ACAAGCGGACCGCCGACGGCAGCGAGu′u′CGAGAGCC | |
| | | CCAAGAAGAAGCGGAAGGu′Gu′GAGCGGCCGCu′u′AAu | |
| | | ′u′AAGCu′GCCu′u′Cu′GCGGGGCu′u′GCCu′u′Cu′GGCCAu | |
| | | ′GCCCu′u′Cu′u′Cu′Cu′CCCu′u′GCACCu′Gu′ACCu′Cu′u′G | |
| | | Gu′Cu′u′u′GAAu′AAAGCCu′GAGu′AGGAAGu′Cu′AGA | |
| | protein | MSEVEFSHEYWMRHALTLAKRARDEREVPVGAVLVLNN | 2137 |
| | | RVIGEGWNRAIGLHDPTAHAEIMALRQGGLVMQNYRLID | |
| | | ATLYVTFEPCVMCAGAMIHSRIGRVVFGVRNAKTGAAG | |
| | | SLMDVLHHPGMNHRVEITEGILADECAALLCRFFRMPRR | |
| | | VFNAQKKAQSSTDSGGSSGGSSGSETPGTSESATPESSGG | |
| | | SSGGSDKKYSIGLAIGTNSVGWAVITDEYKVPSKKFKVL | |
| | | GNTDRHSIKKNLIGALLFDSGETAEATRLKRTARRRYTRR | |
| | | KNRICYLQEIFSNEMAKVDDSFFHRLEESFLVEEDKKHER | |
| | | HPIFGNIVDEVAYHEKYPTIYHLRKKLVDSTDKADLRLIY | |
| | | LALAHMIKFRGHFLIEGDLNPDNSDVDKLFIQLVQTYNQL | |
| | | FEENPINASGVDAKAILSARLSKSRRLENLIAQLPGEKKN | |
| | | GLFGNLIALSLGLTPNFKSNFDLAEDAKLQLSKDTYDDDL | |
| | | DNLLAQIGDQYADLFLAAKNLSDAILLSDILRVNTEITKA | |
| | | PLSASMIKRYDEHHQDLTLLKALVRQQLPEKYKEIFFDQS | |
| | | KNGYAGYIDGGASQEEFYKFIKPILEKMDGTEELLVKLN | |
| | | REDLLRKQRTFDNGSIPHQIHLGELHAILRRQEDFYPFLK | |
| | | DNREKIEKILTFRIPYYVGPLARGNSRFAWMTRKSEETITP | |
| | | WNFEEVVDKGASAQSFIERMTNFDKNLPNEKVLPKHSLL | |
| | | YEYFTVYNELTKVKYVTEGMRKPAFLSGEQKKAIVDLLF | |
| | | KTNRKVTVKQLKEDYFKKIECFDSVEISGVEDRFNASLGT | |
| | | YHDLLKIIKDKDFLDNEENEDILEDIVLTLTLFEDREMIEE | |
| | | RLKTYAHLFDDKVMKQLKRRRYTGWGRLSRKLINGIRD | |
| | | KQSGKTILDFLKSDGFANRNFMQLIHDDSLTFKEDIQKAQ | |
| | | VSGQGDSLHEHIANLAGSPAIKKGILQTVKVVDELVKVM | |
| | | GRHKPENIVIEMARENQTTQKGQKNSRERMKRIEEGIKEL | |
| | | GSQILKEHPVENTQLQNEKLYLYYLQNGRDMYVDQELDI | |
| | | NRLSDYDVDHIVPQSFLKDDSIDNKVLTRSDKNRGKSDN | |
| | | VPSEEVVKKMKNYWRQLLNAKLITQRKFDNLTKAERGG | |
| | | LSELDKAGFIKRQLVETRQITKHVAQILDSRMNTKYDEN | |
| | | DKLIREVKVITLKSKLVSDFRKDFQFYKVREINNYHHAH | |
| | | DAYLNAVVGTALIKKYPKLESEFVYGDYKVYDVRKMIA | |
| | | KSEQEIGKATAKYFFYSNIMNFFKTEITLANGEIRKRPLIE | |
| | | TNGETGEIVWDKGRDFATVRKVLSMPQVNIVKKTEVQT | |
| | | GGFSKESILPKRNSDKLIARKKDWDPKKYGGFDSPTVAY | |
| | | SVLVVAKVEKGKSKKLKSVKELLGITIMERSSFEKNPIDF | |
| | | LEAKGYKEVKKDLIIKLPKYSLFELENGRKRMLASAGEL | |
| | | QKGNELALPSKYVNFLYLASHYEKLKGSPEDNEQKQLFV | |
| | | EQHKHYLDEIIEQISEFSKRVILADANLDKVLSAYNKHRD | |
| | | KPIREQAENIIHLFTLTNLGAPAAFKYFDTTIDRKRYTSTK | |
| | | EVLDATLIHQSITGLYETRIDLSQLGGDEGADKRTADGSE | |
| | | FESPKKKRKV | |
| 5′ UTR | mRNA | AGGAAAu′AAGAGAGAAAAGAAGAGu′AAGAAGAAAu′ | 2138 |
| | | Au′AAGAGCCACC | |
| TadA | mRNA | Au′GAGCGAGGu′GGAGu′u′CAGCCACGAGu′ACu′GGAu′ | 2139 |
| | | GCGGCACGCCCu′GACCCu′GGCCAAGCGGGCCCGGGA | |
| | | CGAGCGGGAGGu′GCCCGu′GGGCGCCGu′GCu′GGu′GCu | |
| | | ′GAACAACCGGGu′GAu′CGGCGAGGGCu′GGAACCGGG | |
| | | CCAu′CGGCCu′GCACGACCCCACCGCCCACGCCGAGAu′ | |
| | | CAu′GGCCCu′GCGGCAGGGCGGCCu′GGu′GAu′GCAGAA | |
| | | Cu′ACCGGCu′GAu′CGACGCCACCCu′Gu′ACGu′GACCu′u | |
| | | ′CGAGCCCu′GCGu′GAu′Gu′GCGCCGGCGCCAu′GAu′CC | |
| | | ACAGCCGGAu′CGGCCGGGu′GGu′Gu′u′CGGCGu′GCGG | |
| | | AACGCCAAGACCGGCGCCGCCGGCAGCCu′GAu′GGAC | |
| | | Gu′GCu′GCACCACCCCGGCAu′GAACCACCGGGu′GGAG | |
| | | Au′CACCGAGGGCAu′CCu′GGCCGACGAGu′GCGCCGCC | |
| | | Cu′GCu′Gu′GCCGGu′u′Cu′u′CCGGAu′GCCCCGGCGGGu′ | |
| | | Gu′u′CAACGCCCAGAAGAAGGCCCAGAGCAGCACCGA | |
| | | C | |
| | protein | MSEVEFSHEYWMRHALTLAKRARDEREVPVGAVLVLNN | 2140 |
| | | RVIGEGWNRAIGLHDPTAHAEIMALRQGGLVMQNYRLID | |
| | | ATLYVTFEPCVMCAGAMIHSRIGRVVFGVRNAKTGAAG | |
| | | SLMDVLHHPGMNHRVEITEGILADECAALLCRFFRMPRR | |
| | | VFNAQKKAQSSTD | |
| Linker | mRNA | AGCGGCGGCAGCAGCGGCGGCAGCAGCGGCAGCGAG | 2141 |
| between | | ACACCCGGCACCAGCGAGAGCGCCACCCCCGAGAGCA | |
| TadA | | GCGGCGGCAGCAGCGGCGGCAGC | |
| and Cas9 | protein | SGGSSGGSSGSETPGTSESATPESSGGSSGGS | 20 |
| nickase | | | |
| Cas9 | mRNA | GACAAGAAGu′ACAGCAu′CGGCCu′GGCCAu′CGGCACC | 2142 |
| nickase | | AACAGCGu′GGGCu′GGGCCGu′GAu′CACCGACGAGu′AC | |
| | | AAGGu′GCCCAGCAAGAAGu′u′CAAGGu′GCu′GGGCAA | |
| | | CACCGACCGGCACAGCAu′CAAGAAGAACCu′GAu′CGG | |
| | | CGCCCu′GCu′Gu′u′CGACAGCGGCGAGACAGCCGAGGC | |
| | | CACCCGGCu′GAAGCGGACCGCCCGGCGGCGGu′ACAC | |
| | | CCGGCGGAAGAACCGGAu′Cu′GCu′ACCu′GCAGGAGAu′ | |
| | | Cu′u′CAGCAACGAGAu′GGCCAAGGu′GGACGACAGCu′u | |
| | | ′Cu′u′CCACCGGCu′GGAGGAGAGCu′u′CCu′GGu′GGAGG | |
| | | AGGACAAGAAGCACGAGCGGCACCCCAu′Cu′u′CGGCA | |
| | | ACAu′CGu′GGACGAGGu′GGCCu′ACCACGAGAAGu′ACC | |
| | | CCACCAu′Cu′ACCACCu′GCGGAAGAAGCu′GGu′GGACA | |
| | | GCACCGACAAGGCCGACCu′GCGGCu′GAu′Cu′ACCu′GG | |
| | | CCCu′GGCCCACAu′GAu′CAAGu′u′CCGGGGCCACu′u′CC | |
| | | u′GAu′CGAGGGCGACCu′GAACCCCGACAACAGCGACG | |
| | | u′GGACAAGCu′Gu′u′CAu′CCAGCu′GGu′GCAGACCu′AC | |
| | | AACCAGCu′Gu′u′CGAGGAGAACCCCAu′CAACGCCAGC | |
| | | GGCGu′GGACGCCAAGGCCAu′CCu′GAGCGCCCGGCu′G | |
| | | AGCAAGAGCCGGCGGCu′GGAGAACCu′GAu′CGCCCAG | |
| | | Cu′GCCCGGCGAGAAGAAGAACGGCCu′Gu′u′CGGCAAC | |
| | | Cu′GAu′CGCCCu′GAGCCu′GGGCCu′GACCCCCAACu′u′C | |
| | | AAGAGCAACu′u′CGACCu′GGCCGAGGACGCCAAGCu′G | |
| | | CAGCu′GAGCAAGGACACCu′ACGACGACGACCu′GGAC | |
| | | AACCu′GCu′GGCCCAGAu′CGGCGACCAGu′ACGCCGAC | |
| | | Cu′Gu′u′CCu′GGCCGCCAAGAACCu′GAGCGACGCCAu′C | |
| | | Cu′GCu′GAGCGACAu′CCu′GCGGGu′GAACACCGAGAu′ | |
| | | CACCAAGGCCCCCCu′GAGCGCCAGCAu′GAu′CAAGCG | |
| | | Gu′ACGACGAGCACCACCAGGACCu′GACCCu′GCu′GAA | |
| | | GGCCCu′GGu′GCGGCAGCAGCu′GCCCGAGAAGu′ACAA | |
| | | GGAGAu′Cu′u′Cu′u′CGACCAGAGCAAGAACGGCu′ACG | |
| | | CCGGCu′ACAu′CGACGGCGGCGCCAGCCAGGAGGAGu′ | |
| | | u′Cu′ACAAGu′u′CAu′CAAGCCCAu′CCu′GGAGAAGAu′G | |
| | | GACGGCACCGAGGAGCu′GCu′GGu′GAAGCu′GAACCGG | |
| | | GAGGACCu′GCu′GCGGAAGCAGCGGACCu′u′CGACAAC | |
| | | GGCAGCAu′CCCCCACCAGAu′CCACCu′GGGCGAGCu′G | |
| | | CACGCCAu′CCu′GCGGCGGCAGGAGGACu′u′Cu′ACCCC | |
| | | u′u′CCu′GAAGGACAACCGGGAGAAGAu′CGAGAAGAu′ | |
| | | CCu′GACCu′u′CCGGAu′CCCCu′ACu′ACGu′GGGCCCCCu′ | |
| | | GGCCCGGGGCAACAGCCGGu′u′CGCCu′GGAu′GACCCG | |
| | | CAAGAGCGAGGAGACAAu′CACCCCCu′GGAACu′u′CGA | |
| | | GGAGGu′GGu′GGACAAGGGCGCCAGCGCCCAGAGCu′u′ | |
| | | CAu′CGAGCGGAu′GACCAACu′u′CGACAAGAACCu′GCC | |
| | | CAACGAGAAGGu′GCu′GCCCAAGCACAGCCu′GCu′Gu′A | |
| | | CGAGu′ACu′u′CACCGu′Gu′ACAACGAGCu′GACCAAGGu | |
| | | ′GAAGu′ACGu′GACCGAGGGCAu′GCGGAAGCCCGCCu′u | |
| | | ′CCu′GAGCGGCGAGCAGAAGAAGGCCAu′CGu′GGACCu | |
| | | ′GCu′Gu′u′CAAGACCAACCGGAAGGu′GACCGu′GAAGC | |
| | | AGCu′GAAGGAGGACu′ACu′u′CAAGAAGAu′CGAGu′GC | |
| | | u′u′CGACAGCGu′GGAGAu′CAGCGGCGu′GGAGGACCG | |
| | | Gu′u′CAACGCCAGCCu′GGGCACCu′ACCACGACCu′GCu′ | |
| | | GAAGAu′CAu′CAAGGACAAGGACu′u′CCu′GGACAACG | |
| | | AGGAGAACGAGGACAu′CCu′GGAGGACAu′CGu′GCu′G | |
| | | ACCCu′GACCCu′Gu′u′CGAGGACCGGGAGAu′GAu′CGA | |
| | | GGAGCGGCu′GAAGACCu′ACGCCCACCu′Gu′u′CGACGA | |
| | | CAAGGu′GAu′GAAGCAGCu′GAAGCGGCGGCGGu′ACAC | |
| | | CGGCu′GGGGCCGGCu′GAGCCGGAAGCu′GAu′CAACGG | |
| | | CAu′CCGGGACAAGCAGAGCGGCAAGACCAu′CCu′GGA | |
| | | Cu′u′CCu′CAAGAGCGACGGCu′u′CGCCAACCGGAACu′u | |
| | | ′CAu′GCAGCu′GAu′CCACGACGACAGCCu′GACCu′u′CA | |
| | | AGGAGGACAu′CCAGAAGGCCCAGGu′GAGCGGCCAGG | |
| | | GCGACAGCCu′GCACGAGCACAu′CGCCAACCu′GGCCG | |
| | | GCAGCCCCGCCAu′CAAGAAGGGCAu′CCu′GCAGACCG | |
| | | u′GAAGGu′GGu′GGACGAGCu′GGu′GAAGGu′GAu′GGGC | |
| | | CGGCACAAGCCCGAGAACAu′CGu′GAu′CGAGAu′GGCC | |
| | | CGGGAGAACCAGACCACCCAGAAGGGCCAGAAGAAC | |
| | | AGCCGGGAGCGGAu′GAAGCGGAu′CGAGGAGGGCAu′C | |
| | | AAGGAGCu′GGGCAGCCAGAu′CCu′GAAGGAGCACCCC | |
| | | Gu′GGAGAACACCCAGCu′GCAGAACGAGAAGCu′Gu′AC | |
| | | Cu′Gu′ACu′ACCu′GCAGAACGGCCGGGACAu′Gu′ACGu′ | |
| | | GGACCAGGAGCu′GGACAu′CAACCGGCu′GAGCGACu′A | |
| | | CGACGu′GGACCACAu′CGu′GCCCCAGAGCu′u′CCu′GAA | |
| | | GGACGACAGCAu′CGACAACAAGGu′GCu′GACCCGGAG | |
| | | CGACAAGAACCGGGGCAAGAGCGACAACGu′GCCCAG | |
| | | CGAGGAGGu′GGu′GAAGAAGAu′GAAGAACu′ACu′GGC | |
| | | GGCAGCu′GCu′GAACGCCAAGCu′GAu′CACCCAGCGGA | |
| | | AGu′u′CGACAACCu′GACCAAGGCCGAGCGGGGCGGCC | |
| | | u′GAGCGAGCu′GGACAAGGCCGGCu′u′CAu′CAAGCGGC | |
| | | AGCu′GGu′GGAGACACGGCAGAu′CACCAAGCACGu′GG | |
| | | CCCAGAu′CCu′GGACAGCCGGAu′GAACACCAAGu′ACG | |
| | | ACGAGAACGACAAGCu′GAu′CCGGGAGGu′GAAGGu′G | |
| | | Au′CACCCu′CAAGAGCAAGCu′GGu′GAGCGACu′u′CCG | |
| | | GAAGGACu′u′CCAGu′u′Cu′ACAAGGu′GCGGGAGAu′CA | |
| | | ACAACu′ACCACCACGCCCACGACGCCu′ACCu′GAACG | |
| | | CCGu′GGu′GGGCACCGCCCu′GAu′CAAGAAGu′ACCCCA | |
| | | AGCu′GGAGAGCGAGu′u′CGu′Gu′ACGGCGACu′ACAAG | |
| | | Gu′Gu′ACGACGu′GCGGAAGAu′GAu′CGCCAAGAGCGA | |
| | | GCAGGAGAu′CGGCAAGGCCACCGCCAAGu′ACu′u′Cu′u | |
| | | ′Cu′ACAGCAACAu′CAu′GAACu′u′Cu′u′CAAGACCGAGA | |
| | | u′CACCCu′GGCCAACGGCGAGAu′CCGGAAGCGGCCCCu | |
| | | GAu′CGAGACAAACGGCGAGACAGGCGAGAu′CGu′Gu′ | |
| | | GGGACAAGGGCCGGGACu′u′CGCCACCGu′GCGGAAGG | |
| | | u′GCu′GAGCAu′GCCCCAGGu′GAACAu′CGu′GAAGAAG | |
| | | ACCGAGGu′GCAGACCGGCGGCu′u′CAGCAAGGAGAGC | |
| | | Au′CCu′GCCCAAGCGGAACAGCGACAAGCu′GAu′CGCC | |
| | | CGGAAGAAGGACu′GGGACCCCAAGAAGu′ACGGCGGC | |
| | | u′u′CGACAGCCCCACCGu′GGCCu′ACAGCGu′GCu′GGu′ | |
| | | GGu′GGCCAAGGu′GGAGAAGGGCAAGAGCAAGAAGCu | |
| | | ′CAAGAGCGu′GAAGGAGCu′GCu′GGGCAu′CACCAu′CA | |
| | | u′GGAGCGGAGCAGCu′u′CGAGAAGAACCCCAu′CGACu′ | |
| | | u′CCu′GGAGGCCAAGGGCu′ACAAGGAGGu′GAAGAAG | |
| | | GACCu′GAu′CAu′CAAGCu′GCCCAAGu′ACAGCCu′Gu′u′ | |
| | | CGAGCu′GGAGAACGGCCGGAAGCGGAu′GCu′GGCCAG | |
| | | CGCCGGCGAGCu′GCAGAAGGGCAACGAGCu′GGCCCu′ | |
| | | GCCCAGCAAGu′ACGu′GAACu′u′CCu′Gu′ACCu′GGCCA | |
| | | GCCACu′ACGAGAAGCu′GAAGGGCAGCCCCGAGGACA | |
| | | ACGAGCAGAAGCAGCu′Gu′u′CGu′GGAGCAGCACAAGC | |
| | | ACu′ACCu′GGACGAGAu′CAu′CGAGCAGAu′CAGCGAGu | |
| | | ′u′CAGCAAGCGGGu′GAu′CCu′GGCCGACGCCAACCu′G | |
| | | GACAAGGu′GCu′GAGCGCCu′ACAACAAGCACCGGGAC | |
| | | AAGCCCAu′CCGGGAGCAGGCCGAGAACAu′CAu′CCAC | |
| | | Cu′Gu′u′CACCCu′GACCAACCu′GGGCGCCCCCGCCGCCu | |
| | | ′u′CAAGu′ACu′u′CGACACCACCAu′CGACCGGAAGCGGu | |
| | | ′ACACCAGCACCAAGGAGGu′GCu′GGACGCCACCCu′GA | |
| | | u′CCACCAGAGCAu′CACCGGCCu′Gu′ACGAGACACGGA | |
| | | u′CGACCu′GAGCCAGCu′GGGCGGCGAC | |
| | protein | DKKYSIGLAIGTNSVGWAVITDEYKVPSKKFKVLGNTDR | 40 |
| | | HSIKKNLIGALLFDSGETAEATRLKRTARRRYTRRKNRIC | |
| | | YLQEIFSNEMAKVDDSFFHRLEESFLVEEDKKHERHPIFG | |
| | | NIVDEVAYHEKYPTIYHLRKKLVDSTDKADLRLIYLALA | |
| | | HMIKFRGHFLIEGDLNPDNSDVDKLFIQLVQTYNQLFEEN | |
| | | PINASGVDAKAILSARLSKSRRLENLIAQLPGEKKNGLFG | |
| | | NLIALSLGLTPNFKSNFDLAEDAKLQLSKDTYDDDLDNL | |
| | | LAQIGDQYADLFLAAKNLSDAILLSDILRVNTEITKAPLSA | |
| | | SMIKRYDEHHQDLTLLKALVRQQLPEKYKEIFFDQSKNG | |
| | | YAGYIDGGASQEEFYKFIKPILEKMDGTEELLVKLNREDL | |
| | | LRKQRTFDNGSIPHQIHLGELHAILRRQEDFYPFLKDNRE | |
| | | KIEKILTFRIPYYVGPLARGNSRFAWMTRKSEETITPWNFE | |
| | | EVVDKGASAQSFIERMTNFDKNLPNEKVLPKHSLLYEYF | |
| | | TVYNELTKVKYVTEGMRKPAFLSGEQKKAIVDLLFKTNR | |
| | | KVTVKQLKEDYFKKIECFDSVEISGVEDRFNASLGTYHDL | |
| | | LKIIKDKDFLDNEENEDILEDIVLTLTLFEDREMIEERLKT | |
| | | YAHLFDDKVMKQLKRRRYTGWGRLSRKLINGIRDKQSG | |
| | | KTILDFLKSDGFANRNFMQLIHDDSLTFKEDIQKAQVSGQ | |
| | | GDSLHEHIANLAGSPAIKKGILQTVKVVDELVKVMGRHK | |
| | | PENIVIEMARENQTTQKGQKNSRERMKRIEEGIKELGSQI | |
| | | LKEHPVENTQLQNEKLYLYYLQNGRDMYVDQELDINRL | |
| | | SDYDVDHIVPQSFLKDDSIDNKVLTRSDKNRGKSDNVPS | |
| | | EEVVKKMKNYWRQLLNAKLITQRKFDNLTKAERGGLSE | |
| | | LDKAGFIKRQLVETRQITKHVAQILDSRMNTKYDENDKLI | |
| | | REVKVITLKSKLVSDFRKDFQFYKVREINNYHHAHDAYL | |
| | | NAVVGTALIKKYPKLESEFVYGDYKVYDVRKMIAKSEQ | |
| | | EIGKATAKYFFYSNIMNFFKTEITLANGEIRKRPLIETNGE | |
| | | TGEIVWDKGRDFATVRKVLSMPQVNIVKKTEVQTGGFS | |
| | | KESILPKRNSDKLIARKKDWDPKKYGGFDSPTVAYSVLV | |
| | | VAKVEKGKSKKLKSVKELLGITIMERSSFEKNPIDFLEAK | |
| | | GYKEVKKDLIIKLPKYSLFELENGRKRMLASAGELQKGN | |
| | | ELALPSKYVNFLYLASHYEKLKGSPEDNEQKQLFVEQHK | |
| | | HYLDEIIEQISEFSKRVILADANLDKVLSAYNKHRDKPIRE | |
| | | QAENIIHLFTLTNLGAPAAFKYFDTTIDRKRYTSTKEVLD | |
| | | ATLIHQSITGLYETRIDLSQLGGD | |
| Linker | mRNA | GAGGGCGCCGAC | 2143 |
| between | Protein | EGAD | 2144 |
| Cas9 | | | |
| nickase | | | |
| and NLS | | | |
| Nuclear | mRNA | AAGCGGACCGCCGACGGCAGCGAGu′u′CGAGAGCCCC | 2145 |
| localization | | AAGAAGAAGCGGAAGGu′Gu′GA | |
| sequence | Protein | KRTADGSEFESPKKKRKV | 2146 |
| (NLS) | | | |
| 3′ UTR | mRNA | GCGGCCGCu′u′AAu′u′AAGCu′GCCu′u′Cu′GCGGGGCu′u′ | 2147 |
| | | GCCu′u′Cu′GGCCAu′GCCCu′u′Cu′u′Cu′Cu′CCCu′u′GCAC | |
| | | Cu′Gu′ACCu′Cu′u′GGu′Cu′u′u′GAAu′AAAGCCu′GAGu′A | |
| | | GGAAGu′Cu′AGA | |

MA040 mRNA and protein sequences

| | | | SEQ ID |
|---|---|---|---|
| Region | Sequence | | NO |
| Full | mRNA | AGGAAAu′AAGAGAGAAAAGAAGAGu′AAGAAGAAAu′ | 2148 |
| sequence | | Au′AAGAGCCACCAu′GAGCGAGGu′GGAGu′u′CAGCCA | |
| | | CGAGu′ACu′GGAu′GCGGCACGCCCu′GACCCu′GGCCAA | |
| | | GCGGGCCCGGGACGAGCGGGAGGu′GCCCGu′GGGCGC | |
| | | CGu′GCu′GGu′GCu′GAACAACCGGGu′GAu′CGGCGAGG | |
| | | GCu′GGAACCGGGCCAu′CGGCCu′GCACGACCCCACCG | |
| | | CCCACGCCGAGAu′CAu′GGCCCu′GCGGCAGGGCGGCCu | |
| | | ′GGu′GAu′GCAGAACu′ACCGGCu′GAu′CGACGCCACCCu | |
| | | ′Gu′ACGu′GACCu′u′CGAGCCCu′GCGu′GAu′Gu′GCGCCG | |
| | | GCGCCAu′GAu′CCACAGCCGGAu′CGGCCGGGu′GGu′Gu | |
| | | ′u′CGGCGu′GCGGAACGCCAAGACCGGCGCCGCCGGCA | |
| | | GCCu′GAu′GGACGu′GCu′GCACCACCCCGGCAu′GAACC | |
| | | ACCGGGu′GGAGAu′CACCGAGGGCAu′CCu′GGCCGACG | |
| | | AGu′GCGCCGCCCu′GCu′Gu′GCCGGu′u′Cu′u′CCGGAu′G | |
| | | CCCCGGCGGGu′Gu′u′CAACGCCCAGAAGAAGGCCCAG | |
| | | AGCAGCACCGACAGCGGCGGCAGCAGCGGCGGCAGCA | |
| | | GCGGCAGCGAGACACCCGGCACCAGCGAGAGCGCCAC | |
| | | CCCCGAGAGCAGCGGCGGCAGCAGCGGCGGCAGCGAC | |
| | | AAGAAGu′ACAGCAu′CGGCCu′GGCCAu′CGGCACCAAC | |
| | | AGCGu′GGGCu′GGGCCGu′GAu′CACCGACGAGu′ACAA | |
| | | GGu′GCCCAGCAAGAAGu′u′CAAGGu′GCu′GGGCAACA | |
| | | CCGACCGGCACAGCAu′CAAGAAGAACCu′GAu′CGGCG | |
| | | CCCu′GCu′Gu′u′CGACAGCGGCGAGACAGCCGAGGCCA | |
| | | CCCGGCu′GAAGCGGACCGCCCGGCGGCGGu′ACACCC | |
| | | GGCGGAAGAACCGGAu′Cu′GCu′ACCu′GCAGGAGAu′Cu | |
| | | ′u′CAGCAACGAGAu′GGCCAAGGu′GGACGACAGCu′u′C | |
| | | u′u′CCACCGGCu′GGAGGAGAGCu′u′CCu′GGu′GGAGGA | |
| | | GGACAAGAAGCACGAGCGGCACCCCAu′Cu′u′CGGCAA | |
| | | CAu′CGu′GGACGAGGu′GGCCu′ACCACGAGAAGu′ACCC | |
| | | CACCAu′Cu′ACCACCu′GCGGAAGAAGCu′GGu′GGACAG | |
| | | CACCGACAAGGCCGACCu′GCGGCu′GAu′Cu′ACCu′GGC | |
| | | CCu′GGCCCACAu′GAu′CAAGu′u′CCGGGGCCACu′u′CCu | |
| | | ′GAu′CGAGGGCGACCu′GAACCCCGACAACAGCGACGu′ | |
| | | GGACAAGCu′Gu′u′CAu′CCAGCu′GGu′GCAGACCu′ACA | |
| | | ACCAGCu′Gu′u′CGAGGAGAACCCCAu′CAACGCCAGCG | |
| | | GCGu′GGACGCCAAGGCCAu′CCu′GAGCGCCCGGCu′GA | |
| | | GCAAGAGCCGGCGGCu′GGAGAACCu′GAu′CGCCCAGC | |
| | | u′GCCCGGCGAGAAGAAGAACGGCCu′Gu′u′CGGCAACC | |
| | | u′GAu′CGCCCu′GAGCCu′GGGCCu′GACCCCCAACu′u′CA | |
| | | AGAGCAACu′u′CGACCu′GGCCGAGGACGCCAAGCu′GC | |
| | | AGCu′GAGCAAGGACACCu′ACGACGACGACCu′GGACA | |
| | | ACCu′GCu′GGCCCAGAu′CGGCGACCAGu′ACGCCGACC | |
| | | u′Gu′u′CCu′GGCCGCCAAGAACCu′GAGCGACGCCAu′CC | |
| | | u′GCu′GAGCGACAu′CCu′GCGGGu′GAACACCGAGAu′C | |
| | | ACCAAGGCCCCCCu′GAGCGCCAGCAu′GAu′CAAGCGG | |
| | | u′ACGACGAGCACCACCAGGACCu′GACCCu′GCu′GAAG | |
| | | GCCCu′GGu′GCGGCAGCAGCu′GCCCGAGAAGu′ACAAG | |
| | | GAGAu′Cu′u′Cu′u′CGACCAGAGCAAGAACGGCu′ACGC | |
| | | CGGCu′ACAu′CGACGGCGGCGCCAGCCAGGAGGAGu′u′ | |
| | | Cu′ACAAGu′u′CAu′CAAGCCCAu′CCu′GGAGAAGAu′GG | |
| | | ACGGCACCGAGGAGCu′GCu′GGu′GAAGCu′GAACCGGG | |
| | | AGGACCu′GCu′GCGGAAGCAGCGGACCu′u′CGACAACG | |
| | | GCAGCAu′CCCCCACCAGAu′CCACCu′GGGCGAGCu′GC | |
| | | ACGCCAu′CCu′GCGGCGGCAGGAGGACu′u′Cu′ACCCCu′ | |
| | | u′CCu′GAAGGACAACCGGGAGAAGAu′CGAGAAGAu′CC | |
| | | u′GACCu′u′CCGGAu′CCCCu′ACu′ACGu′GGGCCCCCu′G | |
| | | GCCCGGGGCAACAGCCGGu′u′CGCCu′GGAu′GACCCGC | |
| | | AAGAGCGAGGAGACAAu′CACCCCCu′GGAACu′u′CGAG | |
| | | GAGGu′GGu′GGACAAGGGCGCCAGCGCCCAGAGCu′u′C | |
| | | Au′CGAGCGGAu′GACCAACu′u′CGACAAGAACCu′GCCC | |
| | | AACGAGAAGGu′GCu′GCCCAAGCACAGCCu′GCu′Gu′AC | |
| | | GAGu′ACu′u′CACCGu′Gu′ACAACGAGCu′GACCAAGGu′ | |
| | | GAAGu′ACGu′GACCGAGGGCAu′GCGGAAGCCCGCCu′u′ | |
| | | CCu′GAGCGGCGAGCAGAAGAAGGCCAu′CGu′GGACCu′ | |
| | | GCu′Gu′u′CAAGACCAACCGGAAGGu′GACCGu′GAAGC | |
| | | AGCu′GAAGGAGGACu′ACu′u′CAAGAAGAu′CGAGu′GC | |
| | | u′u′CGACAGCGu′GGAGAu′CAGCGGCGu′GGAGGACCG | |
| | | Gu′u′CAACGCCAGCCu′GGGCACCu′ACCACGACCu′GCu′ | |
| | | GAAGAu′CAu′CAAGGACAAGGACu′u′CCu′GGACAACG | |
| | | AGGAGAACGAGGACAu′CCu′GGAGGACAu′CGu′GCu′G | |
| | | ACCCu′GACCCu′Gu′u′CGAGGACCGGGAGAu′GAu′CGA | |
| | | GGAGCGGCu′GAAGACCu′ACGCCCACCu′Gu′u′CGACGA | |
| | | CAAGGu′GAu′GAAGCAGCu′GAAGCGGCGGCGGu′ACAC | |
| | | CGGCu′GGGGCCGGCu′GAGCCGGAAGCu′GAu′CAACGG | |
| | | CAu′CCGGGACAAGCAGAGCGGCAAGACCAu′CCu′GGA | |
| | | Cu′u′CCu′CAAGAGCGACGGCu′u′CGCCAACCGGAACu′u | |
| | | CAu′GCAGCu′GAu′CCACGACGACAGCCu′GACCu′u′CA | |
| | | AGGAGGACAu′CCAGAAGGCCCAGGu′GAGCGGCCAGG | |
| | | GCGACAGCCu′GCACGAGCACAu′CGCCAACCu′GGCCG | |
| | | GCAGCCCCGCCAu′CAAGAAGGGCAu′CCu′GCAGACCG | |
| | | u′GAAGGu′GGu′GGACGAGCu′GGu′GAAGGu′GAu′GGGC | |
| | | CGGCACAAGCCCGAGAACAu′CGu′GAu′CGAGAu′GGCC | |
| | | CGGGAGAACCAGACCACCCAGAAGGGCCAGAAGAAC | |
| | | AGCCGGGAGCGGAu′GAAGCGGAu′CGAGGAGGGCAu′C | |
| | | AAGGAGCu′GGGCAGCCAGAu′CCu′GAAGGAGCACCCC | |
| | | Gu′GGAGAACACCCAGCu′GCAGAACGAGAAGCu′Gu′AC | |
| | | Cu′Gu′ACu′ACCu′GCAGAACGGCCGGGACAu′Gu′ACGu′ | |
| | | GGACCAGGAGCu′GGACAu′CAACCGGCu′GAGCGACu′A | |
| | | CGACGu′GGACCACAu′CGu′GCCCCAGAGCu′u′CCu′GAA | |
| | | GGACGACAGCAu′CGACAACAAGGu′GCu′GACCCGGAG | |
| | | CGACAAGAACCGGGGCAAGAGCGACAACGu′GCCCAG | |
| | | CGAGGAGGu′GGu′GAAGAAGAu′GAAGAACu′ACu′GGC | |
| | | GGCAGCu′GCu′GAACGCCAAGCu′GAu′CACCCAGCGGA | |
| | | AGu′u′CGACAACCu′GACCAAGGCCGAGCGGGGCGGCC | |
| | | u′GAGCGAGCu′GGACAAGGCCGGCu′u′CAu′CAAGCGGC | |
| | | AGCu′GGu′GGAGACACGGCAGAu′CACCAAGCACGu′GG | |
| | | CCCAGAu′CCu′GGACAGCCGGAu′GAACACCAAGu′ACG | |
| | | ACGAGAACGACAAGCu′GAu′CCGGGAGGu′GAAGGu′G | |
| | | Au′CACCCu′CAAGAGCAAGCu′GGu′GAGCGACu′u′CCG | |
| | | GAAGGACu′u′CCAGu′u′Cu′ACAAGGu′GCGGGAGAu′CA | |
| | | ACAACu′ACCACCACGCCCACGACGCCu′ACCu′GAACG | |
| | | CCGu′GGu′GGGCACCGCCCu′GAu′CAAGAAGu′ACCCCA | |
| | | AGCu′GGAGAGCGAGu′u′CGu′Gu′ACGGCGACu′ACAAG | |
| | | Gu′Gu′ACGACGu′GCGGAAGAu′GAu′CGCCAAGAGCGA | |
| | | GCAGGAGAu′CGGCAAGGCCACCGCCAAGu′ACu′u′Cu′u | |
| | | ′Cu′ACAGCAACAu′CAu′GAACu′u′Cu′u′CAAGACCGAGA | |
| | | u′CACCCu′GGCCAACGGCGAGAu′CCGGAAGCGGCCCCu | |
| | | ′GAu′CGAGACAAACGGCGAGACAGGCGAGAu′CGu′Gu′ | |
| | | GGGACAAGGGCCGGGACu′u′CGCCACCGu′GCGGAAGG | |
| | | u′GCu′GAGCAu′GCCCCAGGu′GAACAu′CGu′GAAGAAG | |
| | | ACCGAGGu′GCAGACCGGCGGCu′u′CAGCAAGGAGAGC | |
| | | Au′CCu′GCCCAAGCGGAACAGCGACAAGCu′GAu′CGCC | |
| | | CGGAAGAAGGACu′GGGACCCCAAGAAGu′ACGGCGGC | |
| | | u′u′C GAGAGCCCCACCGu′GGCCu′ACAGCGu′GCu′GGu′ | |
| | | GGu′GGCCAAGGu′GGAGAAGGGCAAGAGCAAGAAGCu | |
| | | CAAGAGCGu′GAAGGAGCu′GCu′GGGCAu′CACCAu′CA | |
| | | u′GGAGCGGAGCAGCu′u′CGAGAAGAACCCCAu′CGACu′ | |
| | | u′CCu′GGAGGCCAAGGGCu′ACAAGGAGGu′GAAGAAG | |
| | | GACCu′GAu′CAu′CAAGCu′GCCCAAGu′ACAGCCu′Gu′u′ | |
| | | CGAGCu′GGAGAACGGCCGGAAGCGGAu′GCu′GGCCAG | |
| | | CGCCGGCGAGCu′GCAGAAGGGCAACGAGCu′GGCCCu′ | |
| | | GCCCAGCAAGu′ACGu′GAACu′u′CCu′Gu′ACCu′GGCCA | |
| | | GCCACu′ACGAGAAGCu′GAAGGGCAGCCCCGAGGACA | |
| | | ACGAGCAGAAGCAGCu′Gu′u′CGu′GGAGCAGCACAAGC | |
| | | ACu′ACCu′GGACGAGAu′CAu′CGAGCAGAu′CAGCGAGu | |
| | | ′u′CAGCAAGCGGGu′GAu′CCu′GGCCGACGCCAACCu′G | |
| | | GACAAGGu′GCu′GAGCGCCu′ACAACAAGCACCGGGAC | |
| | | AAGCCCAu′CCGGGAGCAGGCCGAGAACAu′CAu′CCAC | |
| | | Cu′Gu′u′CACCCu′GACCAACCu′GGGCGCCCCCGCCGCCu | |
| | | ′u′CAAGu′ACu′u′CGACACCACCAu′CGACCGGAAGCGGu | |
| | | ′ACACCAGCACCAAGGAGGu′GCu′GGACGCCACCCu′GA | |
| | | u′CCACCAGAGCAu′CACCGGCCu′Gu′ACGAGACACGGA | |
| | | u′CGACCu′GAGCCAGCu′GGGCGGCGACGAGGGCGCCG | |
| | | ACAAGCGGACCGCCGACGGCAGCGAGu′u′CGAGAGCC | |
| | | CCAAGAAGAAGCGGAAGGu′Gu′GAGCGGCCGCu′u′AAu | |
| | | ′u′AAGCu′GCCu′u′Cu′GCGGGGCu′u′GCCu′u′Cu′GGCCAu | |
| | | ′GCCCu′u′Cu′u′Cu′Cu′CCCu′u′GCACCu′Gu′ACCu′Cu′u′G | |
| | | Gu′Cu′u′u′GAAu′AAAGCCu′GAGu′AGGAAGu′Cu′AGA | |
| | Protein | MSEVEFSHEYWMRHALTLAKRARDEREVPVGAVLVLNN | 2149 |
| | | RVIGEGWNRAIGLHDPTAHAEIMALRQGGLVMQNYRLID | |
| | | ATLYVTFEPCVMCAGAMIHSRIGRVVFGVRNAKTGAAG | |
| | | SLMDVLHHPGMNHRVEITEGILADECAALLCRFFRMPRR | |
| | | VFNAQKKAQSSTDSGGSSGGSSGSETPGTSESATPESSGG | |
| | | SSGGSDKKYSIGLAIGTNSVGWAVITDEYKVPSKKFKVL | |
| | | GNTDRHSIKKNLIGALLFDSGETAEATRLKRTARRRYTRR | |
| | | KNRICYLQEIFSNEMAKVDDSFFHRLEESFLVEEDKKHER | |
| | | HPIFGNIVDEVAYHEKYPTIYHLRKKLVDSTDKADLRLIY | |
| | | LALAHMIKFRGHFLIEGDLNPDNSDVDKLFIQLVQTYNQL | |
| | | FEENPINASGVDAKAILSARLSKSRRLENLIAQLPGEKKN | |
| | | GLFGNLIALSLGLTPNFKSNFDLAEDAKLQLSKDTYDDDL | |
| | | DNLLAQIGDQYADLFLAAKNLSDAILLSDILRVNTEITKA | |
| | | PLSASMIKRYDEHHQDLTLLKALVRQQLPEKYKEIFFDQS | |
| | | KNGYAGYIDGGASQEEFYKFIKPILEKMDGTEELLVKLN | |
| | | REDLLRKQRTFDNGSIPHQIHLGELHAILRRQEDFYPFLK | |
| | | DNREKIEKILTFRIPYYVGPLARGNSRFAWMTRKSEETITP | |
| | | WNFEEVVDKGASAQSFIERMTNFDKNLPNEKVLPKHSLL | |
| | | YEYFTVYNELTKVKYVTEGMRKPAFLSGEQKKAIVDLLF | |
| | | KTNRKVTVKQLKEDYFKKIECFDSVEISGVEDRFNASLGT | |
| | | YHDLLKIIKDKDFLDNEENEDILEDIVLTLTLFEDREMIEE | |
| | | RLKTYAHLFDDKVMKQLKRRRYTGWGRLSRKLINGIRD | |
| | | KQSGKTILDFLKSDGFANRNFMQLIHDDSLTFKEDIQKAQ | |
| | | VSGQGDSLHEHIANLAGSPAIKKGILQTVKVVDELVKVM | |
| | | GRHKPENIVIEMARENQTTQKGQKNSRERMKRIEEGIKEL | |
| | | GSQILKEHPVENTQLQNEKLYLYYLQNGRDMYVDQELDI | |
| | | NRLSDYDVDHIVPQSFLKDDSIDNKVLTRSDKNRGKSDN | |
| | | VPSEEVVKKMKNYWRQLLNAKLITQRKFDNLTKAERGG | |
| | | LSELDKAGFIKRQLVETRQITKHVAQILDSRMNTKYDEN | |
| | | DKLIREVKVITLKSKLVSDFRKDFQFYKVREINNYHHAH | |
| | | DAYLNAVVGTALIKKYPKLESEFVYGDYKVYDVRKMIA | |
| | | KSEQEIGKATAKYFFYSNIMNFFKTEITLANGEIRKRPLIE | |
| | | TNGETGEIVWDKGRDFATVRKVLSMPQVNIVKKTEVQT | |
| | | GGFSKESILPKRNSDKLIARKKDWDPKKYGGFESPTVAY | |
| | | SVLVVAKVEKGKSKKLKSVKELLGITIMERSSFEKNPIDF | |
| | | LEAKGYKEVKKDLIIKLPKYSLFELENGRKRMLASAGEL | |
| | | QKGNELALPSKYVNFLYLASHYEKLKGSPEDNEQKQLFV | |
| | | EQHKHYLDEIIEQISEFSKRVILADANLDKVLSAYNKHRD | |
| | | KPIREQAENIIHLFTLTNLGAPAAFKYFDTTIDRKRYTSTK | |
| | | EVLDATLIHQSITGLYETRIDLSQLGGDEGADKRTADGSE | |
| | | FESPKKKRKV | |
| 5′ UTR | mRNA | AGGAAAu′AAGAGAGAAAAGAAGAGu′AAGAAGAAAu′ | 2138 |
| | | Au′AAGAGCCACC | |
| TadA | mRNA | Au′GAGCGAGGu′GGAGu′u′CAGCCACGAGu′ACu′GGAu′ | 2139 |
| | | GCGGCACGCCCu′GACCCu′GGCCAAGCGGGCCCGGGA | |
| | | CGAGCGGGAGGu′GCCCGu′GGGCGCCGu′GCu′GGu′GCu | |
| | | ′GAACAACCGGGu′GAu′CGGCGAGGGCu′GGAACCGGG | |
| | | CCAu′CGGCCu′GCACGACCCCACCGCCCACGCCGAGAu′ | |
| | | CAu′GGCCCu′GCGGCAGGGCGGCCu′GGu′GAu′GCAGAA | |
| | | Cu′ACCGGCu′GAu′CGACGCCACCCu′Gu′ACGu′GACCu′u | |
| | | CGAGCCCu′GCGu′GAu′Gu′GCGCCGGCGCCAu′GAu′CC | |
| | | ACAGCCGGAu′CGGCCGGGu′GGu′Gu′u′CGGCGu′GCGG | |
| | | AACGCCAAGACCGGCGCCGCCGGCAGCCu′GAu′GGAC | |
| | | Gu′GCu′GCACCACCCCGGCAu′GAACCACCGGGu′GGAG | |
| | | Au′CACCGAGGGCAu′CCu′GGCCGACGAGu′GCGCCGCC | |
| | | Cu′GCu′Gu′GCCGGu′u′Cu′u′CCGGAu′GCCCCGGCGGGu′ | |
| | | Gu′u′CAACGCCCAGAAGAAGGCCCAGAGCAGCACCGA | |
| | | C | |
| | Protein | MSEVEFSHEYWMRHALTLAKRARDEREVPVGAVLVLNN | 2140 |
| | | RVIGEGWNRAIGLHDPTAHAEIMALRQGGLVMQNYRLID | |
| | | ATLYVTFEPCVMCAGAMIHSRIGRVVFGVRNAKTGAAG | |
| | | SLMDVLHHPGMNHRVEITEGILADECAALLCRFFRMPRR | |
| | | VFNAQKKAQSSTD | |
| Linker | mRNA | AGCGGCGGCAGCAGCGGCGGCAGCAGCGGCAGCGAG | 2141 |
| between | | ACACCCGGCACCAGCGAGAGCGCCACCCCCGAGAGCA | |
| TadA | | GCGGCGGCAGCAGCGGCGGCAGC | |
| and Cas9 | protein | SGGSSGGSSGSETPGTSESATPESSGGSSGGS | 20 |
| nickase | | | |
| Cas9 | mRNA | GACAAGAAGu′ACAGCAu′CGGCCu′GGCCAu′CGGCACC | 2151 |
| nickase | | AACAGCGu′GGGCu′GGGCCGu′GAu′CACCGACGAGu′AC | |
| | | AAGGu′GCCCAGCAAGAAGu′u′CAAGGu′GCu′GGGCAA | |
| | | CACCGACCGGCACAGCAu′CAAGAAGAACCu′GAu′CGG | |
| | | CGCCCu′GCu′Gu′u′CGACAGCGGCGAGACAGCCGAGGC | |
| | | CACCCGGCu′GAAGCGGACCGCCCGGCGGCGGu′ACAC | |
| | | CCGGCGGAAGAACCGGAu′Cu′GCu′ACCu′GCAGGAGAu′ | |
| | | Cu′u′CAGCAACGAGAu′GGCCAAGGu′GGACGACAGCu′u | |
| | | ′Cu′u′CCACCGGCu′GGAGGAGAGCu′u′CCu′GGu′GGAGG | |
| | | AGGACAAGAAGCACGAGCGGCACCCCAu′Cu′u′CGGCA | |
| | | ACAu′CGu′GGACGAGGu′GGCCu′ACCACGAGAAGu′ACC | |
| | | CCACCAu′Cu′ACCACCu′GCGGAAGAAGCu′GGu′GGACA | |
| | | GCACCGACAAGGCCGACCu′GCGGCu′GAu′Cu′ACCu′GG | |
| | | CCCu′GGCCCACAu′GAu′CAAGu′u′CCGGGGCCACu′u′CC | |
| | | u′GAu′CGAGGGCGACCu′GAACCCCGACAACAGCGACG | |
| | | u′GGACAAGCu′Gu′u′CAu′CCAGCu′GGu′GCAGACCu′AC | |
| | | AACCAGCu′Gu′u′CGAGGAGAACCCCAu′CAACGCCAGC | |
| | | GGCGu′GGACGCCAAGGCCAu′CCu′GAGCGCCCGGCu′G | |
| | | AGCAAGAGCCGGCGGCu′GGAGAACCu′GAu′CGCCCAG | |
| | | Cu′GCCCGGCGAGAAGAAGAACGGCCu′Gu′u′CGGCAAC | |
| | | Cu′GAu′CGCCCu′GAGCCu′GGGCCu′GACCCCCAACu′u′C | |
| | | AAGAGCAACu′u′CGACCu′GGCCGAGGACGCCAAGCu′G | |
| | | CAGCu′GAGCAAGGACACCu′ACGACGACGACCu′GGAC | |
| | | AACCu′GCu′GGCCCAGAu′CGGCGACCAGu′ACGCCGAC | |
| | | Cu′Gu′u′CCu′GGCCGCCAAGAACCu′GAGCGACGCCAu′C | |
| | | Cu′GCu′GAGCGACAu′CCu′GCGGGu′GAACACCGAGAu′ | |
| | | CACCAAGGCCCCCCu′GAGCGCCAGCAu′GAu′CAAGCG | |
| | | Gu′ACGACGAGCACCACCAGGACCu′GACCCu′GCu′GAA | |
| | | GGCCCu′GGu′GCGGCAGCAGCu′GCCCGAGAAGu′ACAA | |
| | | GGAGAu′Cu′u′Cu′u′CGACCAGAGCAAGAACGGCu′ACG | |
| | | CCGGCu′ACAu′CGACGGCGGCGCCAGCCAGGAGGAGu′ | |
| | | u′Cu′ACAAGu′u′CAu′CAAGCCCAu′CCu′GGAGAAGAu′G | |
| | | GACGGCACCGAGGAGCu′GCu′GGu′GAAGCu′GAACCGG | |
| | | GAGGACCu′GCu′GCGGAAGCAGCGGACCu′u′CGACAAC | |
| | | GGCAGCAu′CCCCCACCAGAu′CCACCu′GGGCGAGCu′G | |
| | | CACGCCAu′CCu′GCGGCGGCAGGAGGACu′u′Cu′ACCCC | |
| | | u′u′CCu′GAAGGACAACCGGGAGAAGAu′CGAGAAGAu′ | |
| | | CCu′GACCu′u′CCGGAu′CCCCu′ACu′ACGu′GGGCCCCCu′ | |
| | | GGCCCGGGGCAACAGCCGGu′u′CGCCu′GGAu′GACCCG | |
| | | CAAGAGCGAGGAGACAAu′CACCCCCu′GGAACu′u′CGA | |
| | | GGAGGu′GGu′GGACAAGGGCGCCAGCGCCCAGAGCu′u′ | |
| | | CAu′CGAGCGGAu′GACCAACu′u′CGACAAGAACCu′GCC | |
| | | CAACGAGAAGGu′GCu′GCCCAAGCACAGCCu′GCu′Gu′A | |
| | | CGAGu′ACu′u′CACCGu′Gu′ACAACGAGCu′GACCAAGGu | |
| | | ′GAAGu′ACGu′GACCGAGGGCAu′GCGGAAGCCCGCCu′u | |
| | | ′CCu′GAGCGGCGAGCAGAAGAAGGCCAu′CGu′GGACCu | |
| | | ′GCu′Gu′u′CAAGACCAACCGGAAGGu′GACCGu′GAAGC | |
| | | AGCu′GAAGGAGGACu′ACu′u′CAAGAAGAu′CGAGu′GC | |
| | | u′u′CGACAGCGu′GGAGAu′CAGCGGCGu′GGAGGACCG | |
| | | Gu′u′CAACGCCAGCCu′GGGCACCu′ACCACGACCu′GCu′ | |
| | | GAAGAu′CAu′CAAGGACAAGGACu′u′CCu′GGACAACG | |
| | | AGGAGAACGAGGACAu′CCu′GGAGGACAu′CGu′GCu′G | |
| | | ACCCu′GACCCu′Gu′u′CGAGGACCGGGAGAu′GAu′CGA | |
| | | GGAGCGGCu′GAAGACCu′ACGCCCACCu′Gu′u′CGACGA | |
| | | CAAGGu′GAu′GAAGCAGCu′GAAGCGGCGGCGGu′ACAC | |
| | | CGGCu′GGGGCCGGCu′GAGCCGGAAGCu′GAu′CAACGG | |
| | | CAu′CCGGGACAAGCAGAGCGGCAAGACCAu′CCu′GGA | |
| | | Cu′u′CCu′CAAGAGCGACGGCu′u′CGCCAACCGGAACu′u | |
| | | ′CAu′GCAGCu′GAu′CCACGACGACAGCCu′GACCu′u′CA | |
| | | AGGAGGACAu′CCAGAAGGCCCAGGu′GAGCGGCCAGG | |
| | | GCGACAGCCu′GCACGAGCACAu′CGCCAACCu′GGCCG | |
| | | GCAGCCCCGCCAu′CAAGAAGGGCAu′CCu′GCAGACCG | |
| | | u′GAAGGu′GGu′GGACGAGCu′GGu′GAAGGu′GAu′GGGC | |
| | | CGGCACAAGCCCGAGAACAu′CGu′GAu′CGAGAu′GGCC | |
| | | CGGGAGAACCAGACCACCCAGAAGGGCCAGAAGAAC | |
| | | AGCCGGGAGCGGAu′GAAGCGGAu′CGAGGAGGGCAu′C | |
| | | AAGGAGCu′GGGCAGCCAGAu′CCu′GAAGGAGCACCCC | |
| | | Gu′GGAGAACACCCAGCu′GCAGAACGAGAAGCu′Gu′AC | |
| | | Cu′Gu′ACu′ACCu′GCAGAACGGCCGGGACAu′Gu′ACGu′ | |
| | | GGACCAGGAGCu′GGACAu′CAACCGGCu′GAGCGACu′A | |
| | | CGACGu′GGACCACAu′CGu′GCCCCAGAGCu′u′CCu′GAA | |
| | | GGACGACAGCAu′CGACAACAAGGu′GCu′GACCCGGAG | |
| | | CGACAAGAACCGGGGCAAGAGCGACAACGu′GCCCAG | |
| | | CGAGGAGGu′GGu′GAAGAAGAu′GAAGAACu′ACu′GGC | |
| | | GGCAGCu′GCu′GAACGCCAAGCu′GAu′CACCCAGCGGA | |
| | | AGu′u′CGACAACCu′GACCAAGGCCGAGCGGGGCGGCC | |
| | | u′GAGCGAGCu′GGACAAGGCCGGCu′u′CAu′CAAGCGGC | |
| | | AGCu′GGu′GGAGACACGGCAGAu′CACCAAGCACGu′GG | |
| | | CCCAGAu′CCu′GGACAGCCGGAu′GAACACCAAGu′ACG | |
| | | ACGAGAACGACAAGCu′GAu′CCGGGAGGu′GAAGGu′G | |
| | | Au′CACCCu′CAAGAGCAAGCu′GGu′GAGCGACu′u′CCG | |
| | | GAAGGACu′u′CCAGu′u′Cu′ACAAGGu′GCGGGAGAu′CA | |
| | | ACAACu′ACCACCACGCCCACGACGCCu′ACCu′GAACG | |
| | | CCGu′GGu′GGGCACCGCCCu′GAu′CAAGAAGu′ACCCCA | |
| | | AGCu′GGAGAGCGAGu′u′CGu′Gu′ACGGCGACu′ACAAG | |
| | | Gu′Gu′ACGACGu′GCGGAAGAu′GAu′CGCCAAGAGCGA | |
| | | GCAGGAGAu′CGGCAAGGCCACCGCCAAGu′ACu′u′Cu′u | |
| | | ′Cu′ACAGCAACAu′CAu′GAACu′u′Cu′u′CAAGACCGAGA | |
| | | u′CACCCu′GGCCAACGGCGAGAu′CCGGAAGCGGCCCCu | |
| | | ′GAu′CGAGACAAACGGCGAGACAGGCGAGAu′CGu′Gu′ | |
| | | GGGACAAGGGCCGGGACu′u′CGCCACCGu′GCGGAAGG | |
| | | u′GCu′GAGCAu′GCCCCAGGu′GAACAu′CGu′GAAGAAG | |
| | | ACCGAGGu′GCAGACCGGCGGCu′u′CAGCAAGGAGAGC | |
| | | Au′CCu′GCCCAAGCGGAACAGCGACAAGCu′GAu′CGCC | |
| | | CGGAAGAAGGACu′GGGACCCCAAGAAGu′ACGGCGGC | |
| | | u′u′CGAGAGCCCCACCGu′GGCCu′ACAGCGu′GCu′GGu′ | |
| | | GGu′GGCCAAGGu′GGAGAAGGGCAAGAGCAAGAAGCu | |
| | | ′CAAGAGCGu′GAAGGAGCu′GCu′GGGCAu′CACCAu′CA | |
| | | u′GGAGCGGAGCAGCu′u′CGAGAAGAACCCCAu′CGACu′ | |
| | | u′CCu′GGAGGCCAAGGGCu′ACAAGGAGGu′GAAGAAG | |
| | | GACCu′GAu′CAu′CAAGCu′GCCCAAGu′ACAGCCu′Gu′u′ | |
| | | CGAGCu′GGAGAACGGCCGGAAGCGGAu′GCu′GGCCAG | |
| | | CGCCGGCGAGCu′GCAGAAGGGCAACGAGCu′GGCCCu′ | |
| | | GCCCAGCAAGu′ACGu′GAACu′u′CCu′Gu′ACCu′GGCCA | |
| | | GCCACu′ACGAGAAGCu′GAAGGGCAGCCCCGAGGACA | |
| | | ACGAGCAGAAGCAGCu′Gu′u′CGu′GGAGCAGCACAAGC | |
| | | ACu′ACCu′GGACGAGAu′CAu′CGAGCAGAu′CAGCGAGu | |
| | | ′u′CAGCAAGCGGGu′GAu′CCu′GGCCGACGCCAACCu′G | |
| | | GACAAGGu′GCu′GAGCGCCu′ACAACAAGCACCGGGAC | |
| | | AAGCCCAu′CCGGGAGCAGGCCGAGAACAu′CAu′CCAC | |
| | | Cu′Gu′u′CACCCu′GACCAACCu′GGGCGCCCCCGCCGCCu | |
| | | ′u′CAAGu′ACu′u′CGACACCACCAu′CGACCGGAAGCGGu | |
| | | ′ACACCAGCACCAAGGAGGu′GCu′GGACGCCACCCu′GA | |
| | | u′CCACCAGAGCAu′CACCGGCCu′Gu′ACGAGACACGGA | |
| | | u′CGACCu′GAGCCAGCu′GGGCGGCGAC | |
| | Protein | DKKYSIGLAIGTNSVGWAVITDEYKVPSKKFKVLGNTDR | |
| | | HSIKKNLIGALLFDSGETAEATRLKRTARRRYTRRKNRIC | |
| | | YLQEIFSNEMAKVDDSFFHRLEESFLVEEDKKHERHPIFG | |
| | | NIVDEVAYHEKYPTIYHLRKKLVDSTDKADLRLIYLALA | |
| | | HMIKFRGHFLIEGDLNPDNSDVDKLFIQLVQTYNQLFEEN | |
| | | PINASGVDAKAILSARLSKSRRLENLIAQLPGEKKNGLFG | |
| | | NLIALSLGLTPNFKSNFDLAEDAKLQLSKDTYDDDLDNL | |
| | | LAQIGDQYADLFLAAKNLSDAILLSDILRVNTEITKAPLSA | |
| | | SMIKRYDEHHQDLTLLKALVRQQLPEKYKEIFFDQSKNG | |
| | | YAGYIDGGASQEEFYKFIKPILEKMDGTEELLVKLNREDL | |
| | | LRKQRTFDNGSIPHQIHLGELHAILRRQEDFYPFLKDNRE | |
| | | KIEKILTFRIPYYVGPLARGNSRFAWMTRKSEETITPWNFE | |
| | | EVVDKGASAQSFIERMTNFDKNLPNEKVLPKHSLLYEYF | |
| | | TVYNELTKVKYVTEGMRKPAFLSGEQKKAIVDLLFKTNR | |
| | | KVTVKQLKEDYFKKIECFDSVEISGVEDRFNASLGTYHDL | |
| | | LKIIKDKDFLDNEENEDILEDIVLTLTLFEDREMIEERLKT | |
| | | YAHLFDDKVMKQLKRRRYTGWGRLSRKLINGIRDKQSG | |
| | | KTILDFLKSDGFANRNFMQLIHDDSLTFKEDIQKAQVSGQ | |
| | | GDSLHEHIANLAGSPAIKKGILQTVKVVDELVKVMGRHK | |
| | | PENIVIEMARENQTTQKGQKNSRERMKRIEEGIKELGSQI | |
| | | LKEHPVENTQLQNEKLYLYYLQNGRDMYVDQELDINRL | |
| | | SDYDVDHIVPQSFLKDDSIDNKVLTRSDKNRGKSDNVPS | |
| | | EEVVKKMKNYWRQLLNAKLITQRKFDNLTKAERGGLSE | |
| | | LDKAGFIKRQLVETRQITKHVAQILDSRMNTKYDENDKLI | |
| | | REVKVITLKSKLVSDFRKDFQFYKVREINNYHHAHDAYL | |
| | | NAVVGTALIKKYPKLESEFVYGDYKVYDVRKMIAKSEQ | |
| | | EIGKATAKYFFYSNIMNFFKTEITLANGEIRKRPLIETNGE | |
| | | TGEIVWDKGRDFATVRKVLSMPQVNIVKKTEVQTGGFS | |
| | | KESILPKRNSDKLIARKKDWDPKKYGGFESPTVAYSVLV | |
| | | VAKVEKGKSKKLKSVKELLGITIMERSSFEKNPIDFLEAK | |
| | | GYKEVKKDLIIKLPKYSLFELENGRKRMLASAGELQKGN | |
| | | ELALPSKYVNFLYLASHYEKLKGSPEDNEQKQLFVEQHK | |
| | | HYLDEIIEQISEFSKRVILADANLDKVLSAYNKHRDKPIRE | |
| | | QAENIIHLFTLTNLGAPAAFKYFDTTIDRKRYTSTKEVLD | |
| | | ATLIHQSITGLYETRIDLSQLGGD | |
| Linker | mRNA | GAGGGCGCCGAC | 2143 |
| between | Protein | EGAD | 2144 |
| Cas9 | | | |
| nickase | | | |
| and NLS | | | |
| Nuclear | mRNA | AAGCGGACCGCCGACGGCAGCGAGu′u′CGAGAGCCCC | 2145 |
| localization | | AAGAAGAAGCGGAAGGu′Gu′GA | |
| sequence | Protein | KRTADGSEFESPKKKRKV | 2146 |
| (NLS) | | | |
| 3′ UTR | mRNA | GCGGCCGCu′u′AAu′u′AAGCu′GCCu′u′Cu′GCGGGGCu′u′ | 2147 |
| | | GCCu′u′Cu′GGCCAu′GCCCu′u′Cu′u′Cu′Cu′CCCu′u′GCAC | |
| | | Cu′Gu′ACCu′Cu′u′GGu′Cu′u′u′GAAu′AAAGCCu′GAGu′A | |
| | | GGAAGu′Cu′AGA | |

MA041 mRNA and protein sequences

| | | | SEQ ID |
|---|---|---|---|
| Region | Sequence | | NO |
| Full | mRNA | AGGAAAu′AAGAGAGAAAAGAAGAGu′AAGAAGAAAu′ | 2153 |
| sequence | | Au′AAGAGCCACCAu′GAGCGAGGu′GGAGu′u′CAGCCA | |
| | | CGAGu′ACu′GGAu′GCGGCACGCCCu′GACCCu′GGCCAA | |
| | | GCGGGCCCGGGACGAGCGGGAGGu′GCCCGu′GGGCGC | |
| | | CGu′GCu′GGu′GCu′GAACAACCGGGu′GAu′CGGCGAGG | |
| | | GCu′GGAACCGGGCCAu′CGGCCu′GCACGACCCCACCG | |
| | | CCCACGCCGAGAu′CAu′GGCCCu′GCGGCAGGGCGGCCu | |
| | | ′GGu′GAu′GCAGAACu′ACCGGCu′GAu′CGACGCCACCCu | |
| | | ′Gu′ACGu′GACCu′u′CGAGCCCu′GCGu′GAu′Gu′GCGCCG | |
| | | GCGCCAu′GAu′CCACAGCCGGAu′CGGCCGGGu′GGu′Gu | |
| | | ′u′CGGCGu′GCGGAACGCCAAGACCGGCGCCGCCGGCA | |
| | | GCCu′GAu′GGACGu′GCu′GCACCACCCCGGCAu′GAACC | |
| | | ACCGGGu′GGAGAu′CACCGAGGGCAu′CCu′GGCCGACG | |
| | | AGu′GCGCCGCCCu′GCu′Gu′GCCGGu′u′Cu′u′CCGGAu′G | |
| | | CCCCGGCGGGu′Gu′u′CAACGCCCAGAAGAAGGCCCAG | |
| | | AGCAGCACCGACAGCGGCGGCAGCAGCGGCGGCAGCA | |
| | | GCGGCAGCGAGACACCCGGCACCAGCGAGAGCGCCAC | |
| | | CCCCGAGAGCAGCGGCGGCAGCAGCGGCGGCAGCGAC | |
| | | AAGAAGu′ACAGCAu′CGGCCu′GGCCAu′CGGCACCAAC | |
| | | AGCGu′GGGCu′GGGCCGu′GAu′CACCGACGAGu′ACAA | |
| | | GGu′GCCCAGCAAGAAGu′u′CAAGGu′GCu′GGGCAACA | |
| | | CCGACCGGCACAGCAu′CAAGAAGAACCu′GAu′CGGCG | |
| | | CCCu′GCu′Gu′u′CGACAGCGGCGAGACAGCCGAGGCCA | |
| | | CCCGGCu′GAAGCGGACCGCCCGGCGGCGGu′ACACCC | |
| | | GGCGGAAGAACCGGAu′Cu′GCu′ACCu′GCAGGAGAu′Cu | |
| | | ′u′CAGCAACGAGAu′GGCCAAGGu′GGACGACAGCu′u′C | |
| | | u′u′CCACCGGCu′GGAGGAGAGCu′u′CCu′GGu′GGAGGA | |
| | | GGACAAGAAGCACGAGCGGCACCCCAu′Cu′u′CGGCAA | |
| | | CAu′CGu′GGACGAGGu′GGCCu′ACCACGAGAAGu′ACCC | |
| | | CACCAu′Cu′ACCACCu′GCGGAAGAAGCu′GGu′GGACAG | |
| | | CACCGACAAGGCCGACCu′GCGGCu′GAu′Cu′ACCu′GGC | |
| | | CCu′GGCCCACAu′GAu′CAAGu′u′CCGGGGCCACu′u′CCu | |
| | | ′GAu′CGAGGGCGACCu′GAACCCCGACAACAGCGACGu′ | |
| | | GGACAAGCu′Gu′u′CAu′CCAGCu′GGu′GCAGACCu′ACA | |
| | | ACCAGCu′Gu′u′CGAGGAGAACCCCAu′CAACGCCAGCG | |
| | | GCGu′GGACGCCAAGGCCAu′CCu′GAGCGCCCGGCu′GA | |
| | | GCAAGAGCCGGCGGCu′GGAGAACCu′GAu′CGCCCAGC | |
| | | u′GCCCGGCGAGAAGAAGAACGGCCu′Gu′u′CGGCAACC | |
| | | u′GAu′CGCCCu′GAGCCu′GGGCCu′GACCCCCAACu′u′CA | |
| | | AGAGCAACu′u′CGACCu′GGCCGAGGACGCCAAGCu′GC | |
| | | AGCu′GAGCAAGGACACCu′ACGACGACGACCu′GGACA | |
| | | ACCu′GCu′GGCCCAGAu′CGGCGACCAGu′ACGCCGACC | |
| | | u′Gu′u′CCu′GGCCGCCAAGAACCu′GAGCGACGCCAu′CC | |
| | | u′GCu′GAGCGACAu′CCu′GCGGGu′GAACACCGAGAu′C | |
| | | ACCAAGGCCCCCCu′GAGCGCCAGCAu′GAu′CAAGCGG | |
| | | u′ACGACGAGCACCACCAGGACCu′GACCCu′GCu′GAAG | |
| | | GCCCu′GGu′GCGGCAGCAGCu′GCCCGAGAAGu′ACAAG | |
| | | GAGAu′Cu′u′Cu′u′CGACCAGAGCAAGAACGGCu′ACGC | |
| | | CGGCu′ACAu′CGACGGCGGCGCCAGCCAGGAGGAGu′u′ | |
| | | Cu′ACAAGu′u′CAu′CAAGCCCAu′CCu′GGAGAAGAu′GG | |
| | | ACGGCACCGAGGAGCu′GCu′GGu′GAAGCu′GAACCGGG | |
| | | AGGACCu′GCu′GCGGAAGCAGCGGACCu′u′CGACAACG | |
| | | GCAGCAu′CCCCCACCAGAu′CCACCu′GGGCGAGCu′GC | |
| | | ACGCCAu′CCu′GCGGCGGCAGGAGGACu′u′Cu′ACCCCu′ | |
| | | u′CCu′GAAGGACAACCGGGAGAAGAu′CGAGAAGAu′CC | |
| | | u′GACCu′u′CCGGAu′CCCCu′ACu′ACGu′GGGCCCCCu′G | |
| | | GCCCGGGGCAACAGCCGGu′u′CGCCu′GGAu′GACCCGC | |
| | | AAGAGCGAGGAGACAAu′CACCCCCu′GGAACu′u′CGAG | |
| | | GAGGu′GGu′GGACAAGGGCGCCAGCGCCCAGAGCu′u′C | |
| | | Au′CGAGCGGAu′GACCAACu′u′CGACAAGAACCu′GCCC | |
| | | AACGAGAAGGu′GCu′GCCCAAGCACAGCCu′GCu′Gu′AC | |
| | | GAGu′ACu′u′CACCGu′Gu′ACAACGAGCu′GACCAAGGu′ | |
| | | GAAGu′ACGu′GACCGAGGGCAu′GCGGAAGCCCGCCu′u′ | |
| | | CCu′GAGCGGCGAGCAGAAGAAGGCCAu′CGu′GGACCu′ | |
| | | GCu′Gu′u′CAAGACCAACCGGAAGGu′GACCGu′GAAGC | |
| | | AGCu′GAAGGAGGACu′ACu′u′CAAGAAGAu′CGAGu′GC | |
| | | u′u′CGACAGCGu′GGAGAu′CAGCGGCGu′GGAGGACCG | |
| | | Gu′u′CAACGCCAGCCu′GGGCACCu′ACCACGACCu′GCu′ | |
| | | GAAGAu′CAu′CAAGGACAAGGACu′u′CCu′GGACAACG | |
| | | AGGAGAACGAGGACAu′CCu′GGAGGACAu′CGu′GCu′G | |
| | | ACCCu′GACCCu′Gu′u′CGAGGACCGGGAGAu′GAu′CGA | |
| | | GGAGCGGCu′GAAGACCu′ACGCCCACCu′Gu′u′CGACGA | |
| | | CAAGGu′GAu′GAAGCAGCu′GAAGCGGCGGCGGu′ACAC | |
| | | CGGCu′GGGGCCGGCu′GAGCCGGAAGCu′GAu′CAACGG | |
| | | CAu′CCGGGACAAGCAGAGCGGCAAGACCAu′CCu′GGA | |
| | | Cu′u′CCu′CAAGAGCGACGGCu′u′CGCCAACGCCAACu′u | |
| | | ′CAu′GCAGCu′GAu′CCACGACGACAGCCu′GACCu′u′CA | |
| | | AGGAGGACAu′CCAGAAGGCCCAGGu′GAGCGGCCAGG | |
| | | GCGACAGCCu′GCACGAGCACAu′CGCCAACCu′GGCCG | |
| | | GCAGCCCCGCCAu′CAAGAAGGGCAu′CCu′GCAGACCG | |
| | | u′GAAGGu′GGu′GGACGAGCu′GGu′GAAGGu′GAu′GGGC | |
| | | CGGCACAAGCCCGAGAACAu′CGu′GAu′CGAGAu′GGCC | |
| | | CGGGAGAACCAGACCACCCAGAAGGGCCAGAAGAAC | |
| | | AGCCGGGAGCGGAu′GAAGCGGAu′CGAGGAGGGCAu′C | |
| | | AAGGAGCu′GGGCAGCCAGAu′CCu′GAAGGAGCACCCC | |
| | | Gu′GGAGAACACCCAGCu′GCAGAACGAGAAGCu′Gu′AC | |
| | | Cu′Gu′ACu′ACCu′GCAGAACGGCCGGGACAu′Gu′ACGu′ | |
| | | GGACCAGGAGCu′GGACAu′CAACCGGCu′GAGCGACu′A | |
| | | CGACGu′GGACCACAu′CGu′GCCCCAGAGCu′u′CCu′GAA | |
| | | GGACGACAGCAu′CGACAACAAGGu′GCu′GACCCGGAG | |
| | | CGACAAGAACCGGGGCAAGAGCGACAACGu′GCCCAG | |
| | | CGAGGAGGu′GGu′GAAGAAGAu′GAAGAACu′ACu′GGC | |
| | | GGCAGCu′GCu′GAACGCCAAGCu′GAu′CACCCAGCGGA | |
| | | AGu′u′CGACAACCu′GACCAAGGCCGAGCGGGGCGGCC | |
| | | u′GAGCGAGCu′GGACAAGGCCGGCu′u′CAu′CAAGCGGC | |
| | | AGCu′GGu′GGAGACACGGCAGAu′CACCAAGCACGu′GG | |
| | | CCCAGAu′CCu′GGACAGCCGGAu′GAACACCAAGu′ACG | |
| | | ACGAGAACGACAAGCu′GAu′CCGGGAGGu′GAAGGu′G | |
| | | Au′CACCCu′CAAGAGCAAGCu′GGu′GAGCGACu′u′CCG | |
| | | GAAGGACu′u′CCAGu′u′Cu′ACAAGGu′GCGGGAGAu′CA | |
| | | ACAACu′ACCACCACGCCCACGACGCCu′ACCu′GAACG | |
| | | CCGu′GGu′GGGCACCGCCCu′GAu′CAAGAAGu′ACCCCA | |
| | | AGCu′GGAGAGCGAGu′u′CGu′Gu′ACGGCGACu′ACAAG | |
| | | Gu′Gu′ACGACGu′GCGGAAGAu′GAu′CGCCAAGAGCGA | |
| | | GCAGGAGAu′CGGCAAGGCCACCGCCAAGu′ACu′u′Cu′u | |
| | | ′Cu′ACAGCAACAu′CAu′GAACu′u′Cu′u′CAAGACCGAGA | |
| | | u′CACCCu′GGCCAACGGCGAGAu′CCGGAAGCGGCCCCu | |
| | | ′GAu′CGAGACAAACGGCGAGACAGGCGAGAu′CGu′Gu′ | |
| | | GGGACAAGGGCCGGGACu′u′CGCCACCGu′GCGGAAGG | |
| | | u′GCu′GAGCAu′GCCCCAGGu′GAACAu′CGu′GAAGAAG | |
| | | ACCGAGGu′GCAGACCGGCGGCu′u′CAGCAAGGAGAGC | |
| | | Au′CCu′GCCCAAGCGGAACAGCGACAAGCu′GAu′CGCC | |
| | | CGGAAGAAGGACu′GGGACCCCAAGAAGu′ACGGCGGC | |
| | | u′u′CGAGAGCCCCACCGu′GGCCu′ACAGCGu′GCu′GGu′ | |
| | | GGu′GGCCAAGGu′GGAGAAGGGCAAGAGCAAGAAGCu | |
| | | ′CAAGAGCGu′GAAGGAGCu′GCu′GGGCAu′CACCAu′CA | |
| | | u′GGAGCGGAGCAGCu′u′CGAGAAGAACCCCAu′CGACu′ | |
| | | u′CCu′GGAGGCCAAGGGCu′ACAAGGAGGu′GAAGAAG | |
| | | GACCu′GAu′CAu′CAAGCu′GCCCAAGu′ACAGCCu′Gu′u′ | |
| | | CGAGCu′GGAGAACGGCCGGAAGCGGAu′GCu′GGCCAG | |
| | | CGCCGGCGAGCu′GCAGAAGGGCAACGAGCu′GGCCCu′ | |
| | | GCCCAGCAAGu′ACGu′GAACu′u′CCu′Gu′ACCu′GGCCA | |
| | | GCCACu′ACGAGAAGCu′GAAGGGCAGCCCCGAGGACA | |
| | | ACGAGCAGAAGCAGCu′Gu′u′CGu′GGAGCAGCACAAGC | |
| | | ACu′ACCu′GGACGAGAu′CAu′CGAGCAGAu′CAGCGAGu | |
| | | ′u′CAGCAAGCGGGu′GAu′CCu′GGCCGACGCCAACCu′G | |
| | | GACAAGGu′GCu′GAGCGCCu′ACAACAAGCACCGGGAC | |
| | | AAGCCCAu′CCGGGAGCAGGCCGAGAACAu′CAu′CCAC | |
| | | Cu′Gu′u′CACCCu′GACCAACCu′GGGCGCCCCCGCCGCCu | |
| | | ′u′CAAGu′ACu′u′CGACACCACCAu′CGACCGGAAGCGGu | |
| | | ′ACACCAGCACCAAGGAGGu′GCu′GGACGCCACCCu′GA | |
| | | u′CCACCAGAGCAu′CACCGGCCu′Gu′ACGAGACACGGA | |
| | | u′CGACCu′GAGCCAGCu′GGGCGGCGACGAGGGCGCCG | |
| | | ACAAGCGGACCGCCGACGGCAGCGAGu′u′CGAGAGCC | |
| | | CCAAGAAGAAGCGGAAGGu′Gu′GAGCGGCCGCu′u′AAu | |
| | | ′u′AAGCu′GCCu′u′Cu′GCGGGGCu′u′GCCu′u′Cu′GGCCAu | |
| | | ′GCCCu′u′Cu′u′Cu′Cu′CCCu′u′GCACCu′Gu′ACCu′Cu′u′G | |
| | | Gu′Cu′u′u′GAAu′AAAGCCu′GAGu′AGGAAGu′Cu′AGA | |
| | Protein | MSEVEFSHEYWMRHALTLAKRARDEREVPVGAVLVLNN | 2154 |
| | | RVIGEGWNRAIGLHDPTAHAEIMALRQGGLVMQNYRLID | |
| | | ATLYVTFEPCVMCAGAMIHSRIGRVVFGVRNAKTGAAG | |
| | | SLMDVLHHPGMNHRVEITEGILADECAALLCRFFRMPRR | |
| | | VFNAQKKAQSSTDSGGSSGGSSGSETPGTSESATPESSGG | |
| | | SSGGSDKKYSIGLAIGTNSVGWAVITDEYKVPSKKFKVL | |
| | | GNTDRHSIKKNLIGALLFDSGETAEATRLKRTARRRYTRR | |
| | | KNRICYLQEIFSNEMAKVDDSFFHRLEESFLVEEDKKHER | |
| | | HPIFGNIVDEVAYHEKYPTIYHLRKKLVDSTDKADLRLIY | |
| | | LALAHMIKFRGHFLIEGDLNPDNSDVDKLFIQLVQTYNQL | |
| | | FEENPINASGVDAKAILSARLSKSRRLENLIAQLPGEKKN | |
| | | GLFGNLIALSLGLTPNFKSNFDLAEDAKLQLSKDTYDDDL | |
| | | DNLLAQIGDQYADLFLAAKNLSDAILLSDILRVNTEITKA | |
| | | PLSASMIKRYDEHHQDLTLLKALVRQQLPEKYKEIFFDQS | |
| | | KNGYAGYIDGGASQEEFYKFIKPILEKMDGTEELLVKLN | |
| | | REDLLRKQRTFDNGSIPHQIHLGELHAILRRQEDFYPFLK | |
| | | DNREKIEKILTFRIPYYVGPLARGNSRFAWMTRKSEETITP | |
| | | WNFEEVVDKGASAQSFIERMTNFDKNLPNEKVLPKHSLL | |
| | | YEYFTVYNELTKVKYVTEGMRKPAFLSGEQKKAIVDLLF | |
| | | KTNRKVTVKQLKEDYFKKIECFDSVEISGVEDRFNASLGT | |
| | | YHDLLKIIKDKDFLDNEENEDILEDIVLTLTLFEDREMIEE | |
| | | RLKTYAHLFDDKVMKQLKRRRYTGWGRLSRKLINGIRD | |
| | | KQSGKTILDFLKSDGFANANFMQLIHDDSLTFKEDIQKAQ | |
| | | VSGQGDSLHEHIANLAGSPAIKKGILQTVKVVDELVKVM | |
| | | GRHKPENIVIEMARENQTTQKGQKNSRERMKRIEEGIKEL | |
| | | GSQILKEHPVENTQLQNEKLYLYYLQNGRDMYVDQELDI | |
| | | NRLSDYDVDHIVPQSFLKDDSIDNKVLTRSDKNRGKSDN | |
| | | VPSEEVVKKMKNYWRQLLNAKLITQRKFDNLTKAERGG | |
| | | LSELDKAGFIKRQLVETRQITKHVAQILDSRMNTKYDEN | |
| | | DKLIREVKVITLKSKLVSDFRKDFQFYKVREINNYHHAH | |
| | | DAYLNAVVGTALIKKYPKLESEFVYGDYKVYDVRKMIA | |
| | | KSEQEIGKATAKYFFYSNIMNFFKTEITLANGEIRKRPLIE | |
| | | TNGETGEIVWDKGRDFATVRKVLSMPQVNIVKKTEVQT | |
| | | GGFSKESILPKRNSDKLIARKKDWDPKKYGGFESPTVAY | |
| | | SVLVVAKVEKGKSKKLKSVKELLGITIMERSSFEKNPIDF | |
| | | LEAKGYKEVKKDLIIKLPKYSLFELENGRKRMLASAGEL | |
| | | QKGNELALPSKYVNFLYLASHYEKLKGSPEDNEQKQLFV | |
| | | EQHKHYLDEIIEQISEFSKRVILADANLDKVLSAYNKHRD | |
| | | KPIREQAENIIHLFTLTNLGAPAAFKYFDTTIDRKRYTSTK | |
| | | EVLDATLIHQSITGLYETRIDLSQLGGDEGADKRTADGSE | |
| | | FESPKKKRKV | |
| 5′ UTR | mRNA | AGGAAAu′AAGAGAGAAAAGAAGAGu′AAGAAGAAAu′ | 2138 |
| | | Au′AAGAGCCACC | |
| TadA | mRNA | Au′GAGCGAGGu′GGAGu′u′CAGCCACGAGu′ACu′GGAu′ | 2139 |
| | | GCGGCACGCCCu′GACCCu′GGCCAAGCGGGCCCGGGA | |
| | | CGAGCGGGAGGu′GCCCGu′GGGCGCCGu′GCu′GGu′GCu | |
| | | GAACAACCGGGu′GAu′CGGCGAGGGCu′GGAACCGGG | |
| | | CCAu′CGGCCu′GCACGACCCCACCGCCCACGCCGAGAu′ | |
| | | CAu′GGCCCu′GCGGCAGGGCGGCCu′GGu′GAu′GCAGAA | |
| | | Cu′ACCGGCu′GAu′CGACGCCACCCu′Gu′ACGu′GACCu′u | |
| | | CGAGCCCu′GCGu′GAu′Gu′GCGCCGGCGCCAu′GAu′CC | |
| | | ACAGCCGGAu′CGGCCGGGu′GGu′Gu′u′CGGCGu′GCGG | |
| | | AACGCCAAGACCGGCGCCGCCGGCAGCCu′GAu′GGAC | |
| | | Gu′GCu′GCACCACCCCGGCAu′GAACCACCGGGu′GGAG | |
| | | Au′CACCGAGGGCAu′CCu′GGCCGACGAGu′GCGCCGCC | |
| | | Cu′GCu′Gu′GCCGGu′u′Cu′u′CCGGAu′GCCCCGGCGGGu′ | |
| | | Gu′u′CAACGCCCAGAAGAAGGCCCAGAGCAGCACCGA | |
| | | C | |
| | Protein | MSEVEFSHEYWMRHALTLAKRARDEREVPVGAVLVLNN | 2140 |
| | | RVIGEGWNRAIGLHDPTAHAEIMALRQGGLVMQNYRLID | |
| | | ATLYVTFEPCVMCAGAMIHSRIGRVVFGVRNAKTGAAG | |
| | | SLMDVLHHPGMNHRVEITEGILADECAALLCRFFRMPRR | |
| | | VFNAQKKAQSSTD | |
| Linker | mRNA | AGCGGCGGCAGCAGCGGCGGCAGCAGCGGCAGCGAG | 2141 |
| between | | ACACCCGGCACCAGCGAGAGCGCCACCCCCGAGAGCA | |
| TadA | | GCGGCGGCAGCAGCGGCGGCAGC | |
| and Cas9 | Protein | SGGSSGGSSGSETPGTSESATPESSGGSSGGS | 20 |
| nickase | | | |
| Cas9 | mRNA | GACAAGAAGu′ACAGCAu′CGGCCu′GGCCAu′CGGCACC | 2155 |
| nickase | | AACAGCGu′GGGCu′GGGCCGu′GAu′CACCGACGAGu′AC | |
| | | AAGGu′GCCCAGCAAGAAGu′u′CAAGGu′GCu′GGGCAA | |
| | | CACCGACCGGCACAGCAu′CAAGAAGAACCu′GAu′CGG | |
| | | CGCCCu′GCu′Gu′u′CGACAGCGGCGAGACAGCCGAGGC | |
| | | CACCCGGCu′GAAGCGGACCGCCCGGCGGCGGu′ACAC | |
| | | CCGGCGGAAGAACCGGAu′Cu′GCu′ACCu′GCAGGAGAu′ | |
| | | Cu′u′CAGCAACGAGAu′GGCCAAGGu′GGACGACAGCu′u | |
| | | ′Cu′u′CCACCGGCu′GGAGGAGAGCu′u′CCu′GGu′GGAGG | |
| | | AGGACAAGAAGCACGAGCGGCACCCCAu′Cu′u′CGGCA | |
| | | ACAu′CGu′GGACGAGGu′GGCCu′ACCACGAGAAGu′ACC | |
| | | CCACCAu′Cu′ACCACCu′GCGGAAGAAGCu′GGu′GGACA | |
| | | GCACCGACAAGGCCGACCu′GCGGCu′GAu′Cu′ACCu′GG | |
| | | CCCu′GGCCCACAu′GAu′CAAGu′u′CCGGGGCCACu′u′CC | |
| | | u′GAu′CGAGGGCGACCu′GAACCCCGACAACAGCGACG | |
| | | u′GGACAAGCu′Gu′u′CAu′CCAGCu′GGu′GCAGACCu′AC | |
| | | AACCAGCu′Gu′u′CGAGGAGAACCCCAu′CAACGCCAGC | |
| | | GGCGu′GGACGCCAAGGCCAu′CCu′GAGCGCCCGGCu′G | |
| | | AGCAAGAGCCGGCGGCu′GGAGAACCu′GAu′CGCCCAG | |
| | | Cu′GCCCGGCGAGAAGAAGAACGGCCu′Gu′u′CGGCAAC | |
| | | Cu′GAu′CGCCCu′GAGCCu′GGGCCu′GACCCCCAACu′u′C | |
| | | AAGAGCAACu′u′CGACCu′GGCCGAGGACGCCAAGCu′G | |
| | | CAGCu′GAGCAAGGACACCu′ACGACGACGACCu′GGAC | |
| | | AACCu′GCu′GGCCCAGAu′CGGCGACCAGu′ACGCCGAC | |
| | | Cu′Gu′u′CCu′GGCCGCCAAGAACCu′GAGCGACGCCAu′C | |
| | | Cu′GCu′GAGCGACAu′CCu′GCGGGu′GAACACCGAGAu′ | |
| | | CACCAAGGCCCCCCu′GAGCGCCAGCAu′GAu′CAAGCG | |
| | | Gu′ACGACGAGCACCACCAGGACCu′GACCCu′GCu′GAA | |
| | | GGCCCu′GGu′GCGGCAGCAGCu′GCCCGAGAAGu′ACAA | |
| | | GGAGAu′Cu′u′Cu′u′CGACCAGAGCAAGAACGGCu′ACG | |
| | | CCGGCu′ACAu′CGACGGCGGCGCCAGCCAGGAGGAGu′ | |
| | | u′Cu′ACAAGu′u′CAu′CAAGCCCAu′CCu′GGAGAAGAu′G | |
| | | GACGGCACCGAGGAGCu′GCu′GGu′GAAGCu′GAACCGG | |
| | | GAGGACCu′GCu′GCGGAAGCAGCGGACCu′u′CGACAAC | |
| | | GGCAGCAu′CCCCCACCAGAu′CCACCu′GGGCGAGCu′G | |
| | | CACGCCAu′CCu′GCGGCGGCAGGAGGACu′u′Cu′ACCCC | |
| | | u′u′CCu′GAAGGACAACCGGGAGAAGAu′CGAGAAGAu′ | |
| | | CCu′GACCu′u′CCGGAu′CCCCu′ACu′ACGu′GGGCCCCCu′ | |
| | | GGCCCGGGGCAACAGCCGGu′u′CGCCu′GGAu′GACCCG | |
| | | CAAGAGCGAGGAGACAAu′CACCCCCu′GGAACu′u′CGA | |
| | | GGAGGu′GGu′GGACAAGGGCGCCAGCGCCCAGAGCu′u′ | |
| | | CAu′CGAGCGGAu′GACCAACu′u′CGACAAGAACCu′GCC | |
| | | CAACGAGAAGGu′GCu′GCCCAAGCACAGCCu′GCu′Gu′A | |
| | | CGAGu′ACu′u′CACCGu′Gu′ACAACGAGCu′GACCAAGGu | |
| | | ′GAAGu′ACGu′GACCGAGGGCAu′GCGGAAGCCCGCCu′u | |
| | | ′CCu′GAGCGGCGAGCAGAAGAAGGCCAu′CGu′GGACCu | |
| | | ′GCu′Gu′u′CAAGACCAACCGGAAGGu′GACCGu′GAAGC | |
| | | AGCu′GAAGGAGGACu′ACu′u′CAAGAAGAu′CGAGu′GC | |
| | | u′u′CGACAGCGu′GGAGAu′CAGCGGCGu′GGAGGACCG | |
| | | Gu′u′CAACGCCAGCCu′GGGCACCu′ACCACGACCu′GCu′ | |
| | | GAAGAu′CAu′CAAGGACAAGGACu′u′CCu′GGACAACG | |
| | | AGGAGAACGAGGACAu′CCu′GGAGGACAu′CGu′GCu′G | |
| | | ACCCu′GACCCu′Gu′u′CGAGGACCGGGAGAu′GAu′CGA | |
| | | GGAGCGGCu′GAAGACCu′ACGCCCACCu′Gu′u′CGACGA | |
| | | CAAGGu′GAu′GAAGCAGCu′GAAGCGGCGGCGGu′ACAC | |
| | | CGGCu′GGGGCCGGCu′GAGCCGGAAGCu′GAu′CAACGG | |
| | | CAu′CCGGGACAAGCAGAGCGGCAAGACCAu′CCu′GGA | |
| | | Cu′u′CCu′CAAGAGCGACGGCu′u′CGCCAACGCCAACu′u | |
| | | ′CAu′GCAGCu′GAu′CCACGACGACAGCCu′GACCu′u′CA | |
| | | AGGAGGACAu′CCAGAAGGCCCAGGu′GAGCGGCCAGG | |
| | | GCGACAGCCu′GCACGAGCACAu′CGCCAACCu′GGCCG | |
| | | GCAGCCCCGCCAu′CAAGAAGGGCAu′CCu′GCAGACCG | |
| | | u′GAAGGu′GGu′GGACGAGCu′GGu′GAAGGu′GAu′GGGC | |
| | | CGGCACAAGCCCGAGAACAu′CGu′GAu′CGAGAu′GGCC | |
| | | CGGGAGAACCAGACCACCCAGAAGGGCCAGAAGAAC | |
| | | AGCCGGGAGCGGAu′GAAGCGGAu′CGAGGAGGGCAu′C | |
| | | AAGGAGCu′GGGCAGCCAGAu′CCu′GAAGGAGCACCCC | |
| | | Gu′GGAGAACACCCAGCu′GCAGAACGAGAAGCu′Gu′AC | |
| | | Cu′Gu′ACu′ACCu′GCAGAACGGCCGGGACAu′Gu′ACGu′ | |
| | | GGACCAGGAGCu′GGACAu′CAACCGGCu′GAGCGACu′A | |
| | | CGACGu′GGACCACAu′CGu′GCCCCAGAGCu′u′CCu′GAA | |
| | | GGACGACAGCAu′CGACAACAAGGu′GCu′GACCCGGAG | |
| | | CGACAAGAACCGGGGCAAGAGCGACAACGu′GCCCAG | |
| | | CGAGGAGGu′GGu′GAAGAAGAu′GAAGAACu′ACu′GGC | |
| | | GGCAGCu′GCu′GAACGCCAAGCu′GAu′CACCCAGCGGA | |
| | | AGu′u′CGACAACCu′GACCAAGGCCGAGCGGGGCGGCC | |
| | | u′GAGCGAGCu′GGACAAGGCCGGCu′u′CAu′CAAGCGGC | |
| | | AGCu′GGu′GGAGACACGGCAGAu′CACCAAGCACGu′GG | |
| | | CCCAGAu′CCu′GGACAGCCGGAu′GAACACCAAGu′ACG | |
| | | ACGAGAACGACAAGCu′GAu′CCGGGAGGu′GAAGGu′G | |
| | | Au′CACCCu′CAAGAGCAAGCu′GGu′GAGCGACu′u′CCG | |
| | | GAAGGACu′u′CCAGu′u′Cu′ACAAGGu′GCGGGAGAu′CA | |
| | | ACAACu′ACCACCACGCCCACGACGCCu′ACCu′GAACG | |
| | | CCGu′GGu′GGGCACCGCCCu′GAu′CAAGAAGu′ACCCCA | |
| | | AGCu′GGAGAGCGAGu′u′CGu′Gu′ACGGCGACu′ACAAG | |
| | | Gu′Gu′ACGACGu′GCGGAAGAu′GAu′CGCCAAGAGCGA | |
| | | GCAGGAGAu′CGGCAAGGCCACCGCCAAGu′ACu′u′Cu′u | |
| | | ′Cu′ACAGCAACAu′CAu′GAACu′u′Cu′u′CAAGACCGAGA | |
| | | u′CACCCu′GGCCAACGGCGAGAu′CCGGAAGCGGCCCCu | |
| | | ′GAu′CGAGACAAACGGCGAGACAGGCGAGAu′CGu′Gu′ | |
| | | GGGACAAGGGCCGGGACu′u′CGCCACCGu′GCGGAAGG | |
| | | u′GCu′GAGCAu′GCCCCAGGu′GAACAu′CGu′GAAGAAG | |
| | | ACCGAGGu′GCAGACCGGCGGCu′u′CAGCAAGGAGAGC | |
| | | Au′CCu′GCCCAAGCGGAACAGCGACAAGCu′GAu′CGCC | |
| | | CGGAAGAAGGACu′GGGACCCCAAGAAGu′ACGGCGGC | |
| | | u′u′CGAGAGCCCCACCGu′GGCCu′ACAGCGu′GCu′GGu′ | |
| | | GGu′GGCCAAGGu′GGAGAAGGGCAAGAGCAAGAAGCu | |
| | | ′CAAGAGCGu′GAAGGAGCu′GCu′GGGCAu′CACCAu′CA | |
| | | u′GGAGCGGAGCAGCu′u′CGAGAAGAACCCCAu′CGACu′ | |
| | | u′CCu′GGAGGCCAAGGGCu′ACAAGGAGGu′GAAGAAG | |
| | | GACCu′GAu′CAu′CAAGCu′GCCCAAGu′ACAGCCu′Gu′u′ | |
| | | CGAGCu′GGAGAACGGCCGGAAGCGGAu′GCu′GGCCAG | |
| | | CGCCGGCGAGCu′GCAGAAGGGCAACGAGCu′GGCCCu′ | |
| | | GCCCAGCAAGu′ACGu′GAACu′u′CCu′Gu′ACCu′GGCCA | |
| | | GCCACu′ACGAGAAGCu′GAAGGGCAGCCCCGAGGACA | |
| | | ACGAGCAGAAGCAGCu′Gu′u′CGu′GGAGCAGCACAAGC | |
| | | ACu′ACCu′GGACGAGAu′CAu′CGAGCAGAu′CAGCGAGu | |
| | | ′u′CAGCAAGCGGGu′GAu′CCu′GGCCGACGCCAACCu′G | |
| | | GACAAGGu′GCu′GAGCGCCu′ACAACAAGCACCGGGAC | |
| | | AAGCCCAu′CCGGGAGCAGGCCGAGAACAu′CAu′CCAC | |
| | | Cu′Gu′u′CACCCu′GACCAACCu′GGGCGCCCCCGCCGCCu | |
| | | ′u′CAAGu′ACu′u′CGACACCACCAu′CGACCGGAAGCGGu | |
| | | ′ACACCAGCACCAAGGAGGu′GCu′GGACGCCACCCu′GA | |
| | Protein | u′CCACCAGAGCAu′CACCGGCCu′Gu′ACGAGACACGGA | |
| | | u′CGACCu′GAGCCAGCu′GGGCGGCGAC | |
| | | DKKYSIGLAIGTNSVGWAVITDEYKVPSKKFKVLGNTDR | 2156 |
| | | HSIKKNLIGALLFDSGETAEATRLKRTARRRYTRRKNRIC | |
| | | YLQEIFSNEMAKVDDSFFHRLEESFLVEEDKKHERHPIFG | |
| | | NIVDEVAYHEKYPTIYHLRKKLVDSTDKADLRLIYLALA | |
| | | HMIKFRGHFLIEGDLNPDNSDVDKLFIQLVQTYNQLFEEN | |
| | | PINASGVDAKAILSARLSKSRRLENLIAQLPGEKKNGLFG | |
| | | NLIALSLGLTPNFKSNFDLAEDAKLQLSKDTYDDDLDNL | |
| | | LAQIGDQYADLFLAAKNLSDAILLSDILRVNTEITKAPLSA | |
| | | SMIKRYDEHHQDLTLLKALVRQQLPEKYKEIFFDQSKNG | |
| | | YAGYIDGGASQEEFYKFIKPILEKMDGTEELLVKLNREDL | |
| | | LRKQRTFDNGSIPHQIHLGELHAILRRQEDFYPFLKDNRE | |
| | | KIEKILTFRIPYYVGPLARGNSRFAWMTRKSEETITPWNFE | |
| | | EVVDKGASAQSFIERMTNFDKNLPNEKVLPKHSLLYEYF | |
| | | TVYNELTKVKYVTEGMRKPAFLSGEQKKAIVDLLFKTNR | |
| | | KVTVKQLKEDYFKKIECFDSVEISGVEDRFNASLGTYHDL | |
| | | LKIIKDKDFLDNEENEDILEDIVLTLTLFEDREMIEERLKT | |
| | | YAHLFDDKVMKQLKRRRYTGWGRLSRKLINGIRDKQSG | |
| | | KTILDFLKSDGFANANFMQLIHDDSLTFKEDIQKAQVSGQ | |
| | | GDSLHEHIANLAGSPAIKKGILQTVKVVDELVKVMGRHK | |
| | | PENIVIEMARENQTTQKGQKNSRERMKRIEEGIKELGSQI | |
| | | LKEHPVENTQLQNEKLYLYYLQNGRDMYVDQELDINRL | |
| | | SDYDVDHIVPQSFLKDDSIDNKVLTRSDKNRGKSDNVPS | |
| | | EEVVKKMKNYWRQLLNAKLITQRKFDNLTKAERGGLSE | |
| | | LDKAGFIKRQLVETRQITKHVAQILDSRMNTKYDENDKLI | |
| | | REVKVITLKSKLVSDFRKDFQFYKVREINNYHHAHDAYL | |
| | | NAVVGTALIKKYPKLESEFVYGDYKVYDVRKMIAKSEQ | |
| | | EIGKATAKYFFYSNIMNFFKTEITLANGEIRKRPLIETNGE | |
| | | TGEIVWDKGRDFATVRKVLSMPQVNIVKKTEVQTGGFS | |
| | | KESILPKRNSDKLIARKKDWDPKKYGGFESPTVAYSVLV | |
| | | VAKVEKGKSKKLKSVKELLGITIMERSSFEKNPIDFLEAK | |
| | | GYKEVKKDLIIKLPKYSLFELENGRKRMLASAGELQKGN | |
| | | ELALPSKYVNFLYLASHYEKLKGSPEDNEQKQLFVEQHK | |
| | | HYLDEIIEQISEFSKRVILADANLDKVLSAYNKHRDKPIRE | |
| | | QAENIIHLFTLTNLGAPAAFKYFDTTIDRKRYTSTKEVLD | |
| | | ATLIHQSITGLYETRIDLSQLGGD | |
| Linker | mRNA | GAGGGCGCCGAC | 2143 |
| between | Protein | EGAD | 2144 |
| Cas9 | | | |
| nickase | | | |
| and NLS | | | |
| Nuclear | mRNA | AAGCGGACCGCCGACGGCAGCGAGu′u′CGAGAGCCCC | 2145 |
| localization | | AAGAAGAAGCGGAAGGu′Gu′GA | |
| sequence | Protein | KRTADGSEFESPKKKRKV | 2146 |
| (NLS) | | | |
| 3′ UTR | mRNA | GCGGCCGCu′u′AAu′u′AAGCu′GCCu′u′Cu′GCGGGGCu′u′ | 2147 |
| | | GCCu′u′Cu′GGCCAu′GCCCu′u′Cu′u′Cu′Cu′CCCu′u′GCAC | |
| | | Cu′Gu′ACCu′Cu′u′GGu′Cu′u′u′GAAu′AAAGCCu′GAGu′A | |
| | | GGAAGu′Cu′AGA | |

MA045 mRNA and protein sequences

| | | | SEQ ID |
|---|---|---|---|
| Region | Sequence | | NO |
| Full | mRNA | AGGAAAu′AAGAGAGAAAAGAAGAGu′AAGAAGAAAu′ | 2157 |
| sequence | | Au′AAGAGCCACCAu′GAGCGAGGu′GGAGu′u′CAGCCA | |
| | | CGAGu′ACu′GGAu′GCGGCACGCCCu′GACCCu′GGCCAA | |
| | | GCGGGCCCGGGACGAGCGGGAGGu′GCCCGu′GGGCGC | |
| | | CGu′GCu′GGu′GCu′GAACAACCGGGu′GAu′CGGCGAGG | |
| | | GCu′GGAACCGGGCCAu′CGGCCu′GCACGACCCCACCG | |
| | | CCCACGCCGAGAu′CAu′GGCCCu′GCGGCAGGGCGGCCu | |
| | | ′GGu′GAu′GCAGAACu′ACCGGCu′GAu′CGACGCCACCCu | |
| | | ′Gu′ACGu′GACCu′u′CGAGCCCu′GCGu′GAu′Gu′GCGCCG | |
| | | GCGCCAu′GAu′CCACAGCCGGAu′CGGCCGGGu′GGu′Gu | |
| | | ′u′CGGCGu′GCGGAACGCCAAGACCGGCGCCGCCGGCA | |
| | | GCCu′GAu′GGACGu′GCu′GCACCACCCCGGCAu′GAACC | |
| | | ACCGGGu′GGAGAu′CACCGAGGGCAu′CCu′GGCCGACG | |
| | | AGu′GCGCCGCCCu′GCu′Gu′GCCGGu′u′Cu′u′CCGGAu′G | |
| | | CCCCGGCGGGu′Gu′u′CAACGCCCAGAAGAAGGCCCAG | |
| | | AGCAGCACCGACAGCGGCGGCAGCAGCGGCGGCAGCA | |
| | | GCGGCAGCGAGACACCCGGCACCAGCGAGAGCGCCAC | |
| | | CCCCGAGAGCAGCGGCGGCAGCAGCGGCGGCAGCGAC | |
| | | AAGAAGu′ACAGCAu′CGGCCu′GGCCAu′CGGCACCAAC | |
| | | AGCGu′GGGCu′GGGCCGu′GAu′CACCGACGAGu′ACAA | |
| | | GGu′GCCCAGCAAGAAGu′u′CAAGGu′GCu′GGGCAACA | |
| | | CCGACCGGCACAGCAu′CAAGAAGAACCu′GAu′CGGCG | |
| | | CCCu′GCu′Gu′u′CGACAGCGGCGAGACAGCCGAGGCCA | |
| | | CCCGGCu′GAAGCGGACCGCCCGGCGGCGGu′ACACCC | |
| | | GGCGGAAGAACCGGAu′Cu′GCu′ACCu′GCAGGAGAu′Cu | |
| | | ′u′CAGCAACGAGAu′GGCCAAGGu′GGACGACAGCu′u′C | |
| | | u′u′CCACCGGCu′GGAGGAGAGCu′u′CCu′GGu′GGAGGA | |
| | | GGACAAGAAGCACGAGCGGCACCCCAu′Cu′u′CGGCAA | |
| | | CAu′CGu′GGACGAGGu′GGCCu′ACCACGAGAAGu′ACCC | |
| | | CACCAu′Cu′ACCACCu′GCGGAAGAAGCu′GGu′GGACAG | |
| | | CACCGACAAGGCCGACCu′GCGGCu′GAu′Cu′ACCu′GGC | |
| | | CCu′GGCCCACAu′GAu′CAAGu′u′CCGGGGCCACu′u′CCu | |
| | | ′GAu′CGAGGGCGACCu′GAACCCCGACAACAGCGACGu′ | |
| | | GGACAAGCu′Gu′u′CAu′CCAGCu′GGu′GCAGACCu′ACA | |
| | | ACCAGCu′Gu′u′CGAGGAGAACCCCAu′CAACGCCAGCG | |
| | | GCGu′GGACGCCAAGGCCAu′CCu′GAGCGCCCGGCu′GA | |
| | | GCAAGAGCCGGCGGCu′GGAGAACCu′GAu′CGCCCAGC | |
| | | u′GCCCGGCGAGAAGAAGAACGGCCu′Gu′u′CGGCAACC | |
| | | u′GAu′CGCCCu′GAGCCu′GGGCCu′GACCCCCAACu′u′CA | |
| | | AGAGCAACu′u′CGACCu′GGCCGAGGACGCCAAGCu′GC | |
| | | AGCu′GAGCAAGGACACCu′ACGACGACGACCu′GGACA | |
| | | ACCu′GCu′GGCCCAGAu′CGGCGACCAGu′ACGCCGACC | |
| | | u′Gu′u′CCu′GGCCGCCAAGAACCu′GAGCGACGCCAu′CC | |
| | | u′GCu′GAGCGACAu′CCu′GCGGGu′GAACACCGAGAu′C | |
| | | ACCAAGGCCCCCCu′GAGCGCCAGCAu′GAu′CAAGCGG | |
| | | u′ACGACGAGCACCACCAGGACCu′GACCCu′GCu′GAAG | |
| | | GCCCu′GGu′GCGGCAGCAGCu′GCCCGAGAAGu′ACAAG | |
| | | GAGAu′Cu′u′Cu′u′CGACCAGAGCAAGAACGGCu′ACGC | |
| | | CGGCu′ACAu′CGACGGCGGCGCCAGCCAGGAGGAGu′u′ | |
| | | Cu′ACAAGu′u′CAu′CAAGCCCAu′CCu′GGAGAAGAu′GG | |
| | | ACGGCACCGAGGAGCu′GCu′GGu′GAAGCu′GAACCGGG | |
| | | AGGACCu′GCu′GCGGAAGCAGCGGACCu′u′CGACAACG | |
| | | GCAGCAu′CCCCCACCAGAu′CCACCu′GGGCGAGCu′GC | |
| | | ACGCCAu′CCu′GCGGCGGCAGGAGGACu′u′Cu′ACCCCu′ | |
| | | u′CCu′GAAGGACAACCGGGAGAAGAu′CGAGAAGAu′CC | |
| | | u′GACCu′u′CCGGAu′CCCCu′ACu′ACGu′GGGCCCCCu′G | |
| | | GCCCGGGGCAACAGCCGGu′u′CGCCu′GGAu′GACCCGC | |
| | | AAGAGCGAGGAGACAAu′CACCCCCu′GGAACu′u′CGAG | |
| | | GAGGu′GGu′GGACAAGGGCGCCAGCGCCCAGAGCu′u′C | |
| | | Au′CGAGCGGAu′GACCAACu′u′CGACAAGAACCu′GCCC | |
| | | AACGAGAAGGu′GCu′GCCCAAGCACAGCCu′GCu′Gu′AC | |
| | | GAGu′ACu′u′CACCGu′Gu′ACAACGAGCu′GACCAAGGu′ | |
| | | GAAGu′ACGu′GACCGAGGGCAu′GCGGAAGCCCGCCu′u′ | |
| | | CCu′GAGCGGCGAGCAGAAGAAGGCCAu′CGu′GGACCu′ | |
| | | GCu′Gu′u′CAAGACCAACCGGAAGGu′GACCGu′GAAGC | |
| | | AGCu′GAAGGAGGACu′ACu′u′CAAGAAGAu′CGAGu′GC | |
| | | u′u′CGACAGCGu′GGAGAu′CAGCGGCGu′GGAGGACCG | |
| | | Gu′u′CAACGCCAGCCu′GGGCACCu′ACCACGACCu′GCu′ | |
| | | GAAGAu′CAu′CAAGGACAAGGACu′u′CCu′GGACAACG | |
| | | AGGAGAACGAGGACAu′CCu′GGAGGACAu′CGu′GCu′G | |
| | | ACCCu′GACCCu′Gu′u′CGAGGACCGGGAGAu′GAu′CGA | |
| | | GGAGCGGCu′GAAGACCu′ACGCCCACCu′Gu′u′CGACGA | |
| | | CAAGGu′GAu′GAAGCAGCu′GAAGCGGCGGCGGu′ACAC | |
| | | CGGCu′GGGGCCGGCu′GAGCCGGAAGCu′GAu′CAACGG | |
| | | CAu′CCGGGACAAGCAGAGCGGCAAGACCAu′CCu′GGA | |
| | | Cu′u′CCu′CAAGAGCGACGGCu′u′CGCCAACGCCAACu′u | |
| | | ′CAu′GCAGCu′GAu′CCACGACGACAGCCu′GACCu′u′CA | |
| | | AGGAGGACAu′CCAGAAGGCCCAGGu′GAGCGGCCAGG | |
| | | GCGACAGCCu′GCACGAGCACAu′CGCCAACCu′GGCCG | |
| | | GCAGCCCCGCCAu′CAAGAAGGGCAu′CCu′GCAGACCG | |
| | | u′GAAGGu′GGu′GGACGAGCu′GGu′GAAGGu′GAu′GGGC | |
| | | CGGCACAAGCCCGAGAACAu′CGu′GAu′CGAGAu′GGCC | |
| | | CGGGAGAACCAGACCACCCAGAAGGGCCAGAAGAAC | |
| | | AGCCGGGAGCGGAu′GAAGCGGAu′CGAGGAGGGCAu′C | |
| | | AAGGAGCu′GGGCAGCCAGAu′CCu′GAAGGAGCACCCC | |
| | | Gu′GGAGAACACCCAGCu′GCAGAACGAGAAGCu′Gu′AC | |
| | | Cu′Gu′ACu′ACCu′GCAGAACGGCCGGGACAu′Gu′ACGu′ | |
| | | GGACCAGGAGCu′GGACAu′CAACCGGCu′GAGCGACu′A | |
| | | CGACGu′GGACCACAu′CGu′GCCCCAGAGCu′u′CCu′GAA | |
| | | GGACGACAGCAu′CGACAACAAGGu′GCu′GACCCGGAG | |
| | | CGACAAGAACCGGGGCAAGAGCGACAACGu′GCCCAG | |
| | | CGAGGAGGu′GGu′GAAGAAGAu′GAAGAACu′ACu′GGC | |
| | | GGCAGCu′GCu′GAACGCCAAGCu′GAu′CACCCAGCGGA | |
| | | AGu′u′CGACAACCu′GACCAAGGCCGAGCGGGGCGGCC | |
| | | u′GAGCGAGCu′GGACAAGGCCGGCu′u′CAu′CAAGCGGC | |
| | | AGCu′GGu′GGAGACACGGCAGAu′CACCAAGCACGu′GG | |
| | | CCCAGAu′CCu′GGACAGCCGGAu′GAACACCAAGu′ACG | |
| | | ACGAGAACGACAAGCu′GAu′CCGGGAGGu′GAAGGu′G | |
| | | Au′CACCCu′CAAGAGCAAGCu′GGu′GAGCGACu′u′CCG | |
| | | GAAGGACu′u′CCAGu′u′Cu′ACAAGGu′GCGGGAGAu′CA | |
| | | ACAACu′ACCACCACGCCCACGACGCCu′ACCu′GAACG | |
| | | CCGu′GGu′GGGCACCGCCCu′GAu′CAAGAAGu′ACCCCA | |
| | | AGCu′GGAGAGCGAGu′u′CGu′Gu′ACGGCGACu′ACAAG | |
| | | Gu′Gu′ACGACGu′GCGGAAGAu′GAu′CGCCAAGAGCGA | |
| | | GCAGGAGAu′CGGCAAGGCCACCGCCAAGu′ACu′u′Cu′u | |
| | | ′Cu′ACAGCAACAu′CAu′GAACu′u′Cu′u′CAAGACCGAGA | |
| | | u′CACCCu′GGCCAACGGCGAGAu′CCGGAAGCGGCCCCu | |
| | | ′GAu′CGAGACAAACGGCGAGACAGGCGAGAu′CGu′Gu′ | |
| | | GGGACAAGGGCCGGGACu′u′CGCCACCGu′GCGGAAGG | |
| | | u′GCu′GAGCAu′GCCCCAGGu′GAACAu′CGu′GAAGAAG | |
| | | ACCGAGGu′GCAGACCGGCGGCu′u′CAGCAAGGAGAGC | |
| | | Au′CCu′GCCCAAGCGGAACAGCGACAAGCu′GAu′CGCC | |
| | | CGGAAGAAGGACu′GGGACCCCAAGAAGu′ACGGCGGC | |
| | | u′u′CGACAGCCCCACCGu′GGCCu′ACAGCGu′GCu′GGu′ | |
| | | GGu′GGCCAAGGu′GGAGAAGGGCAAGAGCAAGAAGCu | |
| | | ′CAAGAGCGu′GAAGGAGCu′GCu′GGGCAu′CACCAu′CA | |
| | | u′GGAGCGGAGCAGCu′u′CGAGAAGAACCCCAu′CGACu′ | |
| | | u′CCu′GGAGGCCAAGGGCu′ACAAGGAGGu′GAAGAAG | |
| | | GACCu′GAu′CAu′CAAGCu′GCCCAAGu′ACAGCCu′Gu′u′ | |
| | | CGAGCu′GGAGAACGGCCGGAAGCGGAu′GCu′GGCCAG | |
| | | CGCCGGCGAGCu′GCAGAAGGGCAACGAGCu′GGCCCu′ | |
| | | GCCCAGCAAGu′ACGu′GAACu′u′CCu′Gu′ACCu′GGCCA | |
| | | GCCACu′ACGAGAAGCu′GAAGGGCAGCCCCGAGGACA | |
| | | ACGAGCAGAAGCAGCu′Gu′u′CGu′GGAGCAGCACAAGC | |
| | | ACu′ACCu′GGACGAGAu′CAu′CGAGCAGAu′CAGCGAGu | |
| | | ′u′CAGCAAGCGGGu′GAu′CCu′GGCCGACGCCAACCu′G | |
| | | GACAAGGu′GCu′GAGCGCCu′ACAACAAGCACCGGGAC | |
| | | AAGCCCAu′CCGGGAGCAGGCCGAGAACAu′CAu′CCAC | |
| | | Cu′Gu′u′CACCCu′GACCAACCu′GGGCGCCCCCGCCGCCu | |
| | | ′u′CAAGu′ACu′u′CGACACCACCAu′CGACCGGAAGCGGu | |
| | | ′ACACCAGCACCAAGGAGGu′GCu′GGACGCCACCCu′GA | |
| | | u′CCACCAGAGCAu′CACCGGCCu′Gu′ACGAGACACGGA | |
| | | u′CGACCu′GAGCCAGCu′GGGCGGCGACGAGGGCGCCG | |
| | | ACAAGCGGACCGCCGACGGCAGCGAGu′u′CGAGAGCC | |
| | | CCAAGAAGAAGCGGAAGGu′Gu′GAGCGGCCGCu′u′AAu | |
| | | ′u′AAGCu′GCCu′u′Cu′GCGGGGCu′u′GCCu′u′Cu′GGCCAu | |
| | | ′GCCCu′u′Cu′u′Cu′Cu′CCCu′u′GCACCu′Gu′ACCu′Cu′u′G | |
| | | Gu′Cu′u′u′GAAu′AAAGCCu′GAGu′AGGAAGu′Cu′AGA | |
| | Protein | MSEVEFSHEYWMRHALTLAKRARDEREVPVGAVLVLNN | 2158 |
| | | RVIGEGWNRAIGLHDPTAHAEIMALRQGGLVMQNYRLID | |
| | | ATLYVTFEPCVMCAGAMIHSRIGRVVFGVRNAKTGAAG | |
| | | SLMDVLHHPGMNHRVEITEGILADECAALLCRFFRMPRR | |
| | | VFNAQKKAQSSTDSGGSSGGSSGSETPGTSESATPESSGG | |
| | | SSGGSDKKYSIGLAIGTNSVGWAVITDEYKVPSKKFKVL | |
| | | GNTDRHSIKKNLIGALLFDSGETAEATRLKRTARRRYTRR | |
| | | KNRICYLQEIFSNEMAKVDDSFFHRLEESFLVEEDKKHER | |
| | | HPIFGNIVDEVAYHEKYPTIYHLRKKLVDSTDKADLRLIY | |
| | | LALAHMIKFRGHFLIEGDLNPDNSDVDKLFIQLVQTYNQL | |
| | | FEENPINASGVDAKAILSARLSKSRRLENLIAQLPGEKKN | |
| | | GLFGNLIALSLGLTPNFKSNFDLAEDAKLQLSKDTYDDDL | |
| | | DNLLAQIGDQYADLFLAAKNLSDAILLSDILRVNTEITKA | |
| | | PLSASMIKRYDEHHQDLTLLKALVRQQLPEKYKEIFFDQS | |
| | | KNGYAGYIDGGASQEEFYKFIKPILEKMDGTEELLVKLN | |
| | | REDLLRKQRTFDNGSIPHQIHLGELHAILRRQEDFYPFLK | |
| | | DNREKIEKILTFRIPYYVGPLARGNSRFAWMTRKSEETITP | |
| | | WNFEEVVDKGASAQSFIERMTNFDKNLPNEKVLPKHSLL | |
| | | YEYFTVYNELTKVKYVTEGMRKPAFLSGEQKKAIVDLLF | |
| | | KTNRKVTVKQLKEDYFKKIECFDSVEISGVEDRFNASLGT | |
| | | YHDLLKIIKDKDFLDNEENEDILEDIVLTLTLFEDREMIEE | |
| | | RLKTYAHLFDDKVMKQLKRRRYTGWGRLSRKLINGIRD | |
| | | KQSGKTILDFLKSDGFANANFMQLIHDDSLTFKEDIQKAQ | |
| | | VSGQGDSLHEHIANLAGSPAIKKGILQTVKVVDELVKVM | |
| | | GRHKPENIVIEMARENQTTQKGQKNSRERMKRIEEGIKEL | |
| | | GSQILKEHPVENTQLQNEKLYLYYLQNGRDMYVDQELDI | |
| | | NRLSDYDVDHIVPQSFLKDDSIDNKVLTRSDKNRGKSDN | |
| | | VPSEEVVKKMKNYWRQLLNAKLITQRKFDNLTKAERGG | |
| | | LSELDKAGFIKRQLVETRQITKHVAQILDSRMNTKYDEN | |
| | | DKLIREVKVITLKSKLVSDFRKDFQFYKVREINNYHHAH | |
| | | DAYLNAVVGTALIKKYPKLESEFVYGDYKVYDVRKMIA | |
| | | KSEQEIGKATAKYFFYSNIMNFFKTEITLANGEIRKRPLIE | |
| | | TNGETGEIVWDKGRDFATVRKVLSMPQVNIVKKTEVQT | |
| | | GGFSKESILPKRNSDKLIARKKDWDPKKYGGFDSPTVAY | |
| | | SVLVVAKVEKGKSKKLKSVKELLGITIMERSSFEKNPIDF | |
| | | LEAKGYKEVKKDLIIKLPKYSLFELENGRKRMLASAGEL | |
| | | QKGNELALPSKYVNFLYLASHYEKLKGSPEDNEQKQLFV | |
| | | EQHKHYLDEIIEQISEFSKRVILADANLDKVLSAYNKHRD | |
| | | KPIREQAENIIHLFTLTNLGAPAAFKYFDTTIDRKRYTSTK | |
| | | EVLDATLIHQSITGLYETRIDLSQLGGDEGADKRTADGSE | |
| | | FESPKKKRKV | |
| 5′ UTR | mRNA | AGGAAAu′AAGAGAGAAAAGAAGAGu′AAGAAGAAAu′ | 2138 |
| | | Au′AAGAGCCACC | |
| TadA | mRNA | Au′GAGCGAGGu′GGAGu′u′CAGCCACGAGu′ACu′GGAu′ | 2139 |
| | | GCGGCACGCCCu′GACCCu′GGCCAAGCGGGCCCGGGA | |
| | | CGAGCGGGAGGu′GCCCGu′GGGCGCCGu′GCu′GGu′GCu | |
| | | ′GAACAACCGGGu′GAu′CGGCGAGGGCu′GGAACCGGG | |
| | | CCAu′CGGCCu′GCACGACCCCACCGCCCACGCCGAGAu′ | |
| | | CAu′GGCCCu′GCGGCAGGGCGGCCu′GGu′GAu′GCAGAA | |
| | | Cu′ACCGGCu′GAu′CGACGCCACCCu′Gu′ACGu′GACCu′u | |
| | | CGAGCCCu′GCGu′GAu′Gu′GCGCCGGCGCCAu′GAu′CC | |
| | | ACAGCCGGAu′CGGCCGGGu′GGu′Gu′u′CGGCGu′GCGG | |
| | | AACGCCAAGACCGGCGCCGCCGGCAGCCu′GAu′GGAC | |
| | | Gu′GCu′GCACCACCCCGGCAu′GAACCACCGGGu′GGAG | |
| | | Au′CACCGAGGGCAu′CCu′GGCCGACGAGu′GCGCCGCC | |
| | | Cu′GCu′Gu′GCCGGu′u′Cu′u′CCGGAu′GCCCCGGCGGGu′ | |
| | | Gu′u′CAACGCCCAGAAGAAGGCCCAGAGCAGCACCGA | |
| | | C | |
| | Protein | MSEVEFSHEYWMRHALTLAKRARDEREVPVGAVLVLNN | 2140 |
| | | RVIGEGWNRAIGLHDPTAHAEIMALRQGGLVMQNYRLID | |
| | | ATLYVTFEPCVMCAGAMIHSRIGRVVFGVRNAKTGAAG | |
| | | SLMDVLHHPGMNHRVEITEGILADECAALLCRFFRMPRR | |
| | | VFNAQKKAQSSTD | |
| Linker | mRNA | AGCGGCGGCAGCAGCGGCGGCAGCAGCGGCAGCGAG | 2141 |
| between | | ACACCCGGCACCAGCGAGAGCGCCACCCCCGAGAGCA | |
| TadA | | GCGGCGGCAGCAGCGGCGGCAGC | |
| and Cas9 | Protein | SGGSSGGSSGSETPGTSESATPESSGGSSGGS | 20 |
| nickase | | | |
| Cas9 | mRNA | GACAAGAAGu′ACAGCAu′CGGCCu′GGCCAu′CGGCACC | 2159 |
| nickase | | AACAGCGu′GGGCu′GGGCCGu′GAu′CACCGACGAGu′AC | |
| | | AAGGu′GCCCAGCAAGAAGu′u′CAAGGu′GCu′GGGCAA | |
| | | CACCGACCGGCACAGCAu′CAAGAAGAACCu′GAu′CGG | |
| | | CGCCCu′GCu′Gu′u′CGACAGCGGCGAGACAGCCGAGGC | |
| | | CACCCGGCu′GAAGCGGACCGCCCGGCGGCGGu′ACAC | |
| | | CCGGCGGAAGAACCGGAu′Cu′GCu′ACCu′GCAGGAGAu′ | |
| | | Cu′u′CAGCAACGAGAu′GGCCAAGGu′GGACGACAGCu′u | |
| | | ′Cu′u′CCACCGGCu′GGAGGAGAGCu′u′CCu′GGu′GGAGG | |
| | | AGGACAAGAAGCACGAGCGGCACCCCAu′Cu′u′CGGCA | |
| | | ACAu′CGu′GGACGAGGu′GGCCu′ACCACGAGAAGu′ACC | |
| | | CCACCAu′Cu′ACCACCu′GCGGAAGAAGCu′GGu′GGACA | |
| | | GCACCGACAAGGCCGACCu′GCGGCu′GAu′Cu′ACCu′GG | |
| | | CCCu′GGCCCACAu′GAu′CAAGu′u′CCGGGGCCACu′u′CC | |
| | | u′GAu′CGAGGGCGACCu′GAACCCCGACAACAGCGACG | |
| | | u′GGACAAGCu′Gu′u′CAu′CCAGCu′GGu′GCAGACCu′AC | |
| | | AACCAGCu′Gu′u′CGAGGAGAACCCCAu′CAACGCCAGC | |
| | | GGCGu′GGACGCCAAGGCCAu′CCu′GAGCGCCCGGCu′G | |
| | | AGCAAGAGCCGGCGGCu′GGAGAACCu′GAu′CGCCCAG | |
| | | Cu′GCCCGGCGAGAAGAAGAACGGCCu′Gu′u′CGGCAAC | |
| | | Cu′GAu′CGCCCu′GAGCCu′GGGCCu′GACCCCCAACu′u′C | |
| | | AAGAGCAACu′u′CGACCu′GGCCGAGGACGCCAAGCu′G | |
| | | CAGCu′GAGCAAGGACACCu′ACGACGACGACCu′GGAC | |
| | | AACCu′GCu′GGCCCAGAu′CGGCGACCAGu′ACGCCGAC | |
| | | Cu′Gu′u′CCu′GGCCGCCAAGAACCu′GAGCGACGCCAu′C | |
| | | Cu′GCu′GAGCGACAu′CCu′GCGGGu′GAACACCGAGAu′ | |
| | | CACCAAGGCCCCCCu′GAGCGCCAGCAu′GAu′CAAGCG | |
| | | Gu′ACGACGAGCACCACCAGGACCu′GACCCu′GCu′GAA | |
| | | GGCCCu′GGu′GCGGCAGCAGCu′GCCCGAGAAGu′ACAA | |
| | | GGAGAu′Cu′u′Cu′u′CGACCAGAGCAAGAACGGCu′ACG | |
| | | CCGGCu′ACAu′CGACGGCGGCGCCAGCCAGGAGGAGu′ | |
| | | u′Cu′ACAAGu′u′CAu′CAAGCCCAu′CCu′GGAGAAGAu′G | |
| | | GACGGCACCGAGGAGCu′GCu′GGu′GAAGCu′GAACCGG | |
| | | GAGGACCu′GCu′GCGGAAGCAGCGGACCu′u′CGACAAC | |
| | | GGCAGCAu′CCCCCACCAGAu′CCACCu′GGGCGAGCu′G | |
| | | CACGCCAu′CCu′GCGGCGGCAGGAGGACu′u′Cu′ACCCC | |
| | | u′u′CCu′GAAGGACAACCGGGAGAAGAu′CGAGAAGAu′ | |
| | | CCu′GACCu′u′CCGGAu′CCCCu′ACu′ACGu′GGGCCCCCu′ | |
| | | GGCCCGGGGCAACAGCCGGu′u′CGCCu′GGAu′GACCCG | |
| | | CAAGAGCGAGGAGACAAu′CACCCCCu′GGAACu′u′CGA | |
| | | GGAGGu′GGu′GGACAAGGGCGCCAGCGCCCAGAGCu′u′ | |
| | | CAu′CGAGCGGAu′GACCAACu′u′CGACAAGAACCu′GCC | |
| | | CAACGAGAAGGu′GCu′GCCCAAGCACAGCCu′GCu′Gu′A | |
| | | CGAGu′ACu′u′CACCGu′Gu′ACAACGAGCu′GACCAAGGu | |
| | | ′GAAGu′ACGu′GACCGAGGGCAu′GCGGAAGCCCGCCu′u | |
| | | ′CCu′GAGCGGCGAGCAGAAGAAGGCCAu′CGu′GGACCu | |
| | | ′GCu′Gu′u′CAAGACCAACCGGAAGGu′GACCGu′GAAGC | |
| | | AGCu′GAAGGAGGACu′ACu′u′CAAGAAGAu′CGAGu′GC | |
| | | u′u′CGACAGCGu′GGAGAu′CAGCGGCGu′GGAGGACCG | |
| | | Gu′u′CAACGCCAGCCu′GGGCACCu′ACCACGACCu′GCu′ | |
| | | GAAGAu′CAu′CAAGGACAAGGACu′u′CCu′GGACAACG | |
| | | AGGAGAACGAGGACAu′CCu′GGAGGACAu′CGu′GCu′G | |
| | | ACCCu′GACCCu′Gu′u′CGAGGACCGGGAGAu′GAu′CGA | |
| | | GGAGCGGCu′GAAGACCu′ACGCCCACCu′Gu′u′CGACGA | |
| | | CAAGGu′GAu′GAAGCAGCu′GAAGCGGCGGCGGu′ACAC | |
| | | CGGCu′GGGGCCGGCu′GAGCCGGAAGCu′GAu′CAACGG | |
| | | CAu′CCGGGACAAGCAGAGCGGCAAGACCAu′CCu′GGA | |
| | | Cu′u′CCu′CAAGAGCGACGGCu′u′CGCCAACGCCAACu′u | |
| | | CAu′GCAGCu′GAu′CCACGACGACAGCCu′GACCu′u′CA | |
| | | AGGAGGACAu′CCAGAAGGCCCAGGu′GAGCGGCCAGG | |
| | | GCGACAGCCu′GCACGAGCACAu′CGCCAACCu′GGCCG | |
| | | GCAGCCCCGCCAu′CAAGAAGGGCAu′CCu′GCAGACCG | |
| | | u′GAAGGu′GGu′GGACGAGCu′GGu′GAAGGu′GAu′GGGC | |
| | | CGGCACAAGCCCGAGAACAu′CGu′GAu′CGAGAu′GGCC | |
| | | CGGGAGAACCAGACCACCCAGAAGGGCCAGAAGAAC | |
| | | AGCCGGGAGCGGAu′GAAGCGGAu′CGAGGAGGGCAu′C | |
| | | AAGGAGCu′GGGCAGCCAGAu′CCu′GAAGGAGCACCCC | |
| | | Gu′GGAGAACACCCAGCu′GCAGAACGAGAAGCu′Gu′AC | |
| | | Cu′Gu′ACu′ACCu′GCAGAACGGCCGGGACAu′Gu′ACGu′ | |
| | | GGACCAGGAGCu′GGACAu′CAACCGGCu′GAGCGACu′A | |
| | | CGACGu′GGACCACAu′CGu′GCCCCAGAGCu′u′CCu′GAA | |
| | | GGACGACAGCAu′CGACAACAAGGu′GCu′GACCCGGAG | |
| | | CGACAAGAACCGGGGCAAGAGCGACAACGu′GCCCAG | |
| | | CGAGGAGGu′GGu′GAAGAAGAu′GAAGAACu′ACu′GGC | |
| | | GGCAGCu′GCu′GAACGCCAAGCu′GAu′CACCCAGCGGA | |
| | | AGu′u′CGACAACCu′GACCAAGGCCGAGCGGGGCGGCC | |
| | | u′GAGCGAGCu′GGACAAGGCCGGCu′u′CAu′CAAGCGGC | |
| | | AGCu′GGu′GGAGACACGGCAGAu′CACCAAGCACGu′GG | |
| | | CCCAGAu′CCu′GGACAGCCGGAu′GAACACCAAGu′ACG | |
| | | ACGAGAACGACAAGCu′GAu′CCGGGAGGu′GAAGGu′G | |
| | | Au′CACCCu′CAAGAGCAAGCu′GGu′GAGCGACu′u′CCG | |
| | | GAAGGACu′u′CCAGu′u′Cu′ACAAGGu′GCGGGAGAu′CA | |
| | | ACAACu′ACCACCACGCCCACGACGCCu′ACCu′GAACG | |
| | | CCGu′GGu′GGGCACCGCCCu′GAu′CAAGAAGu′ACCCCA | |
| | | AGCu′GGAGAGCGAGu′u′CGu′Gu′ACGGCGACu′ACAAG | |
| | | Gu′Gu′ACGACGu′GCGGAAGAu′GAu′CGCCAAGAGCGA | |
| | | GCAGGAGAu′CGGCAAGGCCACCGCCAAGu′ACu′u′Cu′u | |
| | | ′Cu′ACAGCAACAu′CAu′GAACu′u′Cu′u′CAAGACCGAGA | |
| | | u′CACCCu′GGCCAACGGCGAGAu′CCGGAAGCGGCCCCu | |
| | | ′GAu′CGAGACAAACGGCGAGACAGGCGAGAu′CGu′Gu′ | |
| | | GGGACAAGGGCCGGGACu′u′CGCCACCGu′GCGGAAGG | |
| | | u′GCu′GAGCAu′GCCCCAGGu′GAACAu′CGu′GAAGAAG | |
| | | ACCGAGGu′GCAGACCGGCGGCu′u′CAGCAAGGAGAGC | |
| | | Au′CCu′GCCCAAGCGGAACAGCGACAAGCu′GAu′CGCC | |
| | | CGGAAGAAGGACu′GGGACCCCAAGAAGu′ACGGCGGC | |
| | | u′u′CGACAGCCCCACCGu′GGCCu′ACAGCGu′GCu′GGu′ | |
| | | GGu′GGCCAAGGu′GGAGAAGGGCAAGAGCAAGAAGCu | |
| | | ′CAAGAGCGu′GAAGGAGCu′GCu′GGGCAu′CACCAu′CA | |
| | | u′GGAGCGGAGCAGCu′u′CGAGAAGAACCCCAu′CGACu′ | |
| | | u′CCu′GGAGGCCAAGGGCu′ACAAGGAGGu′GAAGAAG | |
| | | GACCu′GAu′CAu′CAAGCu′GCCCAAGu′ACAGCCu′Gu′u′ | |
| | | CGAGCu′GGAGAACGGCCGGAAGCGGAu′GCu′GGCCAG | |
| | | CGCCGGCGAGCu′GCAGAAGGGCAACGAGCu′GGCCCu′ | |
| | | GCCCAGCAAGu′ACGu′GAACu′u′CCu′Gu′ACCu′GGCCA | |
| | | GCCACu′ACGAGAAGCu′GAAGGGCAGCCCCGAGGACA | |
| | | ACGAGCAGAAGCAGCu′Gu′u′CGu′GGAGCAGCACAAGC | |
| | | ACu′ACCu′GGACGAGAu′CAu′CGAGCAGAu′CAGCGAGu | |
| | | ′u′CAGCAAGCGGGu′GAu′CCu′GGCCGACGCCAACCu′G | |
| | | GACAAGGu′GCu′GAGCGCCu′ACAACAAGCACCGGGAC | |
| | | AAGCCCAu′CCGGGAGCAGGCCGAGAACAu′CAu′CCAC | |
| | | Cu′Gu′u′CACCCu′GACCAACCu′GGGCGCCCCCGCCGCCu | |
| | Protein | ′u′CAAGu′ACu′u′CGACACCACCAu′CGACCGGAAGCGGu | |
| | | ′ACACCAGCACCAAGGAGGu′GCu′GGACGCCACCCu′GA | |
| | | u′CCACCAGAGCAu′CACCGGCCu′Gu′ACGAGACACGGA | |
| | | u′CGACCu′GAGCCAGCu′GGGCGGCGAC | |
| | | DKKYSIGLAIGTNSVGWAVITDEYKVPSKKFKVLGNTDR | |
| | | HSIKKNLIGALLFDSGETAEATRLKRTARRRYTRRKNRIC | |
| | | YLQEIFSNEMAKVDDSFFHRLEESFLVEEDKKHERHPIFG | |
| | | NIVDEVAYHEKYPTIYHLRKKLVDSTDKADLRLIYLALA | |
| | | HMIKFRGHFLIEGDLNPDNSDVDKLFIQLVQTYNQLFEEN | |
| | | PINASGVDAKAILSARLSKSRRLENLIAQLPGEKKNGLFG | |
| | | NLIALSLGLTPNFKSNFDLAEDAKLQLSKDTYDDDLDNL | |
| | | LAQIGDQYADLFLAAKNLSDAILLSDILRVNTEITKAPLSA | |
| | | SMIKRYDEHHQDLTLLKALVRQQLPEKYKEIFFDQSKNG | |
| | | YAGYIDGGASQEEFYKFIKPILEKMDGTEELLVKLNREDL | |
| | | LRKQRTFDNGSIPHQIHLGELHAILRRQEDFYPFLKDNRE | |
| | | KIEKILTFRIPYYVGPLARGNSRFAWMTRKSEETITPWNFE | |
| | | EVVDKGASAQSFIERMTNFDKNLPNEKVLPKHSLLYEYF | |
| | | TVYNELTKVKYVTEGMRKPAFLSGEQKKAIVDLLFKTNR | |
| | | KVTVKQLKEDYFKKIECFDSVEISGVEDRFNASLGTYHDL | |
| | | LKIIKDKDFLDNEENEDILEDIVLTLTLFEDREMIEERLKT | |
| | | YAHLFDDKVMKQLKRRRYTGWGRLSRKLINGIRDKQSG | |
| | | KTILDFLKSDGFANANFMQLIHDDSLTFKEDIQKAQVSGQ | |
| | | GDSLHEHIANLAGSPAIKKGILQTVKVVDELVKVMGRHK | |
| | | PENIVIEMARENQTTQKGQKNSRERMKRIEEGIKELGSQI | |
| | | LKEHPVENTQLQNEKLYLYYLQNGRDMYVDQELDINRL | |
| | | SDYDVDHIVPQSFLKDDSIDNKVLTRSDKNRGKSDNVPS | |
| | | EEVVKKMKNYWRQLLNAKLITQRKFDNLTKAERGGLSE | |
| | | LDKAGFIKRQLVETRQITKHVAQILDSRMNTKYDENDKLI | |
| | | REVKVITLKSKLVSDFRKDFQFYKVREINNYHHAHDAYL | |
| | | NAVVGTALIKKYPKLESEFVYGDYKVYDVRKMIAKSEQ | |
| | | EIGKATAKYFFYSNIMNFFKTEITLANGEIRKRPLIETNGE | |
| | | TGEIVWDKGRDFATVRKVLSMPQVNIVKKTEVQTGGFS | |
| | | KESILPKRNSDKLIARKKDWDPKKYGGFDSPTVAYSVLV | |
| | | VAKVEKGKSKKLKSVKELLGITIMERSSFEKNPIDFLEAK | |
| | | GYKEVKKDLIIKLPKYSLFELENGRKRMLASAGELQKGN | |
| | | ELALPSKYVNFLYLASHYEKLKGSPEDNEQKQLFVEQHK | |
| | | HYLDEIIEQISEFSKRVILADANLDKVLSAYNKHRDKPIRE | |
| | | QAENIIHLFTLTNLGAPAAFKYFDTTIDRKRYTSTKEVLD | |
| | | ATLIHQSITGLYETRIDLSQLGGD | |
| Linker | mRNA | GAGGGCGCCGAC | 2143 |
| between | Protein | EGAD | 2144 |
| Cas9 | | | |
| nickase | | | |
| and NLS | | | |
| Nuclear | mRNA | AAGCGGACCGCCGACGGCAGCGAGu′u′CGAGAGCCCC | 2145 |
| localization | | AAGAAGAAGCGGAAGGu′Gu′GA | |
| sequence | Protein | KRTADGSEFESPKKKRKV | 2146 |
| (NLS) | | | |
| 3′ UTR | mRNA | GCGGCCGCu′u′AAu′u′AAGCu′GCCu′u′Cu′GCGGGGCu′u′ | 2147 |
| | | GCCu′u′Cu′GGCCAu′GCCCu′u′Cu′u′Cu′Cu′CCCu′u′GCAC | |
| | | Cu′Gu′ACCu′Cu′u′GGu′Cu′u′u′GAAu′AAAGCCu′GAGu′A | |
| | | GGAAGu′Cu′AGA | |

MA019 mRNA and protein sequence

| | | | SEQ ID |
|---|---|---|---|
| Region | Sequence | | NO |
| Full | mRNA | AGGAAAu′AAGAGAGAAAAGAAGAGu′AAGAAGAAAu′ | 2161 |
| sequence | | Au′AAGAGCCACCAu′Gu′CCGAAGu′CGAAu′u′CAGCCA | |
| | | CGAGu′ACu′GGAu′GAGACAu′GCACu′GACCCu′CGCGA | |
| | | AGAGAGCu′CGGGAu′GAGAGGGAAGu′GCCAGu′GGGA | |
| | | GCu′Gu′GCu′GGu′GCu′CAACAACAGGGu′CAu′u′GGGGA | |
| | | AGGAu′GGAACAGGGCCAu′u′GGACu′u′CACGAu′CCGA | |
| | | CGGCu′CAu′GCGGAAAu′CAu′GGCACu′GAGACAGGGC | |
| | | GGu′Cu′u′Gu′GAu′GCAGAACu′ Au′CGCCu′GAu′u′GAu′G | |
| | | CCACu′Cu′Gu′ACGu′GACCu′u′CGAACCu′u′GCGu′GAu′G | |
| | | u′GCGCCGGu′GCCAu′GAu′CCACu′CACGCAu′CGGu′CG | |
| | | GGu′GGu′Gu′u′CGGCGu′GCGAAACGCu′AAGACu′GGAG | |
| | | CCGCCGGAu′CACu′GAu′GGAu′Gu′GCu′CCAu′CACCCCG | |
| | | GGAu′GAACCACAGGGu′GGAGAu′CACCGAAGGCAu′u′ | |
| | | Cu′GGCCGACGAAu′GCGCAGCCCu′Gu′u′Gu′Gu′CGCu′u′ | |
| | | Cu′u′CCGGAu′GCCu′CGAAGAGu′Gu′u′CAACGCGCAGA | |
| | | AGAAGGCGCAGAGCu′CCACu′GACu′Cu′GGAGGu′u′CCu | |
| | | ′CGGGCGGAu′CGu′CAGGGu′CCGAAACu′CCu′GGAACC | |
| | | u′CGGAGu′CAGCAACu′CCGGAAu′CCu′CAGGAGGCu′CC | |
| | | AGCGGAGGCu′CCGAu′AAGAAGu′ACAGCAu′CGGGCu′u | |
| | | ′GCCAu′CGGAACCAACu′CGGu′CGGCu′GGGCu′Gu′GAu′ | |
| | | CACu′GACGAGu′ACAAGGu′CCCu′u′CCAAAAAGu′u′CA | |
| | | AAGu′GCu′CGGCAACACu′GAu′CGGCACu′CGAu′u′AAG | |
| | | AAGAACCu′GAu′CGGu′GCACu′GCu′Gu′u′CGACu′Cu′GG | |
| | | GGAGACu′GCGGAAGCAACu′CGCCu′GAAGAGGACu′GC | |
| | | GCGCAGACGGu′ACACCAGGCGCAAGAACCGGAu′Cu′G | |
| | | Cu′ACu′u′GCAAGAGAu′u′u′u′CAGCAACGAGAu′GGCCA | |
| | | AGGu′CGACGACu′CGu′u′u′u′u′CCACCGGCu′CGAGGAA | |
| | | AGCu′u′CCu′GGu′GGAGGAAGAu′AAGAAGCAu′GAGCG | |
| | | CCAu′CCCAu′Cu′u′CGGAAACAu′CGu′GGACGAAGu′GG | |
| | | CCu′ACCAu′GAGAAGu′ACCCGACCAu′Cu′ACCAu′Cu′GC | |
| | | GCAAGAAGCu′CGu′GGACAGCACu′GACAAAGCCGACu′ | |
| | | u′GCGCCu′GAu′Cu′ACCu′u′GCCCu′GGCCCACAu′GAu′C | |
| | | AAGu′u′CAGAGGGCACu′u′CCu′GAu′CGAGGGCGACCu′ | |
| | | GAACCCGGACAAu′u′CCGACGu′GGAu′AAGCu′Gu′u′CA | |
| | | u′CCAACu′GGu′ACAAACu′u′ACAACCAGCu′Gu′u′u′GAG | |
| | | GAGAACCCGAu′CAACGCu′u′CCGGCGu′GGACGCGAAG | |
| | | GCCAu′u′Cu′GAGCGCACGGCu′Gu′CCAAGu′CCCGGAGA | |
| | | u′u′AGAAAACCu′GAu′u′GCCCAACu′GCCu′GGAGAAAA | |
| | | GAAGAAu′GGCCu′Gu′u′CGGAAACCu′GAu′CGCCCu′Cu′ | |
| | | CGCu′CGGu′Cu′GACCCCCAACu′u′u′AAGAGCAACu′u′C | |
| | | GACCu′GGCu′GAGGACGCGAAGCu′CCAGCu′Gu′CCAAG | |
| | | GACACCu′ACGAu′GAu′GACCu′CGAu′AAu′Cu′CCu′CGC | |
| | | CCAAAu′CGGCGACCAAu′Au′GCGGACCu′Gu′u′u′Cu′GG | |
| | | CCGCCAAGAAu′Cu′Gu′CCGACGCCAu′CCu′CCu′GAGCG | |
| | | Au′Au′CCu′GCGCGu′GAACACu′GAAAu′CACCAAGGCCC | |
| | | CACu′GAGCGCu′AGCAu′GAu′u′AAGCGCu′ACGACGAA | |
| | | CACCAu′CAGGACCu′CACCCu′GCu′GAAGGCu′Cu′u′Gu′ | |
| | | GCGGCAGCAGCu′CCCAGAGAAGu′ACAAGGAGAu′Cu′u | |
| | | ′Cu′u′CGACCAAu′CGAAGAAu′GGu′u′ACGCCGGCu′ACA | |
| | | u′u′GACGGAGGAGCGu′CACAGGAGGAGu′u′Cu′ACAAG | |
| | | u′u′CAu′u′AAGCCAAu′CCu′GGAGAAGAu′GGACGGAAC | |
| | | CGAGGAACu′GCu′CGu′GAAGCu′GAACAGAGAAGAu′Cu | |
| | | ′ACu′GCGCAAGCAGCGCACu′u′u′CGACAACGGAu′CGA | |
| | | u′CCCACAu′CAGAu′u′CACCu′GGGAGAGCu′GCACGCGA | |
| | | u′CCu′GCGGAGACAGGAAGAu′u′u′Cu′ACCCGu′u′CCu′G | |
| | | AAGGACAACCGCGAGAAGAu′CGAAAAGAu′CCu′GACC | |
| | | u′u′CCGCAu′u′CCGu′ACu′ACGu′GGGACCCCu′CGCAAG | |
| | | AGGAAACu′CGCGGu′u′CGCCu′GGAu′GACCAGGAAGu′ | |
| | | CGGAAGAAACCAu′u′ACu′CCGu′GGAACu′u′CGAGGAA | |
| | | Gu′GGu′GGACAAGGGCGCCu′CAGCGCAAu′CCu′u′CAu′ | |
| | | CGAACGGAu′GACCAACu′u′CGACAAGAACu′u′GCCu′A | |
| | | ACGAGAAAGu′GCu′u′CCu′AAGCAu′u′CCCu′CCu′u′u′AC | |
| | | GAAu′ACu′u′CACu′Gu′Gu′ACAACGAGCu′u′ACCAAGGu′ | |
| | | CAAAu′Au′Gu′GACCGAGGGCAu′GCGCAAGCCGGCCu′u | |
| | | ′u′Cu′u′u′CCGGGGAGCAAAAGAAGGCCAu′CGu′GGACC | |
| | | u′Gu′u′Gu′u′CAAGACCAACCGGAAGGu′CACCGu′CAAG | |
| | | CAGCu′GAAGGAGGACu′ACu′u′u′AAGAAAAu′CGAGu′G | |
| | | Cu′u′u′GAu′u′CCGu′CGAAAu′Cu′CCGGAGu′GGAAGAu′A | |
| | | GAu′u′CAACGCCAGCCu′AGGCACCu′ACCACGAu′Cu′GC | |
| | | u′CAAGAu′CAu′u′AAGGAu′AAGGAu′u′u′CCu′GGACAAC | |
| | | GAGGAGAACGAGGAu′Au′CCu′GGAGGACAu′u′Gu′GCu′ | |
| | | GACCCu′GACACu′Gu′u′CGAAGAu′CGCGAAAu′GAu′CG | |
| | | AGGAGCGGCu′GAAAACAu′ACGCCCACCu′Gu′u′CGACG | |
| | | ACAAGGu′CAu′GAAGCAGCu′CAAGCGGAGGAGGu′AC | |
| | | ACGGGAu′GGGGAAGGCu′Gu′CCCGGAAGCu′GAu′CAA | |
| | | CGGGAu′u′AGAGACAAGCAGu′CCGGAAAGACCAu′u′Cu | |
| | | ′GGACu′u′CCu′CAAGu′CGGACGGCu′u′CGCGAACCGGA | |
| | | ACu′u′CAu′GCAACu′GAu′CCACGACGACu′CCCu′GACGu | |
| | | ′u′CAAGGAGGACAu′u′CAGAAGGCCCAAGu′Gu′CCGGA | |
| | | CAGGGAGAu′u′CACu′GCACGAACACAu′CGCCAAu′Cu′ | |
| | | GGCu′GGAAGu′CCGGCCAu′CAAGAAAGGCAu′CCu′GCA | |
| | | AACCGu′GAAGGu′CGu′GGACGAGCu′CGu′GAAGGu′CA | |
| | | u′GGGCCGCCACAAGCCu′GAGAACAu′CGu′GAu′CGAAA | |
| | | u′GGCCCGGGAGAACCAGACCACGCAGAAAGGGCAGA | |
| | | AGAACAGCCGCGAGAGGAu′GAAGAGAAu′CGAGGAAG | |
| | | GAAu′CAAGGAACu′u′GGAAGCCAGAu′CCu′GAAGGAA | |
| | | CACCCCGu′GGAAAACACu′CAGCu′u′CAAAACGAAAAG | |
| | | Cu′Gu′ACCu′Cu′ACu′Au′Cu′GCAAAACGGACGGGAu′Au′ | |
| | | Gu′ACGu′GGACCAGGAAu′u′GGACAu′CAAu′CGCCu′Gu′ | |
| | | CCGACu′ACGAu′Gu′GGAu′CACAu′u′Gu′GCCGCAGAGCu | |
| | | ′u′u′Cu′GAAGGACGAu′u′CAAu′u′GAu′AACAAGGu′GCu′ | |
| | | CACCCGGu′CCGACAAGAACCGGGGCAAAAGCGAu′AA | |
| | | CGu′GCCGAGCGAAGAGGu′GGu′CAAGAAGAu′GAAGA | |
| | | Au′u′ACu′GGCGGCAGCu′Cu′u′GAACGCCAAACu′GAu′C | |
| | | ACCCAGCGGAAGu′u′CGACAACCu′GACCAAGGCCGAA | |
| | | AGGGGCGGu′Cu′u′u′CCGAACu′GGACAAGGCCGGGu′u′ | |
| | | u′Au′CAAGCGCCAACu′GGu′GGAAACCCGGCAGAu′CAC | |
| | | u′AAGCACGu′GGCCCAGAu′ACu′GGACu′Cu′AGGAu′GA | |
| | | Au′ACCAAAu′ACGACGAGAACGACAAGCu′GAu′u′CGC | |
| | | GAAGu′CAAAGu′CAu′u′ACCCu′GAAAu′CCAAGCu′CGu′ | |
| | | Gu′CCGACu′u′CCGGAAGGACu′u′CCAGu′u′Cu′Au′AAGG | |
| | | u′u′CGCGAAAu′CAACAACu′ACCACCACGCCCAu′GACG | |
| | | CGu′ACCu′GAACGCCGu′CGu′GGGu′ACCGCCCu′GAu′u′ | |
| | | AAGAAGu′ACCCu′AAGCu′CGAGu′CCGAGu′u′CGu′Cu′A | |
| | | CGGAGACu′ACAAAGu′Gu′ACGACGu′GCGGAAGAu′GAu | |
| | | ′CGCCAAGu′CCGAGCAGGAAAu′AGGGAAGGCCACCGC | |
| | | CAAGu′ACu′u′Cu′u′Cu′ACu′CCAACAu′CAu′GAACu′u′Cu′ | |
| | | u′CAAGACCGAGAu′CACCCu′u′GCCAACGGGGAGAu′u′ | |
| | | CGGAAGCGCCCGu′u′GAu′u′GAGACu′AACGGAGAAAC | |
| | | CGGCGAAAu′u′Gu′Gu′GGGAu′AAGGGCAGAGACu′u′u′G | |
| | | CGACu′Gu′GCGCAAAGu′Cu′u′Gu′CAAu′GCCCCAAGu′C | |
| | | AACAu′u′Gu′CAAAAAGACCGAAGu′GCAAACCGGCGGC | |
| | | u′u′CAGCAAGGAAAGCAu′CCu′GCCCAAGCGCAAu′u′CC | |
| | | GACAAGCu′CAu′CGCCCGGAAGAAGGACu′GGGACCCC | |
| | | AAGAAAu′Au′GGAGGCu′u′CGACu′CCCCCACu′Gu′GGC | |
| | | Cu′ACu′CCGu′CCu′GGu′GGu′CGCGAAAGu′GGAAAAGG | |
| | | GAAAGu′CGAAGAAGCu′CAAGu′CCGu′GAAGGAGCu′C | |
| | | Cu′GGGGAu′CACCAu′u′Au′GGAACGGu′CCAGCu′u′CGA | |
| | | GAAGAACCCGAu′u′GACu′u′CCu′GGAAGCCAAGGGu′u′ | |
| | | ACAAGGAGGu′CAAGAAGGAu′Cu′GAu′u′Au′u′AAGCu′G | |
| | | CCGAAGu′Au′u′CCCu′Cu′u′CGAACu′CGAAAAu′GGCCG | |
| | | CAAGCGAAu′Gu′u′GGCAu′CGGCGGGAGAGCu′CCAGA | |
| | | AGGGAAACGAACu′GGCCu′u′GCCu′u′CCAAAu′ACGu′G | |
| | | AACu′u′u′Cu′Gu′ACCu′GGCCAGCCACu′ACGAGAAGCu′ | |
| | | GAAGGGu′u′CCCCCGAGGACAACGAGCAGAAGCAGCu′ | |
| | | Gu′u′CGu′GGAGCAGCACAAGCACu′ACCu′GGAu′GAGAu | |
| | | ′CAu′CGAACAGAu′Cu′CGGAAu′u′Cu′CCAAGAGAGu′GA | |
| | | u′CCu′GGCCGACGCGAACCu′GGAu′AAGGu′CCu′Gu′CC | |
| | | GCGu′ACAACAAGCACCGGGACAAGCCCAu′CCGGGAG | |
| | | CAGGCu′GAGAACAu′u′Au′CCACCu′Gu′u′CACCCu′CACu | |
| | | ′AACCu′u′GGAGCGCCu′GCCGCAu′u′CAAGu′ACu′u′CGA | |
| | | CACAACCAu′CGACAGAAAGCGCu′ACACu′u′CCACCAA | |
| | | GGAGGu′GCu′GGACGCCACCCu′GAu′CCACCAGu′CCAu′ | |
| | | CACu′GGGCu′Cu′Au′GAGACu′CGCAu′u′GACCu′Gu′CCC | |
| | | AGu′u′GGGAGGGGACGAAGGAGCCGAu′AAGAGAACC | |
| | | GCCGAu′GGGu′CCGAAu′u′CGAGu′CGCCCAAGAAGAA | |
| | | GCGGAAAGu′Gu′AAGCGGCCGCu′u′AAu′u′AAGCu′GCC | |
| | | u′u′Cu′GCGGGGCu′u′GCCu′u′Cu′GGCCAu′GCCCu′u′Cu′u | |
| | | ′Cu′Cu′CCCu′u′GCACCu′Gu′ACCu′Cu′u′GGu′Cu′u′u′GAA | |
| | | u′AAAGCCu′GAGu′AGGAAGu′Cu′AGA | |
| | Protein | MSEVEFSHEYWMRHALTLAKRARDEREVPVGAVLVLNN | 2137 |
| | | RVIGEGWNRAIGLHDPTAHAEIMALRQGGLVMQNYRLID | |
| | | ATLYVTFEPCVMCAGAMIHSRIGRVVFGVRNAKTGAAG | |
| | | SLMDVLHHPGMNHRVEITEGILADECAALLCRFFRMPRR | |
| | | VFNAQKKAQSSTDSGGSSGGSSGSETPGTSESATPESSGG | |
| | | SSGGSDKKYSIGLAIGTNSVGWAVITDEYKVPSKKFKVL | |
| | | GNTDRHSIKKNLIGALLFDSGETAEATRLKRTARRRYTRR | |
| | | KNRICYLQEIFSNEMAKVDDSFFHRLEESFLVEEDKKHER | |
| | | HPIFGNIVDEVAYHEKYPTIYHLRKKLVDSTDKADLRLIY | |
| | | LALAHMIKFRGHFLIEGDLNPDNSDVDKLFIQLVQTYNQL | |
| | | FEENPINASGVDAKAILSARLSKSRRLENLIAQLPGEKKN | |
| | | GLFGNLIALSLGLTPNFKSNFDLAEDAKLQLSKDTYDDDL | |
| | | DNLLAQIGDQYADLFLAAKNLSDAILLSDILRVNTEITKA | |
| | | PLSASMIKRYDEHHQDLTLLKALVRQQLPEKYKEIFFDQS | |
| | | KNGYAGYIDGGASQEEFYKFIKPILEKMDGTEELLVKLN | |
| | | REDLLRKQRTFDNGSIPHQIHLGELHAILRRQEDFYPFLK | |
| | | DNREKIEKILTFRIPYYVGPLARGNSRFAWMTRKSEETITP | |
| | | WNFEEVVDKGASAQSFIERMTNFDKNLPNEKVLPKHSLL | |
| | | YEYFTVYNELTKVKYVTEGMRKPAFLSGEQKKAIVDLLF | |
| | | KTNRKVTVKQLKEDYFKKIECFDSVEISGVEDRFNASLGT | |
| | | YHDLLKIIKDKDFLDNEENEDILEDIVLTLTLFEDREMIEE | |
| | | RLKTYAHLFDDKVMKQLKRRRYTGWGRLSRKLINGIRD | |
| | | KQSGKTILDFLKSDGFANRNFMQLIHDDSLTFKEDIQKAQ | |
| | | VSGQGDSLHEHIANLAGSPAIKKGILQTVKVVDELVKVM | |
| | | GRHKPENIVIEMARENQTTQKGQKNSRERMKRIEEGIKEL | |
| | | GSQILKEHPVENTQLQNEKLYLYYLQNGRDMYVDQELDI | |
| | | NRLSDYDVDHIVPQSFLKDDSIDNKVLTRSDKNRGKSDN | |
| | | VPSEEVVKKMKNYWRQLLNAKLITQRKFDNLTKAERGG | |
| | | LSELDKAGFIKRQLVETRQITKHVAQILDSRMNTKYDEN | |
| | | DKLIREVKVITLKSKLVSDFRKDFQFYKVREINNYHHAH | |
| | | DAYLNAVVGTALIKKYPKLESEFVYGDYKVYDVRKMIA | |
| | | KSEQEIGKATAKYFFYSNIMNFFKTEITLANGEIRKRPLIE | |
| | | TNGETGEIVWDKGRDFATVRKVLSMPQVNIVKKTEVQT | |
| | | GGFSKESILPKRNSDKLIARKKDWDPKKYGGFDSPTVAY | |
| | | SVLVVAKVEKGKSKKLKSVKELLGITIMERSSFEKNPIDF | |
| | | LEAKGYKEVKKDLIIKLPKYSLFELENGRKRMLASAGEL | |
| | | QKGNELALPSKYVNFLYLASHYEKLKGSPEDNEQKQLFV | |
| | | EQHKHYLDEIIEQISEFSKRVILADANLDKVLSAYNKHRD | |
| | | KPIREQAENIIHLFTLTNLGAPAAFKYFDTTIDRKRYTSTK | |
| | | EVLDATLIHQSITGLYETRIDLSQLGGDEGADKRTADGSE | |
| | | FESPKKKRKV | |
| 5′ UTR | mRNA | AGGAAAu′AAGAGAGAAAAGAAGAGu′AAGAAGAAAu′ | 2138 |
| | | Au′AAGAGCCACC | |
| TadA | mRNA | Au′Gu′CCGAAGu′CGAAu′u′CAGCCACGAGu′ACu′GGAu′ | 2162 |
| | | GAGACAu′GCACu′GACCCu′CGCGAAGAGAGCu′CGGGA | |
| | | u′GAGAGGGAAGu′GCCAGu′GGGAGCu′Gu′GCu′GGu′GC | |
| | | u′CAACAACAGGGu′CAu′u′GGGGAAGGAu′GGAACAGG | |
| | | GCCAu′u′GGACu′u′CACGAu′CCGACGGCu′CAu′GCGGA | |
| | | AAu′CAu′GGCACu′GAGACAGGGCGGu′Cu′u′Gu′GAu′GC | |
| | | AGAACu′Au′CGCCu′GAu′u′GAu′GCCACu′Cu′Gu′ACGu′G | |
| | | ACCu′u′CGAACCu′u′GCGu′GAu′Gu′GCGCCGGu′GCCAu′ | |
| | | GAu′CCACu′CACGCAu′CGGu′CGGGu′GGu′Gu′u′CGGCG | |
| | | u′GCGAAACGCu′AAGACu′GGAGCCGCCGGAu′CACu′GA | |
| | | u′GGAu′Gu′GCu′CCAu′CACCCCGGGAu′GAACCACAGG | |
| | | Gu′GGAGAu′CACCGAAGGCAu′u′Cu′GGCCGACGAAu′G | |
| | | CGCAGCCCu′Gu′u′Gu′Gu′CGCu′u′Cu′u′CCGGAu′GCCu′C | |
| | | GAAGAGu′Gu′u′CAACGCGCAGAAGAAGGCGCAGAGCu | |
| | | ′CCACu′GAC | |
| | Protein | MSEVEFSHEYWMRHALTLAKRARDEREVPVGAVLVLNN | 2140 |
| | | RVIGEGWNRAIGLHDPTAHAEIMALRQGGLVMQNYRLID | |
| | | ATLYVTFEPCVMCAGAMIHSRIGRVVFGVRNAKTGAAG | |
| | | SLMDVLHHPGMNHRVEITEGILADECAALLCRFFRMPRR | |
| | | VFNAQKKAQSSTD | |
| N- | mRNA | u′Cu′GGAGGu′u′CCu′CGGGCGGAu′CGu′CAGGGu′CCGA | 2163 |
| terminal | | AACu′CCu′GGAACCu′CGGAGu′CAGCAACu′CCGGAAu′C | |
| linker | | Cu′CAGGAGGCu′CCAGCGGAGGCu′CC | |
| | Protein | SGGSSGGSSGSETPGTSESATPESSGGSSGGS | 20 |
| Cas9 | mRNA | GAu′AAGAAGu′ACAGCAu′CGGGCu′u′GCCAu′CGGAAC | 2164 |
| nickase | | CAACu′CGGu′CGGCu′GGGCu′Gu′GAu′CACu′GACGAGu′ | |
| | | ACAAGGu′CCCu′u′CCAAAAAGu′u′CAAAGu′GCu′CGGC | |
| | | AACACu′GAu′CGGCACu′CGAu′u′AAGAAGAACCu′GAu′ | |
| | | CGGu′GCACu′GCu′Gu′u′CGACu′Cu′GGGGAGACu′GCGG | |
| | | AAGCAACu′CGCCu′GAAGAGGACu′GCGCGCAGACGGu′ | |
| | | ACACCAGGCGCAAGAACCGGAu′Cu′GCu′ACu′u′GCAAG | |
| | | AGAu′u′u′u′CAGCAACGAGAu′GGCCAAGGu′CGACGACu | |
| | | ′CGu′u′u′u′u′CCACCGGCu′CGAGGAAAGCu′u′CCu′GGu′ | |
| | | GGAGGAAGAu′AAGAAGCAu′GAGCGCCAu′CCCAu′Cu′u | |
| | | ′CGGAAACAu′CGu′GGACGAAGu′GGCCu′ACCAu′GAGA | |
| | | AGu′ACCCGACCAu′Cu′ACCAu′Cu′GCGCAAGAAGCu′CG | |
| | | u′GGACAGCACu′GACAAAGCCGACu′u′GCGCCu′GAu′Cu | |
| | | ′ACCu′u′GCCCu′GGCCCACAu′GAu′CAAGu′u′CAGAGGG | |
| | | CACu′u′CCu′GAu′CGAGGGCGACCu′GAACCCGGACAAu′ | |
| | | u′CCGACGu′GGAu′AAGCu′Gu′u′CAu′CCAACu′GGu′ACA | |
| | | AACu′u′ACAACCAGCu′Gu′u′u′GAGGAGAACCCGAu′CA | |
| | | ACGCu′u′CCGGCGu′GGACGCGAAGGCCAu′u′Cu′GAGC | |
| | | GCACGGCu′Gu′CCAAGu′CCCGGAGAu′u′AGAAAACCu′ | |
| | | GAu′u′GCCCAACu′GCCu′GGAGAAAAGAAGAAu′GGCCu | |
| | | ′Gu′u′CGGAAACCu′GAu′CGCCCu′Cu′CGCu′CGGu′Cu′GA | |
| | | CCCCCAACu′u′u′AAGAGCAACu′u′CGACCu′GGCu′GAG | |
| | | GACGCGAAGCu′CCAGCu′Gu′CCAAGGACACCu′ACGAu′ | |
| | | GAu′GACCu′CGAu′AAu′Cu′CCu′CGCCCAAAu′CGGCGA | |
| | | CCAAu′Au′GCGGACCu′Gu′u′u′Cu′GGCCGCCAAGAAu′C | |
| | | u′Gu′CCGACGCCAu′CCu′CCu′GAGCGAu′Au′CCu′GCGC | |
| | | Gu′GAACACu′GAAAu′CACCAAGGCCCCACu′GAGCGCu′ | |
| | | AGCAu′GAu′u′AAGCGCu′ACGACGAACACCAu′CAGGAC | |
| | | Cu′CACCCu′GCu′GAAGGCu′Cu′u′Gu′GCGGCAGCAGCu′ | |
| | | CCCAGAGAAGu′ACAAGGAGAu′Cu′u′Cu′u′CGACCAAu′ | |
| | | CGAAGAAu′GGu′u′ACGCCGGCu′ACAu′u′GACGGAGGA | |
| | | GCGu′CACAGGAGGAGu′u′Cu′ACAAGu′u′CAu′u′AAGCC | |
| | | AAu′CCu′GGAGAAGAu′GGACGGAACCGAGGAACu′GCu | |
| | | ′CGu′GAAGCu′GAACAGAGAAGAu′Cu′ACu′GCGCAAGC | |
| | | AGCGCACu′u′u′CGACAACGGAu′CGAu′CCCACAu′CAGA | |
| | | u′u′CACCu′GGGAGAGCu′GCACGCGAu′CCu′GCGGAGA | |
| | | CAGGAAGAu′u′u′Cu′ACCCGu′u′CCu′GAAGGACAACCG | |
| | | CGAGAAGAu′CGAAAAGAu′CCu′GACCu′u′CCGCAu′u′C | |
| | | CGu′ACu′ACGu′GGGACCCCu′CGCAAGAGGAAACu′CGC | |
| | | GGu′u′CGCCu′GGAu′GACCAGGAAGu′CGGAAGAAACC | |
| | | Au′u′ACu′CCGu′GGAACu′u′CGAGGAAGu′GGu′GGACAA | |
| | | GGGCGCCu′CAGCGCAAu′CCu′u′CAu′CGAACGGAu′GAC | |
| | | CAACu′u′CGACAAGAACu′u′GCCu′AACGAGAAAGu′GCu | |
| | | ′u′CCu′AAGCAu′u′CCCu′CCu′u′u′ACGAAu′ACu′u′CACu′ | |
| | | Gu′Gu′ACAACGAGCu′u′ACCAAGGu′CAAAu′ Au′Gu′GAC | |
| | | CGAGGGCAu′GCGCAAGCCGGCCu′u′u′Cu′u′u′CCGGGG | |
| | | AGCAAAAGAAGGCCAu′CGu′GGACCu′Gu′u′Gu′u′CAAG | |
| | | ACCAACCGGAAGGu′CACCGu′CAAGCAGCu′GAAGGAG | |
| | | GACu′ACu′u′u′AAGAAAAu′CGAGu′GCu′u′u′GAu′u′CCGu | |
| | | ′CGAAAu′Cu′CCGGAGu′GGAAGAu′AGAu′u′CAACGCCA | |
| | | GCCu′AGGCACCu′ACCACGAu′Cu′GCu′CAAGAu′CAu′u′ | |
| | | AAGGAu′AAGGAu′u′u′CCu′GGACAACGAGGAGAACGA | |
| | | GGAu′Au′CCu′GGAGGACAu′u′Gu′GCu′GACCCu′GACAC | |
| | | u′Gu′u′CGAAGAu′CGCGAAAu′GAu′CGAGGAGCGGCu′G | |
| | | AAAACAu′ACGCCCACCu′Gu′u′CGACGACAAGGu′CAu′ | |
| | | GAAGCAGCu′CAAGCGGAGGAGGu′ACACGGGAu′GGGG | |
| | | AAGGCu′Gu′CCCGGAAGCu′GAu′CAACGGGAu′u′AGAG | |
| | | ACAAGCAGu′CCGGAAAGACCAu′u′Cu′GGACu′u′CCu′C | |
| | | AAGu′CGGACGGCu′u′CGCGAACCGGAACu′u′CAu′GCA | |
| | | ACu′GAu′CCACGACGACu′CCCu′GACGu′u′CAAGGAGG | |
| | | ACAu′u′CAGAAGGCCCAAGu′Gu′CCGGACAGGGAGAu′u | |
| | | ′CACu′GCACGAACACAu′CGCCAAu′Cu′GGCu′GGAAGu′ | |
| | | CCGGCCAu′CAAGAAAGGCAu′CCu′GCAAACCGu′GAAG | |
| | | Gu′CGu′GGACGAGCu′CGu′GAAGGu′CAu′GGGCCGCCA | |
| | | CAAGCCu′GAGAACAu′CGu′GAu′CGAAAu′GGCCCGGG | |
| | | AGAACCAGACCACGCAGAAAGGGCAGAAGAACAGCC | |
| | | GCGAGAGGAu′GAAGAGAAu′CGAGGAAGGAAu′CAAG | |
| | | GAACu′u′GGAAGCCAGAu′CCu′GAAGGAACACCCCGu′G | |
| | | GAAAACACu′CAGCu′u′CAAAACGAAAAGCu′Gu′ACCu′ | |
| | | Cu′ACu′Au′Cu′GCAAAACGGACGGGAu′Au′Gu′ACGu′GG | |
| | | ACCAGGAAu′u′GGACAu′CAAu′CGCCu′Gu′CCGACu′AC | |
| | | GAu′Gu′GGAu′CACAu′u′Gu′GCCGCAGAGCu′u′u′Cu′GAA | |
| | | GGACGAu′u′CAAu′u′GAu′AACAAGGu′GCu′CACCCGGu′ | |
| | | CCGACAAGAACCGGGGCAAAAGCGAu′AACGu′GCCGA | |
| | | GCGAAGAGGu′GGu′CAAGAAGAu′GAAGAAu′u′ACu′GG | |
| | | CGGCAGCu′Cu′u′GAACGCCAAACu′GAu′CACCCAGCGG | |
| | | AAGu′u′CGACAACCu′GACCAAGGCCGAAAGGGGCGGu′ | |
| | | Cu′u′u′CCGAACu′GGACAAGGCCGGGu′u′u′Au′CAAGCG | |
| | | CCAACu′GGu′GGAAACCCGGCAGAu′CACu′AAGCACGu′ | |
| | | GGCCCAGAu′ACu′GGACu′Cu′AGGAu′GAAu′ACCAAAu′ | |
| | | ACGACGAGAACGACAAGCu′GAu′u′CGCGAAGu′CAAAG | |
| | | u′CAu′u′ACCCu′GAAAu′CCAAGCu′CGu′Gu′CCGACu′u′C | |
| | | CGGAAGGACu′u′CCAGu′u′Cu′Au′AAGGu′u′CGCGAAAu′ | |
| | | CAACAACu′ACCACCACGCCCAu′GACGCGu′ACCu′GAA | |
| | | CGCCGu′CGu′GGGu′ACCGCCCu′GAu′u′AAGAAGu′ACC | |
| | | Cu′AAGCu′CGAGu′CCGAGu′u′CGu′Cu′ACGGAGACu′AC | |
| | | AAAGu′Gu′ACGACGu′GCGGAAGAu′GAu′CGCCAAGu′C | |
| | | CGAGCAGGAAAu′AGGGAAGGCCACCGCCAAGu′ACu′u′ | |
| | | Cu′u′Cu′ACu′CCAACAu′CAu′GAACu′u′Cu′u′CAAGACCG | |
| | | AGAu′CACCCu′u′GCCAACGGGGAGAu′u′CGGAAGCGCC | |
| | | CGu′u′GAu′u′GAGACu′AACGGAGAAACCGGCGAAAu′u′ | |
| | | Gu′Gu′GGGAu′AAGGGCAGAGACu′u′u′GCGACu′Gu′GCG | |
| | | CAAAGu′Cu′u′Gu′CAAu′GCCCCAAGu′CAACAu′u′Gu′CA | |
| | | AAAAGACCGAAGu′GCAAACCGGCGGCu′u′CAGCAAGG | |
| | | AAAGCAu′CCu′GCCCAAGCGCAAu′u′CCGACAAGCu′CA | |
| | | u′CGCCCGGAAGAAGGACu′GGGACCCCAAGAAAu′Au′G | |
| | | GAGGCu′u′CGACu′CCCCCACu′Gu′GGCCu′ACu′CCGu′C | |
| | | Cu′GGu′GGu′CGCGAAAGu′GGAAAAGGGAAAGu′CGAA | |
| | | GAAGCu′CAAGu′CCGu′GAAGGAGCu′CCu′GGGGAu′CA | |
| | | CCAu′u′Au′GGAACGGu′CCAGCu′u′CGAGAAGAACCCG | |
| | | Au′u′GACu′u′CCu′GGAAGCCAAGGGu′u′ACAAGGAGGu′ | |
| | | CAAGAAGGAu′Cu′GAu′u′Au′u′AAGCu′GCCGAAGu′Au′u | |
| | | ′CCCu′Cu′u′CGAACu′CGAAAAu′GGCCGCAAGCGAAu′G | |
| | | u′u′GGCAu′CGGCGGGAGAGCu′CCAGAAGGGAAACGA | |
| | | ACu′GGCCu′u′GCCu′u′CCAAAu′ACGu′GAACu′u′u′Cu′Gu | |
| | | ′ACCu′GGCCAGCCACu′ACGAGAAGCu′GAAGGGu′u′CC | |
| | | CCCGAGGACAACGAGCAGAAGCAGCu′Gu′u′CGu′GGAG | |
| | | CAGCACAAGCACu′ACCu′GGAu′GAGAu′CAu′CGAACAG | |
| | Protein | Au′Cu′CGGAAu′u′Cu′CCAAGAGAGu′GAu′CCu′GGCCGA | |
| | | CGCGAACCu′GGAu′AAGGu′CCu′Gu′CCGCGu′ACAACA | |
| | | AGCACCGGGACAAGCCCAu′CCGGGAGCAGGCu′GAGA | |
| | | ACAu′u′Au′CCACCu′Gu′u′CACCCu′CACu′AACCu′u′GGA | |
| | | GCGCCu′GCCGCAu′u′CAAGu′ACu′u′CGACACAACCAu′C | |
| | | GACAGAAAGCGCu′ACACu′u′CCACCAAGGAGGu′GCu′G | |
| | | GACGCCACCCu′GAu′CCACCAGu′CCAu′CACu′GGGCu′C | |
| | | u′Au′GAGACu′CGCAu′u′GACCu′Gu′CCCAGu′u′GGGAGG | |
| | | GGAC | |
| | | DKKYSIGLAIGTNSVGWAVITDEYKVPSKKFKVLGNTDR | |
| | | HSIKKNLIGALLFDSGETAEATRLKRTARRRYTRRKNRIC | |
| | | YLQEIFSNEMAKVDDSFFHRLEESFLVEEDKKHERHPIFG | |
| | | NIVDEVAYHEKYPTIYHLRKKLVDSTDKADLRLIYLALA | |
| | | HMIKFRGHFLIEGDLNPDNSDVDKLFIQLVQTYNQLFEEN | |
| | | PINASGVDAKAILSARLSKSRRLENLIAQLPGEKKNGLFG | |
| | | NLIALSLGLTPNFKSNFDLAEDAKLQLSKDTYDDDLDNL | |
| | | LAQIGDQYADLFLAAKNLSDAILLSDILRVNTEITKAPLSA | |
| | | SMIKRYDEHHQDLTLLKALVRQQLPEKYKEIFFDQSKNG | |
| | | YAGYIDGGASQEEFYKFIKPILEKMDGTEELLVKLNREDL | |
| | | LRKQRTFDNGSIPHQIHLGELHAILRRQEDFYPFLKDNRE | |
| | | KIEKILTFRIPYYVGPLARGNSRFAWMTRKSEETITPWNFE | |
| | | EVVDKGASAQSFIERMTNFDKNLPNEKVLPKHSLLYEYF | |
| | | TVYNELTKVKYVTEGMRKPAFLSGEQKKAIVDLLFKTNR | |
| | | KVTVKQLKEDYFKKIECFDSVEISGVEDRFNASLGTYHDL | |
| | | LKIIKDKDFLDNEENEDILEDIVLTLTLFEDREMIEERLKT | |
| | | YAHLFDDKVMKQLKRRRYTGWGRLSRKLINGIRDKQSG | |
| | | KTILDFLKSDGFANRNFMQLIHDDSLTFKEDIQKAQVSGQ | |
| | | GDSLHEHIANLAGSPAIKKGILQTVKVVDELVKVMGRHK | |
| | | PENIVIEMARENQTTQKGQKNSRERMKRIEEGIKELGSQI | |
| | | LKEHPVENTQLQNEKLYLYYLQNGRDMYVDQELDINRL | |
| | | SDYDVDHIVPQSFLKDDSIDNKVLTRSDKNRGKSDNVPS | |
| | | EEVVKKMKNYWRQLLNAKLITQRKFDNLTKAERGGLSE | |
| | | LDKAGFIKRQLVETRQITKHVAQILDSRMNTKYDENDKLI | |
| | | REVKVITLKSKLVSDFRKDFQFYKVREINNYHHAHDAYL | |
| | | NAVVGTALIKKYPKLESEFVYGDYKVYDVRKMIAKSEQ | |
| | | EIGKATAKYFFYSNIMNFFKTEITLANGEIRKRPLIETNGE | |
| | | TGEIVWDKGRDFATVRKVLSMPQVNIVKKTEVQTGGFS | |
| | | KESILPKRNSDKLIARKKDWDPKKYGGFDSPTVAYSVLV | |
| | | VAKVEKGKSKKLKSVKELLGITIMERSSFEKNPIDFLEAK | |
| | | GYKEVKKDLIIKLPKYSLFELENGRKRMLASAGELQKGN | |
| | | ELALPSKYVNFLYLASHYEKLKGSPEDNEQKQLFVEQHK | |
| | | HYLDEIIEQISEFSKRVILADANLDKVLSAYNKHRDKPIRE | |
| | | QAENIIHLFTLTNLGAPAAFKYFDTTIDRKRYTSTKEVLD | |
| | | ATLIHQSITGLYETRIDLSQLGGD | |
| C- | mRNA | GAAGGAGCCGAu′ | 2166 |
| terminal | Protein | EGAD | 2144 |
| linker | | | |
| Nuclear | mRNA | AAGAGAACCGCCGAu′GGGu′CCGAAu′u′CGAGu′CGCCC | 2167 |
| localization | | AAGAAGAAGCGGAAAGu′Gu′AA | |
| sequence | Protein | KRTADGSEFESPKKKRKV | 2146 |
| (NLS) | | | |
| 3′ UTR | mRNA | GCGGCCGCu′u′AAu′u′AAGCu′GCCu′u′Cu′GCGGGGCu′u′ | 2147 |
| | | GCCu′u′Cu′GGCCAu′GCCCu′u′Cu′u′Cu′Cu′CCCu′u′GCAC | |
| | | Cu′Gu′ACCu′Cu′u′GGu′Cu′u′u′GAAu′AAAGCCu′GAGu′A | |
| | | GGAAGu′Cu′AGA | |

MA020 mRNA and protein sequences

| | | | SEQ ID |
|---|---|---|---|
| Region | Sequence | | NO |
| Full | mRNA | AGGAAAu′AAGAGAGAAAAGAAGAGu′AAGAAGAAAu′ | 2168 |
| sequence | | Au′AAGAGCCACCAu′Gu′CAGAAGu′AGAAu′u′Cu′CCCA | |
| | | CGAGu′Au′u′GGAu′GAGACACGCu′Cu′CACACu′CGCCA | |
| | | AGCGAGCu′AGGGAu′GAAAGGGAAGu′ACCAGu′GGGG | |
| | | GCCGu′ACu′GGu′ACu′CAACAAu′AGGGu′CAu′AGGAGA | |
| | | GGGGu′GGAAu′CGAGCAAu′u′GGGCu′GCAu′GAu′CCCA | |
| | | Cu′GCACACGCGGAGAu′u′Au′GGCu′Cu′u′AGACAAGGG | |
| | | GGCCu′GGu′GAu′GCAGAAu′u′ACCGCCu′CAu′u′GACGC | |
| | | AACCCu′u′u′ACGu′GACAu′u′u′GAGCCAu′GCGu′u′ Au′Gu | |
| | | ′GCGCGGGCGCAAu′GAu′ACACu′Cu′AGGAu′AGGCCGC | |
| | | Gu′AGu′u′u′u′CGGAGu′CCGAAAu′GCGAAGACu′GGGGC | |
| | | GGCCGGAu′Cu′Cu′GAu′GGACGu′GCu′CCACCAu′CCAG | |
| | | GCAu′GAACCACCGAGu′GGAGAu′AACGGAAGGCAu′Cu | |
| | | ′u′GGCGGACGAAu′Gu′GCu′GCGCu′CCu′u′u′GCAGGu′u′ | |
| | | Cu′u′CCGGAu′GCCAAGACGGGu′Au′u′CAACGCGCAGA | |
| | | AGAAGGCACAGu′CAAGCACu′GAu′AGu′GGCGGCAGu′u | |
| | | ′CCGGAGGAu′Cu′AGu′GGGu′CCGAAACGCCAGGGACCU | |
| | | ′CCGAAu′CCGCAACu′CCCGAAAGu′u′CAGGAGGCu′CCu | |
| | | ′CCGGCGGCAGCGACAAGAAGu′ACu′CCAu′u′GGu′Cu′G | |
| | | GCGAu′CGGu′ACGAAu′AGu′Gu′u′GGGu′GGGCu′Gu′AAu | |
| | | ′AACu′GACGAGu′Au′AAGGu′GCCCAGu′AAGAAGu′u′C | |
| | | AAAGu′CCu′GGGGAACACAGACCGACAu′AGCAu′CAAG | |
| | | AAGAACCu′GAu′AGGu′GCGCu′Cu′u′Gu′u′u′GACu′CCGG | |
| | | AGAGACAGCAGAAGCCACACGACu′u′AAACGAACCGC | |
| | | u′CGAAGGCGGu′ACACACGGCGAAAGAAu′AGGAu′u′u′ | |
| | | Gu′u′ACCu′GCAGGAGAu′Au′u′u′AGCAACGAGAu′GGCA | |
| | | AAGGu′u′GACGAu′u′CCu′u′Cu′u′CCACCGGCu′u′GAAGA | |
| | | Gu′Cu′u′u′CCu′GGu′GGAGGAGGACAAGAAACAu′GAAC | |
| | | GCCACCCCAu′Au′u′u′GGCAAu′Au′AGu′GGACGAAGu′A | |
| | | GCAu′ACCAu′GAGAAAu′ACCCu′ACCAu′Au′Au′CAu′Cu′ | |
| | | u′CGAAAGAAGCu′u′Gu′AGAu′u′CAACGGAu′AAAGCAG | |
| | | Au′Cu′CAGGu′u′GAu′Au′Au′Cu′GGCACu′GGCACACAu′G | |
| | | Au′CAAGu′u′u′CGAGGu′CACu′u′u′Cu′u′Au′CGAGGGCG | |
| | | Au′Cu′u′AAu′CCGGACAACu′CCGACGu′GGAu′AAGCu′G | |
| | | u′u′CAu′CCAGCu′CGu′CCAAACGu′Au′AACCAACu′Cu′u′ | |
| | | CGAGGAGAAu′CCGAu′CAAu′GCCu′Cu′GGAGu′GGACG | |
| | | CGAAAGCGAu′ACu′Cu′CAGCAAGGCu′u′AGu′AAGu′Cu′ | |
| | | CGCCGGCu′u′GAGAACCu′CAu′CGCACAGu′u′GCCAGGA | |
| | | GAGAAGAAGAAu′GGCu′u′Gu′u′u′GGu′AACCu′u′Au′u′G | |
| | | CACu′CAGu′Cu′CGGCCu′u′ACACCu′AACu′u′CAAGu′CC | |
| | | AACu′u′CGAu′Cu′u′GCCGAGGACGCCAAGCu′CCAGCu′u | |
| | | ′AGCAAGGAu′ACCu′ACGAu′GACGAu′Cu′u′GAu′AACCu | |
| | | ′GCu′GGCCCAGAu′AGGCGACCAGu′ACGCGGACCu′u′u′ | |
| | | u′Cu′u′GGCAGCAAAGAAu′u′u′Gu′CCGACGCCAu′CCu′C | |
| | | u′u′GAGCGACAu′CCu′CCGGGu′AAACACu′GAAAu′u′AC | |
| | | u′AAGGCGCCACu′u′u′CCGCCAGCAu′GAu′CAAGAGAu′ | |
| | | ACGAu′GAGCAu′CAu′CAGGAu′Cu′GACCCu′GCu′u′AAA | |
| | | GCGCu′u′Gu′ACGCCAGCAAu′u′GCCu′GAGAAGu′Au′AA | |
| | | AGAAAu′Cu′u′u′u′u′CGACCAAAGCAAGAACGGu′u′Au′G | |
| | | Cu′GGCu′ACAu′AGACGGCGGGGCu′u′Cu′CAGGAGGAAu | |
| | | ′u′Cu′ACAAGu′u′u′ Au′CAAGCCGAu′u′Cu′CGAGAAGAu′ | |
| | | GGAu′GGAACAGAGGAGCu′Gu′u′GGu′GAAACu′GAACC | |
| | | GGGAGGACCu′GCu′CAGAAAGCAGCGGACCu′u′CGAu′ | |
| | | AAu′GGGAGCAu′CCCGCACCAGAu′u′CAu′u′u′GGGu′GA | |
| | | GCu′GCAu′GCAAu′Cu′u′GCGCAGGCAAGAAGAu′u′u′u′u′ | |
| | | ACCCCu′u′CCu′CAAGGACAAu′AGAGAGAAGAu′u′GAG | |
| | | AAGAu′CCu′u′ACGu′u′u′AGGAu′u′CCGu′Au′u′ACGu′AG | |
| | | GCCCGCu′CGCACGCGGu′AAu′u′Cu′CGCu′u′u′GCGu′GG | |
| | | Au′GACACGAAAGAGCGAGGAAACCAu′AACACCCu′GG | |
| | | AACu′u′u′GAAGAGGu′CGu′CGAu′AAGGGu′GCCAGCGC | |
| | | ACAAu′CAu′u′u′Au′CGAACGAAu′GACu′AAu′u′u′CGAu′ | |
| | | AAGAAu′Cu′CCCAAAu′GAGAAGGu′Gu′u′GCCAAAGCA | |
| | | u′AGCCu′u′u′u′Gu′ Au′GAGu′ Au′u′u′u′ACu′Gu′ Au′ACAAC | |
| | | GAGCu′CACCAAGGu′GAAAu′Au′Gu′CACu′GAAGGGAu′ | |
| | | GCGCAAGCCGGCCu′u′u′u′u′GAGCGGAGAACAGAAGA | |
| | | AAGCu′ Au′u′Gu′AGACu′u′GCu′u′u′u′u′AAGACGAAu′AG | |
| | | AAAGGu′u′ACGGu′CAAGCAGCu′CAAAGAAGACu′ACu′ | |
| | | u′u′AAGAAGAu′AGAAu′GCu′u′u′GACu′Cu′Gu′CGAGAu′ | |
| | | u′AGu′GGGGu′AGAGGAu′CGAu′u′CAAu′GCAAGCCu′GG | |
| | | GGACAu′ACCACGAu′Cu′Cu′u′GAAGAu′u′ Au′CAAGGAu′ | |
| | | AAGGAu′u′u′u′Cu′GGACAACGAAGAGAAu′GAAGACAu′ | |
| | | Cu′u′GGAAGAu′Au′u′Gu′u′u′u′GACu′u′u′GACu′Cu′u′u′u′ | |
| | | CGAAGAu′CGCGAGAu′GAu′AGAGGAAAGGu′u′GAAGA | |
| | | Cu′u′Au′GCCCAu′Cu′u′u′u′u′GAu′GACAAGGu′u′Au′GAA | |
| | | ACAACu′GAAGAGACGGCGAu′Au′ACu′GGu′u′GGGGGA | |
| | | GACu′Cu′CACGAAAGCu′CAu′u′AACGGCAu′CCGGGAC | |
| | | AAACAGAGu′GGu′AAGACGAu′u′u′u′GGACu′u′CCu′u′A | |
| | | AGAGCGACGGGu′u′u′GCGAAu′AGGAACu′u′CAu′GCAG | |
| | | u′u′GAu′CCAu′GAu′GAu′u′Cu′u′u′GACCu′u′u′AAGGAGG | |
| | | Au′Au′ACAGAAGGCACAAGu′CAGu′GGACAAGGAGAu′ | |
| | | AGu′Cu′GCAu′GAGCACAu′u′GCCAACCu′u′GCGGGCu′C | |
| | | CCCAGCCAu′CAAGAAGGGu′Au′CCu′GCAAACCGu′CAA | |
| | | AGu′AGu′AGAu′GAACu′u′Gu′GAAAGu′CAu′GGGACGAC | |
| | | Au′AAGCCu′GAGAAu′Au′u′Gu′GAu′CGAAAu′GGCu′AG | |
| | | GGAGAAu′CAGACGACu′CAGAAGGGu′CAGAAGAAu′u′ | |
| | | CCAGGGAACGGAu′GAAGAGAAu′AGAGGAGGGAAu′u′ | |
| | | AAGGAACu′CGGGu′CACAAAu′Au′u′GAAGGAGCAu′CC | |
| | | u′Gu′AGAGAACACACAGCu′u′CAGAACGAGAAGCu′Gu′ | |
| | | ACCu′Gu′ Au′u′Au′Cu′CCAGAAu′GGCAGAGACAu′Gu′ Au′ | |
| | | Gu′CGACCAAGAACu′GGAu′Au′CAAu′CGCu′u′Gu′CCGA | |
| | | u′u′Au′GAu′Gu′AGAu′CACAu′AGu′CCCACAAu′CCu′u′Cu | |
| | | ′u′GAAAGACGAu′AGu′ Au′u′GACAAu′AAGGu′ACu′u′AC | |
| | | GAGAu′CCGACAAGAACCGCGGAAAGu′CCGAu′AACGu′ | |
| | | ACCGAGu′GAAGAAGu′GGu′ AAAGAAGAu′GAAGAAu′u′ | |
| | | Au′u′GGAGGCAGCu′CCu′CAACGCCAAACu′u′Au′u′ACu′ | |
| | | CAGAGAAAGu′u′CGAu′AACCu′u′ACGAAAGCu′GAGCG | |
| | | AGGCGGGu′u′Gu′Cu′GAGCu′CGAu′AAAGCu′GGAu′u′CA | |
| | | u′AAAGCGGCAGCu′u′Gu′GGAAACu′AGACAGAu′CACA | |
| | | AAGCACGu′u′GCACAGAu′CCu′u′GAu′u′CCAGAAu′GAA | |
| | | CACu′AAAu′Au′GAu′GAGAACGAu′AAGCu′GAu′ACGCG | |
| | | AGGu′GAAAGu′AAu′AACACu′u′AAGu′CAAAGCu′GGu′A | |
| | | AGCGAu′u′u′u′CGCAAAGACu′u′CCAAu′u′u′u′Au′AAGGu | |
| | | ′CAGAGAGAu′AAACAAu′u′Au′CAu′CACGCGCAu′GACG | |
| | | Cu′u′ACCu′GAACGCAGu′u′Gu′GGGGACAGCACu′u′Au′A | |
| | | AAGAAAu′ACCCAAAGu′u′GGAAAGu′GAAu′u′u′Gu′Cu′ | |
| | | Au′GGAGACu′Au′AAGGu′ Au′ACGAu′Gu′ ACGGAAGAu′G | |
| | | Au′u′GCGAAGu′CAGAGCAAGAAAu′CGGu′AAGGCAACu | |
| | | ′GCu′AAGu′ACu′u′Cu′u′u′u′ACu′CAAAu′Au′u′ Au′GAACu | |
| | | ′u′u′u′u′CAAGACGGAAAu′CACu′Cu′GGCu′AACGGAGA | |
| | | AAu′u′CGGAAGAGGCCCu′u′GAu′AGAGACGAAu′GGGG | |
| | | AGACu′GGu′GAGAu′CGu′u′u′GGGACAAAGGGCGAGAu′ | |
| | | u′u′CGCAACGGu′CCGAAAGGu′GCu′Cu′CAAu′GCCACA | |
| | | AGu′CAAu′Au′AGu′CAAGAAGACAGAGGu′ACAAACAG | |
| | | GAGGu′u′u′Cu′CCAAGGAAu′CAAu′ACu′CCCAAAGCGG | |
| | | AAu′u′CCGACAAACu′GAu′AGCu′AGAAAGAAGGACu′G | |
| | | GGAu′CCGAAGAAGu′Au′GGAGGGu′u′u′GAu′u′CCCCAA | |
| | | CAGu′AGCGu′Au′u′CAGu′ACu′GGu′GGu′AGCu′AAGGu′ | |
| | | GGAGAAAGGCAAGu′Cu′AAGAAGCu′u′AAGu′Cu′Gu′CA | |
| | | AAGAGCu′GCu′CGGCAu′CACCAu′u′Au′GGAGCGCAGu′ | |
| | | AGCu′u′CGAGAAGAACCCu′ Au′AGAu′u′u′u′Cu′GGAAGC | |
| | | CAAAGGAu′Au′AAGGAGGu′u′AAGAAGGAu′Cu′CAu′CA | |
| | | u′CAAACu′CCCGAAGu′Au′AGu′Cu′u′u′u′u′GAGu′u′GGA | |
| | | GAACGGACGAAAGCGCAu′GCu′u′GCGu′Cu′GCGGGu′G | |
| | | AAu′u′GCAGAAAGGAAAu′GAGCu′CGCCu′u′GCCGu′CA | |
| | | AAGu′Au′Gu′CAAu′u′u′Cu′u′Gu′ACCu′u′GCGAGu′CACu′ | |
| | | Au′GAGAAGCu′GAAAGGAAGCCCAGAAGAu′AAu′GAA | |
| | | CAGAAGCAAu′u′Gu′u′CGu′u′GAACAACAu′AAGCAu′u′A | |
| | | u′u′u′GGACGAGAu′CAu′CGAGCAAAu′CAGCGAGu′u′CA | |
| | | GCAAGCGCGu′CAu′ACu′u′GCGGACGCCAAu′Cu′GGAC | |
| | | AAAGu′GCu′Gu′CCGCCu′Au′AACAAACAu′AGGGACAA | |
| | | ACCu′ Au′ACGAGAGCAGGCAGAGAAu′Au′AAu′ACAu′C | |
| | | u′Cu′u′CACACu′u′ACu′AAu′Cu′u′GGAGCu′CCAGCCGCA | |
| | | u′u′CAAGu′Au′u′u′u′GACACGACu′Au′AGAu′CGCAAGCG | |
| | | Au′Au′ACCu′Cu′ACGAAAGAAGu′u′Cu′GGACGCu′ACu′C | |
| | | u′u′Au′ACAu′CAAu′CCAu′u′ACGGGCCu′Gu′ACGAGACG | |
| | | AGGAu′u′GACu′u′Gu′CACAGCu′u′GGu′GGu′GACGAGGG | |
| | | u′GCAGACAAGCGAACAGCGGACGGGu′CAGAAu′u′CGA | |
| | | AAGCCCCAAGAAGAAGCGGAAAGu′u′u′AAGCGGCCGC | |
| | | u′u′AAu′u′AAGCu′GCCu′u′Cu′GCGGGGCu′u′GCCu′u′Cu′ | |
| | | GGCCAu′GCCCu′u′Cu′u′Cu′Cu′CCCu′u′GCACCu′Gu′ACC | |
| | | u′Cu′u′GGu′Cu′u′u′GAAu′AAAGCCu′GAGu′AGGAAGu′Cu | |
| | | ′AGA | |
| | Protein | MSEVEFSHEYWMRHALTLAKRARDEREVPVGAVLVLNN | 2137 |
| | | RVIGEGWNRAIGLHDPTAHAEIMALRQGGLVMQNYRLID | |
| | | ATLYVTFEPCVMCAGAMIHSRIGRVVFGVRNAKTGAAG | |
| | | SLMDVLHHPGMNHRVEITEGILADECAALLCRFFRMPRR | |
| | | VFNAQKKAQSSTDSGGSSGGSSGSETPGTSESATPESSGG | |
| | | SSGGSDKKYSIGLAIGTNSVGWAVITDEYKVPSKKFKVL | |
| | | GNTDRHSIKKNLIGALLFDSGETAEATRLKRTARRRYTRR | |
| | | KNRICYLQEIFSNEMAKVDDSFFHRLEESFLVEEDKKHER | |
| | | HPIFGNIVDEVAYHEKYPTIYHLRKKLVDSTDKADLRLIY | |
| | | LALAHMIKFRGHFLIEGDLNPDNSDVDKLFIQLVQTYNQL | |
| | | FEENPINASGVDAKAILSARLSKSRRLENLIAQLPGEKKN | |
| | | GLFGNLIALSLGLTPNFKSNFDLAEDAKLQLSKDTYDDDL | |
| | | DNLLAQIGDQYADLFLAAKNLSDAILLSDILRVNTEITKA | |
| | | PLSASMIKRYDEHHQDLTLLKALVRQQLPEKYKEIFFDQS | |
| | | KNGYAGYIDGGASQEEFYKFIKPILEKMDGTEELLVKLN | |
| | | REDLLRKQRTFDNGSIPHQIHLGELHAILRRQEDFYPFLK | |
| | | DNREKIEKILTFRIPYYVGPLARGNSRFAWMTRKSEETITP | |
| | | WNFEEVVDKGASAQSFIERMTNFDKNLPNEKVLPKHSLL | |
| | | YEYFTVYNELTKVKYVTEGMRKPAFLSGEQKKAIVDLLF | |
| | | KTNRKVTVKQLKEDYFKKIECFDSVEISGVEDRFNASLGT | |
| | | YHDLLKIIKDKDFLDNEENEDILEDIVLTLTLFEDREMIEE | |
| | | RLKTYAHLFDDKVMKQLKRRRYTGWGRLSRKLINGIRD | |
| | | KQSGKTILDFLKSDGFANRNFMQLIHDDSLTFKEDIQKAQ | |
| | | VSGQGDSLHEHIANLAGSPAIKKGILQTVKVVDELVKVM | |
| | | GRHKPENIVIEMARENQTTQKGQKNSRERMKRIEEGIKEL | |
| | | GSQILKEHPVENTQLQNEKLYLYYLQNGRDMYVDQELDI | |
| | | NRLSDYDVDHIVPQSFLKDDSIDNKVLTRSDKNRGKSDN | |
| | | VPSEEVVKKMKNYWRQLLNAKLITQRKFDNLTKAERGG | |
| | | LSELDKAGFIKRQLVETRQITKHVAQILDSRMNTKYDEN | |
| | | DKLIREVKVITLKSKLVSDFRKDFQFYKVREINNYHHAH | |
| | | DAYLNAVVGTALIKKYPKLESEFVYGDYKVYDVRKMIA | |
| | | KSEQEIGKATAKYFFYSNIMNFFKTEITLANGEIRKRPLIE | |
| | | TNGETGEIVWDKGRDFATVRKVLSMPQVNIVKKTEVQT | |
| | | GGFSKESILPKRNSDKLIARKKDWDPKKYGGFDSPTVAY | |
| | | SVLVVAKVEKGKSKKLKSVKELLGITIMERSSFEKNPIDF | |
| | | LEAKGYKEVKKDLIIKLPKYSLFELENGRKRMLASAGEL | |
| | | QKGNELALPSKYVNFLYLASHYEKLKGSPEDNEQKQLFV | |
| | | EQHKHYLDEIIEQISEFSKRVILADANLDKVLSAYNKHRD | |
| | | KPIREQAENIIHLFTLTNLGAPAAFKYFDTTIDRKRYTSTK | |
| | | EVLDATLIHQSITGLYETRIDLSQLGGDEGADKRTADGSE | |
| | | FESPKKKRKV | |
| 5′ UTR | mRNA | AGGAAAu′AAGAGAGAAAAGAAGAGu′AAGAAGAAAu′ | 2138 |
| | | Au′AAGAGCCACC | |
| TadA | mRNA | Au′Gu′CAGAAGu′AGAAu′u′Cu′CCCACGAGu′Au′u′GGAu | 2169 |
| | | ′GAGACACGCu′Cu′CACACu′CGCCAAGCGAGCu′AGGG | |
| | | Au′GAAAGGGAAGu′ACCAGu′GGGGGCCGu′ACu′GGu′A | |
| | | Cu′CAACAAu′AGGGu′CAu′AGGAGAGGGGu′GGAAu′CG | |
| | | AGCAAu′u′GGGCu′GCAu′GAu′CCCACu′GCACACGCGG | |
| | | AGAu′u′Au′GGCu′Cu′u′AGACAAGGGGGCCu′GGu′GAu′G | |
| | | CAGAAu′u′ACCGCCu′CAu′u′GACGCAACCCu′u′u′ACGu′ | |
| | | GACAu′u′u′GAGCCAu′GCGu′u′ Au′Gu′GCGCGGGCGCAA | |
| | | u′GAu′ACACu′Cu′AGGAu′AGGCCGCGu′AGu′u′u′u′CGGA | |
| | | Gu′CCGAAAu′GCGAAGACu′GGGGCGGCCGGAu′Cu′Cu′ | |
| | | GAu′GGACGu′GCu′CCACCAu′CCAGGCAu′GAACCACCG | |
| | | AGu′GGAGAu′AACGGAAGGCAu′Cu′u′GGCGGACGAAu′ | |
| | | Gu′GCu′GCGCu′CCu′u′u′GCAGGu′u′Cu′u′CCGGAu′GCCA | |
| | | AGACGGGu′Au′u′CAACGCGCAGAAGAAGGCACAGu′CA | |
| | | AGCACu′GAu′ | |
| | Protein | MSEVEFSHEYWMRHALTLAKRARDEREVPVGAVLVLNN | 2140 |
| | | RVIGEGWNRAIGLHDPTAHAEIMALRQGGLVMQNYRLID | |
| | | ATLYVTFEPCVMCAGAMIHSRIGRVVFGVRNAKTGAAG | |
| | | SLMDVLHHPGMNHRVEITEGILADECAALLCRFFRMPRR | |
| | | VFNAQKKAQSSTD | |
| N- | mRNA | AGu′GGCGGCAGu′u′CCGGAGGAu′Cu′AGu′GGGu′CCGA | 2170 |
| terminal | | AACGCCAGGGACCu′CCGAAu′CCGCAACu′CCCGAAAG | |
| linker | | u′u′CAGGAGGCu′CCu′CCGGCGGCAGC | |
| | Protein | SGGSSGGSSGSETPGTSESATPESSGGSSGGS | 20 |
| Cas9 | mRNA | GACAAGAAGu′ACu′CCAu′u′GGu′Cu′GGCGAu′CGGu′AC | 2171 |
| nickase | | GAAu′AGu′Gu′u′GGGu′GGGCu′Gu′AAu′AACu′GACGAGu | |
| | | ′Au′AAGGu′GCCCAGu′AAGAAGu′u′CAAAGu′CCu′GGG | |
| | | GAACACAGACCGACAu′AGCAu′CAAGAAGAACCu′GAu′ | |
| | | AGGu′GCGCu′Cu′u′Gu′u′u′GACu′CCGGAGAGACAGCAG | |
| | | AAGCCACACGACu′u′AAACGAACCGCu′CGAAGGCGGu′ | |
| | | ACACACGGCGAAAGAAu′AGGAu′u′u′Gu′u′ACCu′GCAG | |
| | | GAGAu′Au′u′u′AGCAACGAGAu′GGCAAAGGu′u′GACGA | |
| | | u′u′CCu′u′Cu′u′CCACCGGCu′u′GAAGAGu′Cu′u′u′CCu′G | |
| | | Gu′GGAGGAGGACAAGAAACAu′GAACGCCACCCCAu′A | |
| | | u′u′u′GGCAAu′Au′AGu′GGACGAAGu′AGCAu′ACCAu′GA | |
| | | GAAAu′ACCCu′ACCAu′Au′Au′CAu′Cu′u′CGAAAGAAGC | |
| | | u′u′Gu′AGAu′u′CAACGGAu′AAAGCAGAu′Cu′CAGGu′u′ | |
| | | GAu′Au′Au′Cu′GGCACu′GGCACACAu′GAu′CAAGu′u′u′C | |
| | | GAGGu′CACu′u′u′Cu′u′Au′CGAGGGCGAu′Cu′u′AAu′CC | |
| | | GGACAACu′CCGACGu′GGAu′AAGCu′Gu′u′CAu′CCAGCu | |
| | | ′CGu′CCAAACGu′Au′AACCAACu′Cu′u′CGAGGAGAAu′C | |
| | | CGAu′CAAu′GCCu′Cu′GGAGu′GGACGCGAAAGCGAu′A | |
| | | Cu′Cu′CAGCAAGGCu′u′AGu′AAGu′Cu′CGCCGGCu′u′GA | |
| | | GAACCu′CAu′CGCACAGu′u′GCCAGGAGAGAAGAAGAA | |
| | | u′GGCu′u′Gu′u′u′GGu′AACCu′u′Au′u′GCACu′CAGu′Cu′C | |
| | | GGCCu′u′ACACCu′AACu′u′CAAGu′CCAACu′u′CGAu′Cu′ | |
| | | u′GCCGAGGACGCCAAGCu′CCAGCu′u′AGCAAGGAu′AC | |
| | | Cu′ACGAu′GACGAu′Cu′u′GAu′AACCu′GCu′GGCCCAGA | |
| | | u′AGGCGACCAGu′ACGCGGACCu′u′u′u′Cu′u′GGCAGCA | |
| | | AAGAAu′u′u′Gu′CCGACGCCAu′CCu′Cu′u′GAGCGACAu′ | |
| | | CCu′CCGGGu′AAACACu′GAAAu′u′ACu′AAGGCGCCACu | |
| | | ′u′u′CCGCCAGCAu′GAu′CAAGAGAu′ACGAu′GAGCAu′C | |
| | | Au′CAGGAu′Cu′GACCCu′GCu′u′AAAGCGCu′u′Gu′ACGC | |
| | | CAGCAAu′u′GCCu′GAGAAGu′ Au′AAAGAAAu′Cu′u′u′u′u | |
| | | ′CGACCAAAGCAAGAACGGu′u′ Au′GCu′GGCu′ACAu′AG | |
| | | ACGGCGGGGCu′u′Cu′CAGGAGGAAu′u′Cu′ACAAGu′u′u′ | |
| | | Au′CAAGCCGAu′u′Cu′CGAGAAGAu′GGAu′GGAACAGA | |
| | | GGAGCu′Gu′u′GGu′GAAACu′GAACCGGGAGGACCU′GC | |
| | | u′CAGAAAGCAGCGGACCu′u′CGAu′AAu′GGGAGCAu′C | |
| | | CCGCACCAGAu′u′CAu′u′u′GGGu′GAGCu′GCAu′GCAAu′ | |
| | | Cu′u′GCGCAGGCAAGAAGAu′u′u′u′u′ACCCCu′u′CCu′CA | |
| | | AGGACAAu′AGAGAGAAGAu′u′GAGAAGAu′CCu′u′ACG | |
| | | u′u′u′AGGAu′u′CCGu′Au′u′ACGu′AGGCCCGCu′CGCACG | |
| | | CGGu′AAu′u′Cu′CGCu′u′u′GCGu′GGAu′GACACGAAAGA | |
| | | GCGAGGAAACCAu′AACACCCu′GGAACu′u′u′GAAGAG | |
| | | Gu′CGu′CGAu′AAGGGu′GCCAGCGCACAAu′CAu′u′u′Au′ | |
| | | CGAACGAAu′GACu′AAu′u′u′CGAu′AAGAAu′Cu′CCCAA | |
| | | Au′GAGAAGGu′Gu′u′GCCAAAGCAu′AGCCu′u′u′u′Gu′ Au | |
| | | ′GAGu′Au′u′u′u′ACu′Gu′Au′ACAACGAGCu′CACCAAGGu | |
| | | ′GAAAu′Au′Gu′CACu′GAAGGGAu′GCGCAAGCCGGCCu′ | |
| | | u′u′u′u′GAGCGGAGAACAGAAGAAAGCu′Au′u′Gu′AGAC | |
| | | u′u′GCu′u′u′u′u′AAGACGAAu′AGAAAGGu′u′ACGGu′CA | |
| | | AGCAGCu′CAAAGAAGACu′ACu′u′u′AAGAAGAu′AGAA | |
| | | u′GCu′u′u′GACu′Cu′Gu′CGAGAu′u′AGu′GGGGu′AGAGG | |
| | | Au′CGAu′u′CAAu′GCAAGCCu′GGGGACAu′ACCACGAu′ | |
| | | Cu′Cu′u′GAAGAu′u′ Au′CAAGGAu′AAGGAu′u′u′u′Cu′GG | |
| | | ACAACGAAGAGAAu′GAAGACAu′Cu′u′GGAAGAu′Au′u′ | |
| | | Gu′u′u′u′GACu′u′u′GACu′Cu′u′u′u′CGAAGAu′CGCGAGA | |
| | | u′GAu′AGAGGAAAGGu′u′GAAGACu′u′ Au′GCCCAu′Cu′u | |
| | | ′u′u′u′GAu′GACAAGGu′u′ Au′GAAACAACu′GAAGAGAC | |
| | | GGCGAu′Au′ACu′GGu′u′GGGGGAGACu′Cu′CACGAAAG | |
| | | Cu′CAu′u′AACGGCAu′CCGGGACAAACAGAGu′GGu′AA | |
| | | GACGAu′u′u′u′GGACu′u′CCu′u′AAGAGCGACGGGu′u′u′ | |
| | | GCGAAu′AGGAACu′u′CAu′GCAGu′u′GAu′CCAu′GAu′G | |
| | | Au′u′Cu′u′u′GACCu′u′u′AAGGAGGAu′ Au′ACAGAAGGC | |
| | | ACAAGu′CAGu′GGACAAGGAGAu′AGu′Cu′GCAu′GAGC | |
| | | ACAu′u′GCCAACCu′u′GCGGGCu′CCCCAGCCAu′CAAGA | |
| | | AGGGu′Au′CCu′GCAAACCGu′CAAAGu′AGu′ AGAu′GAA | |
| | | Cu′u′Gu′GAAAGu′CAu′GGGACGACAu′AAGCCu′GAGAA | |
| | | u′Au′u′Gu′GAu′CGAAAu′GGCu′AGGGAGAAu′CAGACGA | |
| | | Cu′CAGAAGGGu′CAGAAGAAu′u′CCAGGGAACGGAu′G | |
| | | AAGAGAAu′AGAGGAGGGAAu′u′AAGGAACu′CGGGu′C | |
| | | ACAAAu′Au′u′GAAGGAGCAu′CCu′Gu′AGAGAACACAC | |
| | | AGCu′u′CAGAACGAGAAGCu′Gu′ACCu′Gu′ Au′u′Au′Cu′C | |
| | | CAGAAu′GGCAGAGACAu′Gu′ Au′Gu′CGACCAAGAACu′ | |
| | | GGAu′Au′CAAu′CGCu′u′Gu′CCGAu′u′ Au′GAu′Gu′AGAu′ | |
| | | CACAu′AGu′CCCACAAu′CCu′u′Cu′u′GAAAGACGAu′AG | |
| | | u′Au′u′GACAAu′AAGGu′ACu′u′ACGAGAu′CCGACAAGA | |
| | | ACCGCGGAAAGu′CCGAu′AACGu′ACCGAGu′GAAGAAG | |
| | | u′GGu′AAAGAAGAu′GAAGAAu′u′Au′u′GGAGGCAGCu′C | |
| | | Cu′CAACGCCAAACu′u′Au′u′ACu′CAGAGAAAGu′u′CGA | |
| | | u′AACCu′u′ACGAAAGCu′GAGCGAGGCGGGu′u′Gu′Cu′G | |
| | | AGCu′CGAu′AAAGCu′GGAu′u′CAu′AAAGCGGCAGCu′u′ | |
| | | Gu′GGAAACu′AGACAGAu′CACAAAGCACGu′u′GCACA | |
| | | GAu′CCu′u′GAu′u′CCAGAAu′GAACACu′AAAu′ Au′GAu′ | |
| | | GAGAACGAu′AAGCu′GAu′ACGCGAGGu′GAAAGu′AAu′ | |
| | | AACACu′u′AAGu′CAAAGCu′GGu′AAGCGAu′u′u′u′CGCA | |
| | | AAGACu′u′CCAAu′u′u′u′Au′AAGGu′CAGAGAGAu′AAAC | |
| | | AAu′u′Au′CAu′CACGCGCAu′GACGCu′u′ACCu′GAACGC | |
| | | AGu′u′Gu′GGGGACAGCACu′u′Au′AAAGAAAu′ACCCAA | |
| | | AGu′u′GGAAAGu′GAAu′u′u′Gu′Cu′ Au′GGAGACu′ Au′AA | |
| | | GGu′Au′ACGAu′Gu′ACGGAAGAu′GAu′u′GCGAAGu′CAG | |
| | | AGCAAGAAAu′CGGu′AAGGCAACu′GCu′AAGu′ACu′u′C | |
| | | u′u′u′u′ACu′CAAAu′ Au′u′Au′GAACu′u′u′u′u′CAAGACGG | |
| | | AAAu′CACu′Cu′GGCu′AACGGAGAAAu′u′CGGAAGAGG | |
| | | CCCu′u′GAu′AGAGACGAAu′GGGGAGACu′GGu′GAGAu′ | |
| | | CGu′u′u′GGGACAAAGGGCGAGAu′u′u′CGCAACGGu′CC | |
| | | GAAAGGu′GCu′Cu′CAAu′GCCACAAGu′CAAu′Au′AGu′C | |
| | | AAGAAGACAGAGGu′ACAAACAGGAGGu′u′u′Cu′CCAA | |
| | | GGAAu′CAAu′ACu′CCCAAAGCGGAAu′u′CCGACAAACu | |
| | | ′GAu′AGCu′AGAAAGAAGGACu′GGGAu′CCGAAGAAGu′ | |
| | | Au′GGAGGGu′u′u′GAu′u′CCCCAACAGu′AGCGu′ Au′u′C | |
| | | AGu′ACu′GGu′GGu′AGCu′AAGGu′GGAGAAAGGCAAGu′ | |
| | | Cu′AAGAAGCu′u′AAGu′Cu′Gu′CAAAGAGCu′GCu′CGGC | |
| | | Au′CACCAu′u′Au′GGAGCGCAGu′AGCu′u′CGAGAAGAA | |
| | | CCCu′Au′AGAu′u′u′u′Cu′GGAAGCCAAAGGAu′Au′AAGG | |
| | | AGGu′u′AAGAAGGAu′Cu′CAu′CAu′CAAACu′CCCGAAG | |
| | | u′Au′AGu′Cu′u′u′u′u′GAGu′u′GGAGAACGGACGAAAGC | |
| | | GCAu′GCu′u′GCGu′Cu′GCGGGu′GAAu′u′GCAGAAAGGA | |
| | | AAu′GAGCu′CGCCu′u′GCCGu′CAAAGu′ Au′Gu′CAAu′u′u | |
| | | ′Cu′u′Gu′ACCu′u′GCGAGu′CACu′Au′GAGAAGCu′GAAA | |
| | | GGAAGCCCAGAAGAu′AAu′GAACAGAAGCAAu′u′Gu′u′ | |
| | | CGu′u′GAACAACAu′AAGCAu′u′Au′u′u′GGACGAGAu′CA | |
| | | u′CGAGCAAAu′CAGCGAGu′u′CAGCAAGCGCGu′CAu′A | |
| | | Cu′u′GCGGACGCCAAu′Cu′GGACAAAGu′GCu′Gu′CCGC | |
| | | Cu′Au′AACAAACAu′AGGGACAAACCu′Au′ACGAGAGC | |
| | | AGGCAGAGAAu′Au′AAu′ACAu′Cu′Cu′u′CACACu′u′ACu′ | |
| | | AAu′Cu′u′GGAGCu′CCAGCCGCAu′u′CAAGu′ Au′u′u′u′G | |
| | | ACACGACu′Au′AGAu′CGCAAGCGAu′ Au′ACCu′Cu′ACG | |
| | | AAAGAAGu′u′Cu′GGACGCu′ACu′Cu′u′Au′ACAu′CAAu′C | |
| | | CAu′u′ACGGGCCu′Gu′ACGAGACGAGGAu′u′GACu′u′Gu′ | |
| | | CACAGCu′u′GGu′GGu′GAC | |
| | Protein | DKKYSIGLAIGTNSVGWAVITDEYKVPSKKFKVLGNTDR | |
| | | HSIKKNLIGALLFDSGETAEATRLKRTARRRYTRRKNRIC | |
| | | YLQEIFSNEMAKVDDSFFHRLEESFLVEEDKKHERHPIFG | |
| | | NIVDEVAYHEKYPTIYHLRKKLVDSTDKADLRLIYLALA | |
| | | HMIKFRGHFLIEGDLNPDNSDVDKLFIQLVQTYNQLFEEN | |
| | | PINASGVDAKAILSARLSKSRRLENLIAQLPGEKKNGLFG | |
| | | NLIALSLGLTPNFKSNFDLAEDAKLQLSKDTYDDDLDNL | |
| | | LAQIGDQYADLFLAAKNLSDAILLSDILRVNTEITKAPLSA | |
| | | SMIKRYDEHHQDLTLLKALVRQQLPEKYKEIFFDQSKNG | |
| | | YAGYIDGGASQEEFYKFIKPILEKMDGTEELLVKLNREDL | |
| | | LRKQRTFDNGSIPHQIHLGELHAILRRQEDFYPFLKDNRE | |
| | | KIEKILTFRIPYYVGPLARGNSRFAWMTRKSEETITPWNFE | |
| | | EVVDKGASAQSFIERMTNFDKNLPNEKVLPKHSLLYEYF | |
| | | TVYNELTKVKYVTEGMRKPAFLSGEQKKAIVDLLFKTNR | |
| | | KVTVKQLKEDYFKKIECFDSVEISGVEDRFNASLGTYHDL | |
| | | LKIIKDKDFLDNEENEDILEDIVLTLTLFEDREMIEERLKT | |
| | | YAHLFDDKVMKQLKRRRYTGWGRLSRKLINGIRDKQSG | |
| | | KTILDFLKSDGFANRNFMQLIHDDSLTFKEDIQKAQVSGQ | |
| | | GDSLHEHIANLAGSPAIKKGILQTVKVVDELVKVMGRHK | |
| | | PENIVIEMARENQTTQKGQKNSRERMKRIEEGIKELGSQI | |
| | | LKEHPVENTQLQNEKLYLYYLQNGRDMYVDQELDINRL | |
| | | SDYDVDHIVPQSFLKDDSIDNKVLTRSDKNRGKSDNVPS | |
| | | EEVVKKMKNYWRQLLNAKLITQRKFDNLTKAERGGLSE | |
| | | LDKAGFIKRQLVETRQITKHVAQILDSRMNTKYDENDKLI | |
| | | REVKVITLKSKLVSDFRKDFQFYKVREINNYHHAHDAYL | |
| | | NAVVGTALIKKYPKLESEFVYGDYKVYDVRKMIAKSEQ | |
| | | EIGKATAKYFFYSNIMNFFKTEITLANGEIRKRPLIETNGE | |
| | | TGEIVWDKGRDFATVRKVLSMPQVNIVKKTEVQTGGFS | |
| | | KESILPKRNSDKLIARKKDWDPKKYGGFDSPTVAYSVLV | |
| | | VAKVEKGKSKKLKSVKELLGITIMERSSFEKNPIDFLEAK | |
| | | GYKEVKKDLIIKLPKYSLFELENGRKRMLASAGELQKGN | |
| | | ELALPSKYVNFLYLASHYEKLKGSPEDNEQKQLFVEQHK | |
| | | HYLDEIIEQISEFSKRVILADANLDKVLSAYNKHRDKPIRE | |
| | | QAENIIHLFTLTNLGAPAAFKYFDTTIDRKRYTSTKEVLD | |
| | | ATLIHQSITGLYETRIDLSQLGGD | |
| C- | mRNA | GAGGGu′GCAGAC | 2172 |
| terminal | Protein | EGAD | 2144 |
| linker | | | |
| Nuclear | mRNA | AAGCGAACAGCGGACGGGu′CAGAAu′u′CGAAAGCCCC | 2173 |
| localization | | AAGAAGAAGCGGAAAGu′u′u′AA | |
| sequence | Protein | KRTADGSEFESPKKKRKV | 2146 |
| (NLS) | | | |
| 3′ UTR | mRNA | GCGGCCGCu′u′AAu′u′AAGCu′GCCu′u′Cu′GCGGGGCu′u′ | 2147 |
| | | GCCu′u′Cu′GGCCAu′GCCCu′u′Cu′u′Cu′Cu′CCCu′u′GCAC | |
| | | Cu′Gu′ACCu′Cu′u′GGu′Cu′u′u′GAAu′AAAGCCu′GAGu′A | |
| | | GGAAGu′Cu′AGA | |

MA021 mRNA and protein sequences

| | | | SEQ ID |
|---|---|---|---|
| Region | Sequence | | NO |
| Full | mRNA | AGGAAAu′AAGAGAGAAAAGAAGAGu′AAGAAGAAAu′ | 2174 |
| sequence | | Au′AAGAGCCACCAu′Gu′Cu′GAGGu′GGAGu′u′Cu′CCCA | |
| | | CGAGu′ACu′GGAu′GCGGCAu′GCu′Cu′GACu′u′u′GGCCA | |
| | | AGAGAGCCCGAGAu′GAGCGGGAGGu′CCCu′Gu′GGGCG | |
| | | CAGu′GCu′GGu′GCu′GAACAACAGGGu′GAu′CGGCGAG | |
| | | GGCu′GGAACCGGGCCAu′CGGCCu′GCACGACCCu′ACA | |
| | | GCu′CACGCCGAGAu′CAu′GGCCCu′u′AGACAGGGCGGC | |
| | | Cu′GGu′GAu′GCAGAACu′ACAGACu′GAu′CGACGCCAC | |
| | | ACu′Gu′ACGu′CACCu′u′u′GAGCCu′u′GCGu′GAu′Gu′GCG | |
| | | CCGGAGCCAu′GAu′CCAu′AGCCGGAu′AGGACGGGu′G | |
| | | Gu′Cu′u′u′GGCGu′GCGGAACGCGAAGACCGGCGCCGCC | |
| | | GGCAGCCu′u′Au′GGAu′Gu′GCu′GCACCAu′CCu′GGCAu′ | |
| | | GAACCACAGGGu′GGAGAu′CACCGAAGGCAu′CCu′GGC | |
| | | u′GAu′GAAu′Gu′GCCGCu′Cu′GCu′Gu′GCAGAu′u′Cu′u′u′ | |
| | | CGGAu′GCCu′AGAAGAGu′Gu′u′CAACGCCCAGAAGAA | |
| | | AGCCCAGAGu′AGCACCGAu′AGCGGCGGCAGCAGCGG | |
| | | CGGCAGCAGCGGAAGCGAGACACCu′GGCACCAGCGA | |
| | | Au′CCGCCACACCu′GAGAGCu′Cu′GGAGGAAGCu′CAGG | |
| | | CGGCu′Cu′GACAAGAAAu′ACu′CAAu′CGGACu′GGCCAu | |
| | | ′CGGCACCAAu′AGCGu′GGGCu′GGGCCGu′GAu′CACAG | |
| | | Au′GAAu′Au′AAGGu′GCCu′AGCAAGAAGu′u′CAAGGu′G | |
| | | Cu′GGGCAACACCGAu′AGACACAGCAu′CAAGAAGAAC | |
| | | Cu′GAu′CGGAGCCCu′GCu′Gu′u′CGACAGCGGCGAAACC | |
| | | GCCGAAGCCACCAGACu′GAAGAGAACCGCCAGAAGA | |
| | | CGGu′ACACCCGGCGu′AAGAACAGGAu′Cu′Gu′u′ACCu′ | |
| | | GCAGGAGAu′Cu′u′CAGCAACGAAAu′GGCCAAGGu′GG | |
| | | ACGACu′Cu′u′u′Cu′u′CCACAGACu′GGAGGAGAGCu′u′u′ | |
| | | Cu′GGu′GGAAGAAGACAAGAAGCAu′GAGCGGCACCCC | |
| | | Au′Cu′u′u′GGCAACAu′CGu′GGACGAAGu′GGCCu′ACCA | |
| | | CGAGAAAu′ACCCAACAAu′Cu′Au′CACCu′GAGAAAGA | |
| | | AGCu′GGu′GGACAGCACCGAu′AAGGCCGACCu′GCGGC | |
| | | u′GAu′Cu′ACCu′GGCCCu′GGCACACAu′GAu′CAAGu′u′C | |
| | | AGAGGCCACu′u′CCu′GAu′CGAGGGCGACCu′GAACCCC | |
| | | GAu′AAu′AGCGAu′Gu′GGAu′AAGCu′Gu′u′CAu′CCAGCu | |
| | | ′GGu′GCAGACCu′ACAACCAGCu′Gu′u′CGAGGAGAACC | |
| | | CGAu′CAACGCCu′CGGGAGu′u′GAu′GCCAAGGCAAu′C | |
| | | Cu′Gu′Cu′GCu′AGACu′GAGu′AAGAGCAGAAGACu′GGA | |
| | | GAACCu′GAu′CGCCCAGCu′GCCCGGAGAGAAGAAGAA | |
| | | u′GGGCu′Gu′u′u′GGCAACCu′GAu′u′GCCCu′Gu′Cu′Cu′G | |
| | | GGCCu′u′ACACCu′AACu′u′CAAGAGCAACu′u′u′GACCu′ | |
| | | GGCCGAAGACGCCAAGCu′GCAACu′Gu′Cu′AAGGAu′AC | |
| | | Cu′ACGACGACGAu′Cu′GGACAACCu′GCu′GGCCCAAAu′ | |
| | | CGGGGAu′CAAu′ACGCCGACCu′Gu′u′CCu′GGCu′GCCA | |
| | | AGAAu′Cu′Gu′Cu′GACGCCAu′CCu′u′Cu′Gu′CCGAu′ Au′C | |
| | | Cu′GCGGGu′GAACACAGAGAu′AACCAAAGCu′CCu′Cu′u | |
| | | ′AGu′GCGAGCAu′GAu′CAAGAGAu′ Au′GAu′GAGCACCA | |
| | | CCAAGAu′Cu′GACGCu′CCu′GAAGGCCCu′GGu′CAGACA | |
| | | GCAGCu′CCCu′GAGAAAu′ACAAGGAAAu′u′u′u′Cu′u′CG | |
| | | ACCAGAGCAAGAAu′GGCu′ACGCCGGCu′ACAu′CGAu′G | |
| | | GCGGCGCCAGCCAGGAGGAAu′u′u′u′ACAAGu′u′u′ Au′C | |
| | | AAACCAAu′CCu′CGAGAAGAu′GGACGGCACCGAGGAA | |
| | | Cu′GCu′CGu′GAAGCu′GAACAGAGAGGACCu′ACu′GCG | |
| | | GAAGCAGCGGACGu′u′CGACAACGGCAGCAu′CCCu′CA | |
| | | CCAGAu′CCACCu′GGGu′GAGCu′GCACGCAAu′CCu′GAG | |
| | | AAGACAGGAAGAu′u′u′Cu′ACCCCu′u′CCu′GAAAGACA | |
| | | ACCGGGAGAAGAu′CGAGAAGAu′CCu′GACAu′u′u′AGA | |
| | | Au′u′CCCu′ACu′ACGu′GGGCCCu′Cu′GGCu′AGAGGCAA | |
| | | Cu′CCCGGu′u′CGCCu′GGAu′GACCCGGAAGu′CCGAAGA | |
| | | AACCAu′CACCCCCu′GGAACu′u′u′GAGGAGGu′AGu′GG | |
| | | ACAAGGGCGCCAGCGCu′CAGAGCu′u′u′Au′AGAGAGA | |
| | | Au′GACCAACu′u′CGACAAGAAu′Cu′GCCAAACGAGAA | |
| | | AGu′CCu′GCCu′AAGCACu′Cu′Cu′GCu′Gu′Au′GAGu′ACu′ | |
| | | u′CACCGu′u′u′ACAACGAGCu′GACAAAGGu′GAAAu′AC | |
| | | Gu′GACGGAGGGGAu′GAGGAAGCCCGCCu′u′CCu′GAG | |
| | | CGGCGAACAGAAGAAGGCu′Au′CGu′u′GACCu′GCu′Gu′ | |
| | | u′CAAGACCAAu′AGGAAGGu′GACCGu′GAAGCAGCu′C | |
| | | AAGGAGGACu′ACu′u′CAAGAAGAu′u′GAGu′GCu′u′CGA | |
| | | Cu′Cu′Gu′GGAAAu′Cu′Cu′GGAGu′u′GAGGACCGGu′u′CA | |
| | | ACGCAu′CCCu′GGGAACAu′ACCACGAu′Cu′GCu′GAAG | |
| | | Au′CAu′u′AAGGACAAGGACu′u′u′Cu′GGACAAu′GAGGA | |
| | | GAACGAAGAu′Au′CCu′GGAGGACAu′u′Gu′GCu′GACCC | |
| | | u′GACACu′Gu′u′u′GAAGAu′CGu′GAAAu′GAu′CGAAGA | |
| | | ACGGCu′GAAGACAu′ACGCCCAu′Cu′Gu′u′CGACGACA | |
| | | AGGu′u′Au′GAAGCAGCu′GAAGAGAAGAAGAu′Au′ACA | |
| | | GGGu′GGGGCAGGCu′Gu′CCAGGAAACu′GAu′CAACGG | |
| | | CAu′CCGGGACAAGCAGAGCGGCAAGACAAu′u′Cu′GGA | |
| | | Cu′u′CCu′CAAGAGCGACGGCu′u′CGCCAACAGAAAu′u′u | |
| | | ′u′Au′GCAGCu′GAu′CCAu′GACGAu′AGCCu′GACAu′u′C | |
| | | AAGGAAGACAu′CCAGAAGGCCCAGGu′GAGCGGGCAA | |
| | | GGCGACAGCCu′GCACGAGCACAu′CGCCAACCu′GGCC | |
| | | GGCu′Cu′CCCGCu′Au′CAAGAAGGGAAu′CCu′GCAGAC | |
| | | AGu′GAAGGu′GGu′u′GAu′GAGu′u′AGu′GAAAGu′GAu′G | |
| | | GGCCGGCACAAGCCu′GAGAAu′Au′CGu′GAu′u′GAAAu′ | |
| | | GGCCAGAGAGAACCAGACAACu′CAGAAGGGCCAGAA | |
| | | GAACu′CCCGAGAGAGAAu′GAAGAGAAu′CGAAGAGG | |
| | | GAAu′CAAAGAGCu′AGGCAGCCAAAu′CCu′CAAAGAAC | |
| | | ACCCCGu′GGAGAAu′ACCCAGCu′GCAGAACGAGAAGC | |
| | | u′Gu′ACCu′Gu′ACu′ACCu′GCAGAACGGCCGAGAu′Au′G | |
| | | u′ACGu′GGAu′CAGGAGCu′GGACAu′CAAu′AGGCu′Gu′C | |
| | | AGACu′ACGACGu′GGACCACAu′CGu′GCCu′CAGAGCu′u | |
| | | ′u′Cu′GAAGGAu′GAu′u′Cu′Au′CGACAACAAGGu′Gu′u′A | |
| | | ACCAGAu′CCGACAAGAACAGAGGCAAGAGCGAu′AAC | |
| | | Gu′CCCAu′CCGAAGAGGu′CGu′GAAGAAGAu′GAAGAA | |
| | | Cu′ACu′GGAGACAGCu′GCu′GAACGCGAAACu′GAu′u′A | |
| | | CCCAGAGAAAGu′u′u′GACAACCu′CACCAAAGCu′GAGA | |
| | | GAGGAGGCCu′GAGCGAGCu′GGACAAGGCu′GGu′u′u′C | |
| | | Au′CAAGCGGCAGCu′AGu′GGAAACACGGCAAAu′CACC | |
| | | AAGCACGu′GGCu′CAAAu′CCu′AGAu′AGCAGAAu′GAA | |
| | | u′ACCAAGu′ACGAu′GAGAACGACAAACu′GAu′CAGAG | |
| | | AAGu′GAAGGu′GAu′CACAu′u′AAAGu′Cu′AAACu′GGu′C | |
| | | AGCGACu′u′CAGAAAGGACu′u′CCAGu′u′Cu′ACAAAGu′ | |
| | | CAGAGAGAu′CAACAACu′ACCACCACGCCCACGACGC | |
| | | Cu′ACCu′GAACGCCGu′GGu′GGGCACCGCCCu′GAu′CAA | |
| | | GAAGu′Au′CCCAAGCu′GGAGu′CCGAAu′u′CGu′Gu′ACG | |
| | | GCGACu′ACAAGGu′Gu′ACGACGu′GCGGAAGAu′GAu′C | |
| | | GCCAAGu′Cu′GAACAGGAGAu′CGGCAAGGCCACCGCC | |
| | | AAGu′Au′u′u′Cu′u′Cu′ACAGCAACAu′u′ Au′GAACu′u′Cu′ | |
| | | u′CAAGACCGAGAu′CACCCu′GGCu′AAu′GGAGAGAu′C | |
| | | AGAAAGCGCCCCCu′GAu′CGAAACCAACGGAGAAACC | |
| | | GGCGAGAu′CGu′Gu′GGGACAAGGGCAGAGACu′u′CGC | |
| | | CACCGu′GAGAAAGGu′Gu′u′Gu′CCAu′GCCu′CAGGu′GA | |
| | | ACAu′CGu′GAAGAAGACAGAGGu′GCAGACAGGAGGGu | |
| | | ′u′u′AGCAAGGAGAGCAu′CCu′GCCu′AAACGGAACAGC | |
| | | GACAAGCu′GAu′CGCCAGAAAGAAGGACu′GGGAu′CCu | |
| | | ′AAGAAAu′ACGGCGGCu′u′CGAu′u′CCCCu′ACCGu′GGC | |
| | | Cu′ACAGCGu′GCu′GGu′GGu′GGCCAAGGu′CGAGAAGG | |
| | | GCAAGAGCAAGAAACu′GAAGu′CCGu′GAAGGAACu′G | |
| | | Cu′GGGAAu′CACCAu′CAu′GGAAAGAu′Cu′AGCu′u′CGA | |
| | | GAAGAAu′CCu′Au′CGACu′u′CCu′GGAAGCCAAGGGCu′ | |
| | | Au′AAAGAGGu′GAAGAAAGACCu′GAu′CAu′CAAGCu′C | |
| | | CCGAAGu′ACAGCCu′Gu′u′CGAGCu′GGAGAACGGCCGC | |
| | | AAGCGGAu′GCu′GGCCu′CCGCCGGCGAGCu′GCAGAAG | |
| | | GGCAAu′GAGCu′CGCCCu′GCCu′u′Cu′AAAu′ACGu′GAA | |
| | | Cu′u′CCu′Gu′ACCu′GGCCu′CGCACu′ACGAGAAGCu′CA | |
| | | AGGGCAGu′CCAGAGGACAACGAGCAGAAACAGCu′Gu′ | |
| | | u′CGu′GGAACAACACAAGCACu′ACCu′GGAu′GAGAu′u′ | |
| | | Au′CGAGCAGAu′CAGCGAGu′u′Cu′CCAAACGGGu′GAu′ | |
| | | CCu′GGCGGAu′GCu′AACCu′AGAu′AAGGu′u′Cu′GAGCG | |
| | | CCu′ACAACAAGCACCGCGACAAGCCu′Au′AAGAGAAC | |
| | | AGGCCGAGAAu′Au′CAu′CCACCu′Gu′u′CACCCu′GACC | |
| | | AACCu′GGGCGCACCu′GCu′GCCu′u′CAAGu′ACu′u′CGA | |
| | | CACCACCAu′CGACAGAAAGAGAu′ACACAAGCACCAA | |
| | | GGAGGu′u′Cu′GGACGCCACCCu′GAu′ACACCAGAGCAu | |
| | | ′CACAGGu′Cu′Gu′Au′GAAACCCGGAu′CGACCu′Gu′Cu′C | |
| | | AGCu′GGGCGGu′GACGAAGGu′GCu′GACAAGAGAACC | |
| | | GCCGACGGCAGCGAGu′u′CGAGAGCCCCAAGAAGAAG | |
| | | CGCAAGGu′Gu′GAGCGGCCGCu′u′AAu′u′AAGCu′GCCu′ | |
| | | u′Cu′GCGGGGCu′u′GCCu′u′Cu′GGCCAu′GCCCu′u′Cu′u′C | |
| | | u′Cu′CCCu′u′GCACCu′Gu′ACCu′Cu′u′GGu′Cu′u′u′GAAu′ | |
| | | AAAGCCu′GAGu′AGGAAGu′Cu′AGA | |
| | Protein | MSEVEFSHEYWMRHALTLAKRARDEREVPVGAVLVLNN | 2137 |
| | | RVIGEGWNRAIGLHDPTAHAEIMALRQGGLVMQNYRLID | |
| | | ATLYVTFEPCVMCAGAMIHSRIGRVVFGVRNAKTGAAG | |
| | | SLMDVLHHPGMNHRVEITEGILADECAALLCRFFRMPRR | |
| | | VFNAQKKAQSSTDSGGSSGGSSGSETPGTSESATPESSGG | |
| | | SSGGSDKKYSIGLAIGTNSVGWAVITDEYKVPSKKFKVL | |
| | | GNTDRHSIKKNLIGALLFDSGETAEATRLKRTARRRYTRR | |
| | | KNRICYLQEIFSNEMAKVDDSFFHRLEESFLVEEDKKHER | |
| | | HPIFGNIVDEVAYHEKYPTIYHLRKKLVDSTDKADLRLIY | |
| | | LALAHMIKFRGHFLIEGDLNPDNSDVDKLFIQLVQTYNQL | |
| | | FEENPINASGVDAKAILSARLSKSRRLENLIAQLPGEKKN | |
| | | GLFGNLIALSLGLTPNFKSNFDLAEDAKLQLSKDTYDDDL | |
| | | DNLLAQIGDQYADLFLAAKNLSDAILLSDILRVNTEITKA | |
| | | PLSASMIKRYDEHHQDLTLLKALVRQQLPEKYKEIFFDQS | |
| | | KNGYAGYIDGGASQEEFYKFIKPILEKMDGTEELLVKLN | |
| | | REDLLRKQRTFDNGSIPHQIHLGELHAILRRQEDFYPFLK | |
| | | DNREKIEKILTFRIPYYVGPLARGNSRFAWMTRKSEETITP | |
| | | WNFEEVVDKGASAQSFIERMTNFDKNLPNEKVLPKHSLL | |
| | | YEYFTVYNELTKVKYVTEGMRKPAFLSGEQKKAIVDLLF | |
| | | KTNRKVTVKQLKEDYFKKIECFDSVEISGVEDRFNASLGT | |
| | | YHDLLKIIKDKDFLDNEENEDILEDIVLTLTLFEDREMIEE | |
| | | RLKTYAHLFDDKVMKQLKRRRYTGWGRLSRKLINGIRD | |
| | | KQSGKTILDFLKSDGFANRNFMQLIHDDSLTFKEDIQKAQ | |
| | | VSGQGDSLHEHIANLAGSPAIKKGILQTVKVVDELVKVM | |
| | | GRHKPENIVIEMARENQTTQKGQKNSRERMKRIEEGIKEL | |
| | | GSQILKEHPVENTQLQNEKLYLYYLQNGRDMYVDQELDI | |
| | | NRLSDYDVDHIVPQSFLKDDSIDNKVLTRSDKNRGKSDN | |
| | | VPSEEVVKKMKNYWRQLLNAKLITQRKFDNLTKAERGG | |
| | | LSELDKAGFIKRQLVETRQITKHVAQILDSRMNTKYDEN | |
| | | DKLIREVKVITLKSKLVSDFRKDFQFYKVREINNYHHAH | |
| | | DAYLNAVVGTALIKKYPKLESEFVYGDYKVYDVRKMIA | |
| | | KSEQEIGKATAKYFFYSNIMNFFKTEITLANGEIRKRPLIE | |
| | | TNGETGEIVWDKGRDFATVRKVLSMPQVNIVKKTEVQT | |
| | | GGFSKESILPKRNSDKLIARKKDWDPKKYGGFDSPTVAY | |
| | | SVLVVAKVEKGKSKKLKSVKELLGITIMERSSFEKNPIDF | |
| | | LEAKGYKEVKKDLIIKLPKYSLFELENGRKRMLASAGEL | |
| | | QKGNELALPSKYVNFLYLASHYEKLKGSPEDNEQKQLFV | |
| | | EQHKHYLDEIIEQISEFSKRVILADANLDKVLSAYNKHRD | |
| | | KPIREQAENIIHLFTLTNLGAPAAFKYFDTTIDRKRYTSTK | |
| | | EVLDATLIHQSITGLYETRIDLSQLGGDEGADKRTADGSE | |
| | | FESPKKKRKV | |
| 5′ UTR | mRNA | AGGAAAu′AAGAGAGAAAAGAAGAGu′AAGAAGAAAu′ | 2138 |
| | | Au′AAGAGCCACC | |
| TadA | mRNA | Au′Gu′Cu′GAGGu′GGAGu′u′Cu′CCCACGAGu′ACu′GGAu′ | 2175 |
| | | GCGGCAu′GCu′Cu′GACu′u′u′GGCCAAGAGAGCCCGAG | |
| | | Au′GAGCGGGAGGu′CCCu′Gu′GGGCGCAGu′GCu′GGu′G | |
| | | Cu′GAACAACAGGGu′GAu′CGGCGAGGGCu′GGAACCGG | |
| | | GCCAu′CGGCCu′GCACGACCCu′ACAGCu′CACGCCGAG | |
| | | Au′CAu′GGCCCu′u′AGACAGGGCGGCCu′GGu′GAu′GCA | |
| | | GAACu′ACAGACu′GAu′CGACGCCACACu′Gu′ACGu′CAC | |
| | | Cu′u′u′GAGCCu′u′GCGu′GAu′Gu′GCGCCGGAGCCAu′GA | |
| | | u′CCAu′AGCCGGAu′AGGACGGGu′GGu′Cu′u′u′GGCGu′G | |
| | | CGGAACGCGAAGACCGGCGCCGCCGGCAGCCu′u′Au′G | |
| | | GAu′Gu′GCu′GCACCAu′CCu′GGCAu′GAACCACAGGGu′ | |
| | | GGAGAu′CACCGAAGGCAu′CCu′GGCu′GAu′GAAu′Gu′G | |
| | | CCGCu′Cu′GCu′Gu′GCAGAu′u′Cu′u′u′CGGAu′GCCu′AGA | |
| | | AGAGu′Gu′u′CAACGCCCAGAAGAAAGCCCAGAGu′AGC | |
| | | ACCGAu′ | |
| | Protein | MSEVEFSHEYWMRHALTLAKRARDEREVPVGAVLVLNN | 2140 |
| | | RVIGEGWNRAIGLHDPTAHAEIMALRQGGLVMQNYRLID | |
| | | ATLYVTFEPCVMCAGAMIHSRIGRVVFGVRNAKTGAAG | |
| | | SLMDVLHHPGMNHRVEITEGILADECAALLCRFFRMPRR | |
| | | VFNAQKKAQSSTD | |
| N- | mRNA | AGCGGCGGCAGCAGCGGCGGCAGCAGCGGAAGCGAG | 2176 |
| terminal | | ACACCu′GGCACCAGCGAAu′CCGCCACACCu′GAGAGCu | |
| linker | | ′Cu′GGAGGAAGCu′CAGGCGGCu′Cu′ | |
| | Protein | SGGSSGGSSGSETPGTSESATPESSGGSSGGS | 20 |
| Cas9 | mRNA | GACAAGAAAu′ACu′CAAu′CGGACu′GGCCAu′CGGCACC | 2177 |
| nickase | | AAu′AGCGu′GGGCu′GGGCCGu′GAu′CACAGAu′GAAu′A | |
| | | u′AAGGu′GCCu′AGCAAGAAGu′u′CAAGGu′GCu′GGGCA | |
| | | ACACCGAu′AGACACAGCAu′CAAGAAGAACCu′GAu′CG | |
| | | GAGCCCu′GCu′Gu′u′CGACAGCGGCGAAACCGCCGAAG | |
| | | CCACCAGACu′GAAGAGAACCGCCAGAAGACGGu′ACA | |
| | | CCCGGCGu′AAGAACAGGAu′Cu′Gu′u′ACCu′GCAGGAG | |
| | | Au′Cu′u′CAGCAACGAAAu′GGCCAAGGu′GGACGACu′Cu | |
| | | ′u′u′Cu′u′CCACAGACu′GGAGGAGAGCu′u′u′Cu′GGu′GG | |
| | | AAGAAGACAAGAAGCAu′GAGCGGCACCCCAu′Cu′u′u′ | |
| | | GGCAACAu′CGu′GGACGAAGu′GGCCu′ACCACGAGAAA | |
| | | u′ACCCAACAAu′Cu′Au′CACCu′GAGAAAGAAGCu′GGu′ | |
| | | GGACAGCACCGAu′AAGGCCGACCu′GCGGCu′GAu′Cu′A | |
| | | CCu′GGCCCu′GGCACACAu′GAu′CAAGu′u′CAGAGGCCA | |
| | | Cu′u′CCu′GAu′CGAGGGCGACCu′GAACCCCGAu′AAu′A | |
| | | GCGAu′Gu′GGAu′AAGCu′Gu′u′CAu′CCAGCu′GGu′GCAG | |
| | | ACCu′ACAACCAGCu′Gu′u′CGAGGAGAACCCGAu′CAAC | |
| | | GCCu′CGGGAGu′u′GAu′GCCAAGGCAAu′CCu′Gu′Cu′GC | |
| | | u′AGACu′GAGu′AAGAGCAGAAGACu′GGAGAACCu′GA | |
| | | u′CGCCCAGCu′GCCCGGAGAGAAGAAGAAu′GGGCu′Gu | |
| | | ′u′u′GGCAACCu′GAu′u′GCCCu′Gu′Cu′Cu′GGGCCu′u′AC | |
| | | ACCu′AACu′u′CAAGAGCAACu′u′u′GACCu′GGCCGAAG | |
| | | ACGCCAAGCu′GCAACu′Gu′Cu′AAGGAu′ACCu′ACGAC | |
| | | GACGAu′Cu′GGACAACCu′GCu′GGCCCAAAu′CGGGGAu | |
| | | ′CAAu′ACGCCGACCu′Gu′u′CCu′GGCu′GCCAAGAAu′Cu′ | |
| | | Gu′Cu′GACGCCAu′CCu′u′Cu′Gu′CCGAu′ Au′CCu′GCGGG | |
| | | u′GAACACAGAGAu′AACCAAAGCu′CCu′Cu′u′AGu′GCG | |
| | | AGCAu′GAu′CAAGAGAu′Au′GAu′GAGCACCACCAAGAu | |
| | | ′Cu′GACGCu′CCu′GAAGGCCCu′GGu′CAGACAGCAGCu′ | |
| | | CCCu′GAGAAAu′ACAAGGAAAu′u′u′u′Cu′u′CGACCAGA | |
| | | GCAAGAAu′GGCu′ACGCCGGCu′ACAu′CGAu′GGCGGCG | |
| | | CCAGCCAGGAGGAAu′u′u′u′ACAAGu′u′u′Au′CAAACCA | |
| | | Au′CCu′CGAGAAGAu′GGACGGCACCGAGGAACu′GCu′C | |
| | | Gu′GAAGCu′GAACAGAGAGGACCu′ACu′GCGGAAGCA | |
| | | GCGGACGu′u′CGACAACGGCAGCAu′CCCu′CACCAGAu′ | |
| | | CCACCu′GGGu′GAGCu′GCACGCAAu′CCu′GAGAAGACA | |
| | | GGAAGAu′u′u′Cu′ACCCCu′u′CCu′GAAAGACAACCGGG | |
| | | AGAAGAu′CGAGAAGAu′CCu′GACAu′u′u′AGAAu′u′CCC | |
| | | u′ACu′ACGu′GGGCCCu′Cu′GGCu′AGAGGCAACu′CCCG | |
| | | Gu′u′CGCCu′GGAu′GACCCGGAAGu′CCGAAGAAACCAu | |
| | | ′CACCCCCu′GGAACu′u′u′GAGGAGGu′AGu′GGACAAGG | |
| | | GCGCCAGCGCu′CAGAGCu′u′u′Au′AGAGAGAAu′GACC | |
| | | AACu′u′CGACAAGAAu′Cu′GCCAAACGAGAAAGu′CCu′ | |
| | | GCCu′AAGCACu′Cu′Cu′GCu′Gu′ Au′GAGu′ACu′u′CACCG | |
| | | u′u′u′ACAACGAGCu′GACAAAGGu′GAAAu′ACGu′GACG | |
| | | GAGGGGAu′GAGGAAGCCCGCCu′u′CCu′GAGCGGCGAA | |
| | | CAGAAGAAGGCu′Au′CGu′u′GACCu′GCu′Gu′u′CAAGAC | |
| | | CAAu′AGGAAGGu′GACCGu′GAAGCAGCu′CAAGGAGG | |
| | | ACu′ACu′u′CAAGAAGAu′u′GAGu′GCu′u′CGACu′Cu′Gu′ | |
| | | GGAAAu′Cu′Cu′GGAGu′u′GAGGACCGGu′u′CAACGCAu′ | |
| | | CCCu′GGGAACAu′ACCACGAu′Cu′GCu′GAAGAu′CAu′u′ | |
| | | AAGGACAAGGACu′u′u′Cu′GGACAAu′GAGGAGAACGA | |
| | | AGAu′Au′CCu′GGAGGACAu′u′Gu′GCu′GACCCu′GACAC | |
| | | u′Gu′u′u′GAAGAu′CGu′GAAAu′GAu′CGAAGAACGGCu′ | |
| | | GAAGACAu′ACGCCCAu′Cu′Gu′u′CGACGACAAGGu′u′A | |
| | | u′GAAGCAGCu′GAAGAGAAGAAGAu′Au′ACAGGGu′GG | |
| | | GGCAGGCu′Gu′CCAGGAAACu′GAu′CAACGGCAu′CCGG | |
| | | GACAAGCAGAGCGGCAAGACAAu′u′Cu′GGACu′u′CCu′ | |
| | | CAAGAGCGACGGCu′u′CGCCAACAGAAAu′u′u′u′Au′GC | |
| | | AGCu′GAu′CCAu′GACGAu′AGCCu′GACAu′u′CAAGGAA | |
| | | GACAu′CCAGAAGGCCCAGGu′GAGCGGGCAAGGCGAC | |
| | | AGCCu′GCACGAGCACAu′CGCCAACCu′GGCCGGCu′Cu′ | |
| | | CCCGCu′Au′CAAGAAGGGAAu′CCu′GCAGACAGu′GAA | |
| | | GGu′GGu′u′GAu′GAGu′u′AGu′GAAAGu′GAu′GGGCCGG | |
| | | CACAAGCCu′GAGAAu′Au′CGu′GAu′u′GAAAu′GGCCAG | |
| | | AGAGAACCAGACAACu′CAGAAGGGCCAGAAGAACu′C | |
| | | CCGAGAGAGAAu′GAAGAGAAu′CGAAGAGGGAAu′CA | |
| | | AAGAGCu′AGGCAGCCAAAu′CCu′CAAAGAACACCCCG | |
| | | u′GGAGAAu′ACCCAGCu′GCAGAACGAGAAGCu′Gu′AC | |
| | | Cu′Gu′ACu′ACCu′GCAGAACGGCCGAGAu′Au′Gu′ACGu′ | |
| | | GGAu′CAGGAGCu′GGACAu′CAAu′AGGCu′Gu′CAGACu′ | |
| | | ACGACGu′GGACCACAu′CGu′GCCu′CAGAGCu′u′u′Cu′G | |
| | | AAGGAu′GAu′u′Cu′ Au′CGACAACAAGGu′Gu′u′AACCAG | |
| | | Au′CCGACAAGAACAGAGGCAAGAGCGAu′AACGu′CCC | |
| | | Au′CCGAAGAGGu′CGu′GAAGAAGAu′GAAGAACu′ACu′ | |
| | | GGAGACAGCu′GCu′GAACGCGAAACu′GAu′u′ACCCAG | |
| | | AGAAAGu′u′u′GACAACCu′CACCAAAGCu′GAGAGAGG | |
| | | AGGCCu′GAGCGAGCu′GGACAAGGCu′GGu′u′u′CAu′CA | |
| | | AGCGGCAGCu′AGu′GGAAACACGGCAAAu′CACCAAGC | |
| | | ACGu′GGCu′CAAAu′CCu′AGAu′AGCAGAAu′GAAu′ACC | |
| | | AAGu′ACGAu′GAGAACGACAAACu′GAu′CAGAGAAGu′ | |
| | | GAAGGu′GAu′CACAu′u′AAAGu′Cu′AAACu′GGu′CAGCG | |
| | | ACu′u′CAGAAAGGACu′u′CCAGu′u′Cu′ACAAAGu′CAGA | |
| | | GAGAu′CAACAACu′ACCACCACGCCCACGACGCCu′AC | |
| | | Cu′GAACGCCGu′GGu′GGGCACCGCCCu′GAu′CAAGAAG | |
| | | u′Au′CCCAAGCu′GGAGu′CCGAAu′u′CGu′Gu′ACGGCGA | |
| | | Cu′ACAAGGu′Gu′ACGACGu′GCGGAAGAu′GAu′CGCCA | |
| | | AGu′Cu′GAACAGGAGAu′CGGCAAGGCCACCGCCAAGu′ | |
| | | Au′u′u′Cu′u′Cu′ACAGCAACAu′u′Au′GAACu′u′Cu′u′CAA | |
| | | GACCGAGAu′CACCCu′GGCu′AAu′GGAGAGAu′CAGAA | |
| | | AGCGCCCCCu′GAu′CGAAACCAACGGAGAAACCGGCG | |
| | | AGAu′CGu′Gu′GGGACAAGGGCAGAGACu′u′CGCCACC | |
| | | Gu′GAGAAAGGu′Gu′u′Gu′CCAu′GCCu′CAGGu′GAACAu′ | |
| | | CGu′GAAGAAGACAGAGGu′GCAGACAGGAGGGu′u′u′A | |
| | | GCAAGGAGAGCAu′CCu′GCCu′AAACGGAACAGCGACA | |
| | | AGCu′GAu′CGCCAGAAAGAAGGACu′GGGAu′CCu′AAG | |
| | | AAAu′ACGGCGGCu′u′CGAu′u′CCCCu′ACCGu′GGCCu′A | |
| | | CAGCGu′GCu′GGu′GGu′GGCCAAGGu′CGAGAAGGGCA | |
| | | AGAGCAAGAAACu′GAAGu′CCGu′GAAGGAACu′GCu′G | |
| | | GGAAu′CACCAu′CAu′GGAAAGAu′Cu′AGCu′u′CGAGAA | |
| | | GAAu′CCu′Au′CGACu′u′CCu′GGAAGCCAAGGGCu′Au′A | |
| | | AAGAGGu′GAAGAAAGACCu′GAu′CAu′CAAGCu′CCCG | |
| | | AAGu′ACAGCCu′Gu′u′CGAGCu′GGAGAACGGCCGCAA | |
| | | GCGGAu′GCu′GGCCu′CCGCCGGCGAGCu′GCAGAAGGG | |
| | | CAAu′GAGCu′CGCCCu′GCCu′u′Cu′AAAu′ACGu′GAACu′ | |
| | | u′CCu′Gu′ACCu′GGCCu′CGCACu′ACGAGAAGCu′CAAG | |
| | | GGCAGu′CCAGAGGACAACGAGCAGAAACAGCu′Gu′u′C | |
| | | Gu′GGAACAACACAAGCACu′ACCu′GGAu′GAGAu′u′Au′ | |
| | | CGAGCAGAu′CAGCGAGu′u′Cu′CCAAACGGGu′GAu′CCu | |
| | | ′GGCGGAu′GCu′AACCu′AGAu′AAGGu′u′Cu′GAGCGCCu | |
| | | ′ACAACAAGCACCGCGACAAGCCu′Au′AAGAGAACAGG | |
| | | CCGAGAAu′Au′CAu′CCACCu′Gu′u′CACCCu′GACCAACC | |
| | | u′GGGCGCACCu′GCu′GCCu′u′CAAGu′ACu′u′CGACACC | |
| | | ACCAu′CGACAGAAAGAGAu′ACACAAGCACCAAGGAG | |
| | | Gu′u′Cu′GGACGCCACCCu′GAu′ACACCAGAGCAu′CACA | |
| | | GGu′Cu′Gu′Au′GAAACCCGGAu′CGACCu′Gu′Cu′CAGCu′ | |
| | | GGGCGGu′GAC | |
| | Protein | DKKYSIGLAIGTNSVGWAVITDEYKVPSKKFKVLGNTDR | 40 |
| | | HSIKKNLIGALLFDSGETAEATRLKRTARRRYTRRKNRIC | |
| | | YLQEIFSNEMAKVDDSFFHRLEESFLVEEDKKHERHPIFG | |
| | | NIVDEVAYHEKYPTIYHLRKKLVDSTDKADLRLIYLALA | |
| | | HMIKFRGHFLIEGDLNPDNSDVDKLFIQLVQTYNQLFEEN | |
| | | PINASGVDAKAILSARLSKSRRLENLIAQLPGEKKNGLFG | |
| | | NLIALSLGLTPNFKSNFDLAEDAKLQLSKDTYDDDLDNL | |
| | | LAQIGDQYADLFLAAKNLSDAILLSDILRVNTEITKAPLSA | |
| | | SMIKRYDEHHQDLTLLKALVRQQLPEKYKEIFFDQSKNG | |
| | | YAGYIDGGASQEEFYKFIKPILEKMDGTEELLVKLNREDL | |
| | | LRKQRTFDNGSIPHQIHLGELHAILRRQEDFYPFLKDNRE | |
| | | KIEKILTFRIPYYVGPLARGNSRFAWMTRKSEETITPWNFE | |
| | | EVVDKGASAQSFIERMTNFDKNLPNEKVLPKHSLLYEYF | |
| | | TVYNELTKVKYVTEGMRKPAFLSGEQKKAIVDLLFKTNR | |
| | | KVTVKQLKEDYFKKIECFDSVEISGVEDRFNASLGTYHDL | |
| | | LKIIKDKDFLDNEENEDILEDIVLTLTLFEDREMIEERLKT | |
| | | YAHLFDDKVMKQLKRRRYTGWGRLSRKLINGIRDKQSG | |
| | | KTILDFLKSDGFANRNFMQLIHDDSLTFKEDIQKAQVSGQ | |
| | | GDSLHEHIANLAGSPAIKKGILQTVKVVDELVKVMGRHK | |
| | | PENIVIEMARENQTTQKGQKNSRERMKRIEEGIKELGSQI | |
| | | LKEHPVENTQLQNEKLYLYYLQNGRDMYVDQELDINRL | |
| | | SDYDVDHIVPQSFLKDDSIDNKVLTRSDKNRGKSDNVPS | |
| | | EEVVKKMKNYWRQLLNAKLITQRKFDNLTKAERGGLSE | |
| | | LDKAGFIKRQLVETRQITKHVAQILDSRMNTKYDENDKLI | |
| | | REVKVITLKSKLVSDFRKDFQFYKVREINNYHHAHDAYL | |
| | | NAVVGTALIKKYPKLESEFVYGDYKVYDVRKMIAKSEQ | |
| | | EIGKATAKYFFYSNIMNFFKTEITLANGEIRKRPLIETNGE | |
| | | TGEIVWDKGRDFATVRKVLSMPQVNIVKKTEVQTGGFS | |
| | | KESILPKRNSDKLIARKKDWDPKKYGGFDSPTVAYSVLV | |
| | | VAKVEKGKSKKLKSVKELLGITIMERSSFEKNPIDFLEAK | |
| | | GYKEVKKDLIIKLPKYSLFELENGRKRMLASAGELQKGN | |
| | | ELALPSKYVNFLYLASHYEKLKGSPEDNEQKQLFVEQHK | |
| | | HYLDEIIEQISEFSKRVILADANLDKVLSAYNKHRDKPIRE | |
| | | QAENIIHLFTLTNLGAPAAFKYFDTTIDRKRYTSTKEVLD | |
| | | ATLIHQSITGLYETRIDLSQLGGD | |
| C- | mRNA | GAAGGu′GCu′GAC | 2178 |
| terminal | Protein | EGAD | 2144 |
| linker | | | |
| Nuclear | mRNA | AAGAGAACCGCCGACGGCAGCGAGu′u′CGAGAGCCCC | 2179 |
| localization | | AAGAAGAAGCGCAAGGu′Gu′GA | |
| sequence | Protein | KRTADGSEFESPKKKRKV | 2146 |
| (NLS) | | | |
| 3′ UTR | mRNA | GCGGCCGCu′u′AAu′u′AAGCu′GCCu′u′Cu′GCGGGGCu′u′ | 2147 |
| | | GCCu′u′Cu′GGCCAu′GCCCu′u′Cu′u′Cu′Cu′CCCu′u′GCAC | |
| | | Cu′Gu′ACCu′Cu′u′GGu′Cu′u′u′GAAu′AAAGCCu′GAGu′A | |
| | | GGAAGu′Cu′AGA | |

ABE8.8m DNA and protein sequences

| | | | SEQ ID |
|---|---|---|---|
| Region | Sequence | | NO |
| Full | DNA | ATGTCCGAAGTCGAGTTTTCCCATGAGTACTGGATGAG | 2180 |
| sequence | | ACACGCATTGACTCTCGCAAAGAGGGCTCGAGATGAA | |
| | | CGCGAGGTGCCCGTGGGGGCAGTACTCGTGCTCAACA | |
| | | ATCGCGTAATCGGCGAAGGTTGGAATAGGGCAATCGG | |
| | | ACTCCACGACCCCACTGCACATGCGGAAATCATGGCCC | |
| | | TTCGACAGGGAGGGCTTGTGATGCAGAATTATCGACTT | |
| | | ATCGATGCGACGCTGTACGTCACGTTTGAACCTTGCGT | |
| | | AATGTGCGCGGGAGCTATGATTCACTCCCGCATTGGAC | |
| | | GAGTTGTATTCGGTGTTCGCAACGCCAAGACGGGTGCC | |
| | | GCAGGTTCACTGATGGACGTGCTGCATCATCCAGGCAT | |
| | | GAACCACCGGGTAGAAATCACAGAAGGCATATTGGCG | |
| | | GACGAATGTGCGGCGCTGTTGTGTCGTTTTTTTCGCAT | |
| | | GCCCAGGCGGGTCTTTAACGCCCAGAAAAAAGCACAA | |
| | | TCCTCTACTGACTCTGGTGGTTCTTCTGGTGGTTCTAGC | |
| | | GGCAGCGAGACTCCCGGGACCTCAGAGTCCGCCACAC | |
| | | CCGAAAGTTCTGGTGGTTCTTCTGGTGGTTCTGACAAG | |
| | | AAGTACAGCATCGGCCTGGCCATCGGCACCAACTCTGT | |
| | | GGGCTGGGCCGTGATCACCGACGAGTACAAGGTGCCC | |
| | | AGCAAGAAATTCAAGGTGCTGGGCAACACCGACCGGC | |
| | | ACAGCATCAAGAAGAACCTGATCGGAGCCCTGCTGTT | |
| | | CGACAGCGGCGAAACAGCCGAGGCCACCCGGCTGAAG | |
| | | AGAACCGCCAGAAGAAGATACACCAGACGGAAGAAC | |
| | | CGGATCTGCTATCTGCAAGAGATCTTCAGCAACGAGAT | |
| | | GGCCAAGGTGGACGACAGCTTCTTCCACAGACTGGAA | |
| | | GAGTCCTTCCTGGTGGAAGAGGATAAGAAGCACGAGC | |
| | | GGCACCCCATCTTCGGCAACATCGTGGACGAGGTGGC | |
| | | CTACCACGAGAAGTACCCCACCATCTACCACCTGAGA | |
| | | AAGAAACTGGTGGACAGCACCGACAAGGCCGACCTGC | |
| | | GGCTGATCTATCTGGCCCTGGCCCACATGATCAAGTTC | |
| | | CGGGGCCACTTCCTGATCGAGGGCGACCTGAACCCCG | |
| | | ACAACAGCGACGTGGACAAGCTGTTCATCCAGCTGGT | |
| | | GCAGACCTACAACCAGCTGTTCGAGGAAAACCCCATC | |
| | | AACGCCAGCGGCGTGGACGCCAAGGCCATCCTGTCTG | |
| | | CCAGACTGAGCAAGAGCAGACGGCTGGAAAATCTGAT | |
| | | CGCCCAGCTGCCCGGCGAGAAGAAGAATGGCCTGTTC | |
| | | GGAAACCTGATTGCCCTGAGCCTGGGCCTGACCCCCAA | |
| | | CTTCAAGAGCAACTTCGACCTGGCCGAGGATGCCAAA | |
| | | CTGCAGCTGAGCAAGGACACCTACGACGACGACCTGG | |
| | | ACAACCTGCTGGCCCAGATCGGCGACCAGTACGCCGA | |
| | | CCTGTTTCTGGCCGCCAAGAACCTGTCCGACGCCATCC | |
| | | TGCTGAGCGACATCCTGAGAGTGAACACCGAGATCAC | |
| | | CAAGGCCCCCCTGAGCGCCTCTATGATCAAGAGATAC | |
| | | GACGAGCACCACCAGGACCTGACCCTGCTGAAAGCTC | |
| | | TCGTGCGGCAGCAGCTGCCTGAGAAGTACAAAGAGAT | |
| | | TTTCTTCGACCAGAGCAAGAACGGCTACGCCGGCTACA | |
| | | TTGACGGCGGAGCCAGCCAGGAAGAGTTCTACAAGTT | |
| | | CATCAAGCCCATCCTGGAAAAGATGGACGGCACCGAG | |
| | | GAACTGCTCGTGAAGCTGAACAGAGAGGACCTGCTGC | |
| | | GGAAGCAGCGGACCTTCGACAACGGCAGCATCCCCCA | |
| | | CCAGATCCACCTGGGAGAGCTGCACGCCATTCTGCGGC | |
| | | GGCAGGAAGATTTTTACCCATTCCTGAAGGACAACCG | |
| | | GGAAAAGATCGAGAAGATCCTGACCTTCCGCATCCCCT | |
| | | ACTACGTGGGCCCTCTGGCCAGGGGAAACAGCAGATT | |
| | | CGCCTGGATGACCAGAAAGAGCGAGGAAACCATCACC | |
| | | CCCTGGAACTTCGAGGAAGTGGTGGACAAGGGCGCTT | |
| | | CCGCCCAGAGCTTCATCGAGCGGATGACCAACTTCGAT | |
| | | AAGAACCTGCCCAACGAGAAGGTGCTGCCCAAGCACA | |
| | | GCCTGCTGTACGAGTACTTCACCGTGTATAACGAGCTG | |
| | | ACCAAAGTGAAATACGTGACCGAGGGAATGAGAAAGC | |
| | | CCGCCTTCCTGAGCGGCGAGCAGAAAAAGGCCATCGT | |
| | | GGACCTGCTGTTCAAGACCAACCGGAAAGTGACCGTG | |
| | | AAGCAGCTGAAAGAGGACTACTTCAAGAAAATCGAGT | |
| | | GCTTCGACTCCGTGGAAATCTCCGGCGTGGAAGATCGG | |
| | | TTCAACGCCTCCCTGGGCACATACCACGATCTGCTGAA | |
| | | AATTATCAAGGACAAGGACTTCCTGGACAATGAGGAA | |
| | | AACGAGGACATTCTGGAAGATATCGTGCTGACCCTGA | |
| | | CACTGTTTGAGGACAGAGAGATGATCGAGGAACGGCT | |
| | | GAAAACCTATGCCCACCTGTTCGACGACAAAGTGATG | |
| | | AAGCAGCTGAAGCGGCGGAGATACACCGGCTGGGGCA | |
| | | GGCTGAGCCGGAAGCTGATCAACGGCATCCGGGACAA | |
| | | GCAGTCCGGCAAGACAATCCTGGATTTCCTGAAGTCCG | |
| | | ACGGCTTCGCCAACAGAAACTTCATGCAGCTGATCCAC | |
| | | GACGACAGCCTGACCTTTAAAGAGGACATCCAGAAAG | |
| | | CCCAGGTGTCCGGCCAGGGCGATAGCCTGCACGAGCA | |
| | | CATTGCCAATCTGGCCGGCAGCCCCGCCATTAAGAAG | |
| | | GGCATCCTGCAGACAGTGAAGGTGGTGGACGAGCTCG | |
| | | TGAAAGTGATGGGCCGGCACAAGCCCGAGAACATCGT | |
| | | GATCGAAATGGCCAGAGAGAACCAGACCACCCAGAAG | |
| | | GGACAGAAGAACAGCCGCGAGAGAATGAAGCGGATC | |
| | | GAAGAGGGCATCAAAGAGCTGGGCAGCCAGATCCTGA | |
| | | AAGAACACCCCGTGGAAAACACCCAGCTGCAGAACGA | |
| | | GAAGCTGTACCTGTACTACCTGCAGAATGGGGGGAT | |
| | | ATGTACGTGGACCAGGAACTGGACATCAACCGGCTGT | |
| | | CCGACTACGATGTGGACCATATCGTGCCTCAGAGCTTT | |
| | | CTGAAGGACGACTCCATCGACAACAAGGTGCTGACCA | |
| | | GAAGCGACAAGAACCGGGGCAAGAGCGACAACGTGC | |
| | | CCTCCGAAGAGGTCGTGAAGAAGATGAAGAACTACTG | |
| | | GCGGCAGCTGCTGAACGCCAAGCTGATTACCCAGAGA | |
| | | AAGTTCGACAATCTGACCAAGGCCGAGAGAGGCGGCC | |
| | | TGAGCGAACTGGATAAGGCCGGCTTCATCAAGAGACA | |
| | | GCTGGTGGAAACCCGGCAGATCACAAAGCACGTGGCA | |
| | | CAGATCCTGGACTCCCGGATGAACACTAAGTACGACG | |
| | | AGAATGACAAGCTGATCCGGGAAGTGAAAGTGATCAC | |
| | | CCTGAAGTCCAAGCTGGTGTCCGATTTCCGGAAGGATT | |
| | | TCCAGTTTTACAAAGTGCGCGAGATCAACAACTACCAC | |
| | | CACGCCCACGACGCCTACCTGAACGCCGTCGTGGGAA | |
| | | CCGCCCTGATCAAAAAGTACCCTAAGCTGGAAAGCGA | |
| | | GTTCGTGTACGGCGACTACAAGGTGTACGACGTGCGG | |
| | | AAGATGATCGCCAAGAGCGAGCAGGAAATCGGCAAGG | |
| | | CTACCGCCAAGTACTTCTTCTACAGCAACATCATGAAC | |
| | | TTTTTCAAGACCGAGATTACCCTGGCCAACGGCGAGAT | |
| | | CCGGAAGCGGCCTCTGATCGAGACAAACGGCGAAACC | |
| | | GGGGAGATCGTGTGGGATAAGGGCCGGGATTTTGCCA | |
| | | CCGTGCGGAAAGTGCTGAGCATGCCCCAAGTGAATAT | |
| | | CGTGAAAAAGACCGAGGTGCAGACAGGCGGCTTCAGC | |
| | | AAAGAGTCTATCCTGCCCAAGAGGAACAGCGATAAGC | |
| | | TGATCGCCAGAAAGAAGGACTGGGACCCTAAGAAGTA | |
| | | CGGCGGCTTCGACAGCCCCACCGTGGCCTATTCTGTGC | |
| | | TGGTGGTGGCCAAAGTGGAAAAGGGCAAGTCCAAGAA | |
| | | ACTGAAGAGTGTGAAAGAGCTGCTGGGGATCACCATC | |
| | | ATGGAAAGAAGCAGCTTCGAGAAGAATCCCATCGACT | |
| | | TTCTGGAAGCCAAGGGCTACAAAGAAGTGAAAAAGGA | |
| | | CCTGATCATCAAGCTGCCTAAGTACTCCCTGTTCGAGC | |
| | | TGGAAAACGGCCGGAAGAGAATGCTGGCCTCTGCCGG | |
| | | CGAACTGCAGAAGGGAAACGAACTGGCCCTGCCCTCC | |
| | | AAATATGTGAACTTCCTGTACCTGGCCAGCCACTATGA | |
| | | GAAGCTGAAGGGCTCCCCCGAGGATAATGAGCAGAAA | |
| | | CAGCTGTTTGTGGAACAGCACAAGCACTACCTGGACG | |
| | | AGATCATCGAGCAGATCAGCGAGTTCTCCAAGAGAGT | |
| | | GATCCTGGCCGACGCTAATCTGGACAAAGTGCTGTCCG | |
| | | CCTACAACAAGCACCGGGATAAGCCCATCAGAGAGCA | |
| | | GGCCGAGAATATCATCCACCTGTTTACCCTGACCAATC | |
| | | TGGGAGCCCCTGCCGCCTTCAAGTACTTTGACACCACC | |
| | | ATCGACCGGAAGAGGTACACCAGCACCAAAGAGGTGC | |
| | | TGGACGCCACCCTGATCCACCAGAGCATCACCGGCCTG | |
| | | TACGAGACACGGATCGACCTGTCTCAGCTGGGAGGTG | |
| | | ACGAGGGAGCTGATAAGCGCACCGCCGATGGTTCCGA | |
| | | GTTCGAAAGCCCCAAGAAGAAGAGGAAAGTCTAA | |
| | Protein | MSEVEFSHEYWMRHALTLAKRARDEREVPVGAVLVLNN | 2137 |
| | | RVIGEGWNRAIGLHDPTAHAEIMALRQGGLVMQNYRLID | |
| | | ATLYVTFEPCVMCAGAMIHSRIGRVVFGVRNAKTGAAG | |
| | | SLMDVLHHPGMNHRVEITEGILADECAALLCRFFRMPRR | |
| | | VFNAQKKAQSSTDSGGSSGGSSGSETPGTSESATPESSGG | |
| | | SSGGSDKKYSIGLAIGTNSVGWAVITDEYKVPSKKFKVL | |
| | | GNTDRHSIKKNLIGALLFDSGETAEATRLKRTARRRYTRR | |
| | | KNRICYLQEIFSNEMAKVDDSFFHRLEESFLVEEDKKHER | |
| | | HPIFGNIVDEVAYHEKYPTIYHLRKKLVDSTDKADLRLIY | |
| | | LALAHMIKFRGHFLIEGDLNPDNSDVDKLFIQLVQTYNQL | |
| | | FEENPINASGVDAKAILSARLSKSRRLENLIAQLPGEKKN | |
| | | GLFGNLIALSLGLTPNFKSNFDLAEDAKLQLSKDTYDDDL | |
| | | DNLLAQIGDQYADLFLAAKNLSDAILLSDILRVNTEITKA | |
| | | PLSASMIKRYDEHHQDLTLLKALVRQQLPEKYKEIFFDQS | |
| | | KNGYAGYIDGGASQEEFYKFIKPILEKMDGTEELLVKLN | |
| | | REDLLRKQRTFDNGSIPHQIHLGELHAILRRQEDFYPFLK | |
| | | DNREKIEKILTFRIPYYVGPLARGNSRFAWMTRKSEETITP | |
| | | WNFEEVVDKGASAQSFIERMTNFDKNLPNEKVLPKHSLL | |
| | | YEYFTVYNELTKVKYVTEGMRKPAFLSGEQKKAIVDLLF | |
| | | KTNRKVTVKQLKEDYFKKIECFDSVEISGVEDRFNASLGT | |
| | | YHDLLKIIKDKDFLDNEENEDILEDIVLTLTLFEDREMIEE | |
| | | RLKTYAHLFDDKVMKQLKRRRYTGWGRLSRKLINGIRD | |
| | | KQSGKTILDFLKSDGFANRNFMQLIHDDSLTFKEDIQKAQ | |
| | | VSGQGDSLHEHIANLAGSPAIKKGILQTVKVVDELVKVM | |
| | | GRHKPENIVIEMARENQTTQKGQKNSRERMKRIEEGIKEL | |
| | | GSQILKEHPVENTQLQNEKLYLYYLQNGRDMYVDQELDI | |
| | | NRLSDYDVDHIVPQSFLKDDSIDNKVLTRSDKNRGKSDN | |
| | | VPSEEVVKKMKNYWRQLLNAKLITQRKFDNLTKAERGG | |
| | | LSELDKAGFIKRQLVETRQITKHVAQILDSRMNTKYDEN | |
| | | DKLIREVKVITLKSKLVSDFRKDFQFYKVREINNYHHAH | |
| | | DAYLNAVVGTALIKKYPKLESEFVYGDYKVYDVRKMIA | |
| | | KSEQEIGKATAKYFFYSNIMNFFKTEITLANGEIRKRPLIE | |
| | | TNGETGEIVWDKGRDFATVRKVLSMPQVNIVKKTEVQT | |
| | | GGFSKESILPKRNSDKLIARKKDWDPKKYGGFDSPTVAY | |
| | | SVLVVAKVEKGKSKKLKSVKELLGITIMERSSFEKNPIDF | |
| | | LEAKGYKEVKKDLIIKLPKYSLFELENGRKRMLASAGEL | |
| | | QKGNELALPSKYVNFLYLASHYEKLKGSPEDNEQKQLFV | |
| | | EQHKHYLDEIIEQISEFSKRVILADANLDKVLSAYNKHRD | |
| | | KPIREQAENIIHLFTLTNLGAPAAFKYFDTTIDRKRYTSTK | |
| | | EVLDATLIHQSITGLYETRIDLSQLGGDEGADKRTADGSE | |
| | | FESPKKKRKV | |
| TadA | DNA | ATGTCCGAAGTCGAGTTTTCCCATGAGTACTGGATGAG | 2181 |
| | | ACACGCATTGACTCTCGCAAAGAGGGCTCGAGATGAA | |
| | | CGCGAGGTGCCCGTGGGGGCAGTACTCGTGCTCAACA | |
| | | ATCGCGTAATCGGCGAAGGTTGGAATAGGGCAATCGG | |
| | | ACTCCACGACCCCACTGCACATGCGGAAATCATGGCCC | |
| | | TTCGACAGGGAGGGCTTGTGATGCAGAATTATCGACTT | |
| | | ATCGATGCGACGCTGTACGTCACGTTTGAACCTTGCGT | |
| | | AATGTGCGCGGGAGCTATGATTCACTCCCGCATTGGAC | |
| | | GAGTTGTATTCGGTGTTCGCAACGCCAAGACGGGTGCC | |
| | | GCAGGTTCACTGATGGACGTGCTGCATCATCCAGGCAT | |
| | | GAACCACCGGGTAGAAATCACAGAAGGCATATTGGCG | |
| | | GACGAATGTGCGGCGCTGTTGTGTCGTTTTTTTCGCAT | |
| | | GCCCAGGCGGGTCTTTAACGCCCAGAAAAAAGCACAA | |
| | | TCCTCTACTGAC | |
| | Protein | MSEVEFSHEYWMRHALTLAKRARDEREVPVGAVLVLNN | 2140 |
| | | RVIGEGWNRAIGLHDPTAHAEIMALRQGGLVMQNYRLID | |
| | | ATLYVTFEPCVMCAGAMIHSRIGRVVFGVRNAKTGAAG | |
| | | SLMDVLHHPGMNHR VEITEGILADECAALLCRFFRMPRR | |
| | | VFNAQKKAQSSTD | |
| Linker | DNA | TCTGGTGGTTCTTCTGGTGGTTCTAGCGGCAGCGAGAC | 2182 |
| between | | TCCCGGGACCTCAGAGTCCGCCACACCCGAAAGTTCTG | |
| TadA | | GTGGTTCTTCTGGTGGTTCT | |
| and Cas9 | Protein | SGGSSGGSSGSETPGTSESATPESSGGSSGGS | 20 |
| nickase | | | |
| Cas9 | DNA | GACAAGAAGTACAGCATCGGCCTGGCCATCGGCACCA | 2183 |
| nickase | | ACTCTGTGGGCTGGGCCGTGATCACCGACGAGTACAA | |
| | | GGTGCCCAGCAAGAAATTCAAGGTGCTGGGCAACACC | |
| | | GACCGGCACAGCATCAAGAAGAACCTGATCGGAGCCC | |
| | | TGCTGTTCGACAGCGGCGAAACAGCCGAGGCCACCCG | |
| | | GCTGAAGAGAACCGCCAGAAGAAGATACACCAGACGG | |
| | | AAGAACCGGATCTGCTATCTGCAAGAGATCTTCAGCA | |
| | | ACGAGATGGCCAAGGTGGACGACAGCTTCTTCCACAG | |
| | | ACTGGAAGAGTCCTTCCTGGTGGAAGAGGATAAGAAG | |
| | | CACGAGCGGCACCCCATCTTCGGCAACATCGTGGACG | |
| | | AGGTGGCCTACCACGAGAAGTACCCCACCATCTACCA | |
| | | CCTGAGAAAGAAACTGGTGGACAGCACCGACAAGGCC | |
| | | GACCTGCGGCTGATCTATCTGGCCCTGGCCCACATGAT | |
| | | CAAGTTCCGGGGCCACTTCCTGATCGAGGGCGACCTGA | |
| | | ACCCCGACAACAGCGACGTGGACAAGCTGTTCATCCA | |
| | | GCTGGTGCAGACCTACAACCAGCTGTTCGAGGAAAAC | |
| | | CCCATCAACGCCAGCGGCGTGGACGCCAAGGCCATCC | |
| | | TGTCTGCCAGACTGAGCAAGAGCAGACGGCTGGAAAA | |
| | | TCTGATCGCCCAGCTGCCCGGCGAGAAGAAGAATGGC | |
| | | CTGTTCGGAAACCTGATTGCCCTGAGCCTGGGCCTGAC | |
| | | CCCCAACTTCAAGAGCAACTTCGACCTGGCCGAGGAT | |
| | | GCCAAACTGCAGCTGAGCAAGGACACCTACGACGACG | |
| | | ACCTGGACAACCTGCTGGCCCAGATCGGCGACCAGTA | |
| | | CGCCGACCTGTTTCTGGCCGCCAAGAACCTGTCCGACG | |
| | | CCATCCTGCTGAGCGACATCCTGAGAGTGAACACCGA | |
| | | GATCACCAAGGCCCCCCTGAGCGCCTCTATGATCAAGA | |
| | | GATACGACGAGCACCACCAGGACCTGACCCTGCTGAA | |
| | | AGCTCTCGTGCGGCAGCAGCTGCCTGAGAAGTACAAA | |
| | | GAGATTTTCTTCGACCAGAGCAAGAACGGCTACGCCG | |
| | | GCTACATTGACGGCGGAGCCAGCCAGGAAGAGTTCTA | |
| | | CAAGTTCATCAAGCCCATCCTGGAAAAGATGGACGGC | |
| | | ACCGAGGAACTGCTCGTGAAGCTGAACAGAGAGGACC | |
| | | TGCTGCGGAAGCAGCGGACCTTCGACAACGGCAGCAT | |
| | | CCCCCACCAGATCCACCTGGGAGAGCTGCACGCCATTC | |
| | | TGCGGCGGCAGGAAGATTTTTACCCATTCCTGAAGGAC | |
| | | AACCGGGAAAAGATCGAGAAGATCCTGACCTTCCGCA | |
| | | TCCCCTACTACGTGGGCCCTCTGGCCAGGGGAAACAGC | |
| | | AGATTCGCCTGGATGACCAGAAAGAGCGAGGAAACCA | |
| | | TCACCCCCTGGAACTTCGAGGAAGTGGTGGACAAGGG | |
| | | CGCTTCCGCCCAGAGCTTCATCGAGCGGATGACCAACT | |
| | | TCGATAAGAACCTGCCCAACGAGAAGGTGCTGCCCAA | |
| | | GCACAGCCTGCTGTACGAGTACTTCACCGTGTATAACG | |
| | | AGCTGACCAAAGTGAAATACGTGACCGAGGGAATGAG | |
| | | AAAGCCCGCCTTCCTGAGCGGCGAGCAGAAAAAGGCC | |
| | | ATCGTGGACCTGCTGTTCAAGACCAACCGGAAAGTGA | |
| | | CCGTGAAGCAGCTGAAAGAGGACTACTTCAAGAAAAT | |
| | | CGAGTGCTTCGACTCCGTGGAAATCTCCGGCGTGGAAG | |
| | | ATCGGTTCAACGCCTCCCTGGGCACATACCACGATCTG | |
| | | CTGAAAATTATCAAGGACAAGGACTTCCTGGACAATG | |
| | | AGGAAAACGAGGACATTCTGGAAGATATCGTGCTGAC | |
| | | CCTGACACTGTTTGAGGACAGAGAGATGATCGAGGAA | |
| | | CGGCTGAAAACCTATGCCCACCTGTTCGACGACAAAGT | |
| | | GATGAAGCAGCTGAAGCGGCGGAGATACACCGGCTGG | |
| | | GGCAGGCTGAGCCGGAAGCTGATCAACGGCATCCGGG | |
| | | ACAAGCAGTCCGGCAAGACAATCCTGGATTTCCTGAA | |
| | | GTCCGACGGCTTCGCCAACAGAAACTTCATGCAGCTG | |
| | | ATCCACGACGACAGCCTGACCTTTAAAGAGGACATCC | |
| | | AGAAAGCCCAGGTGTCCGGCCAGGGCGATAGCCTGCA | |
| | | CGAGCACATTGCCAATCTGGCCGGCAGCCCCGCCATTA | |
| | | AGAAGGGCATCCTGCAGACAGTGAAGGTGGTGGACGA | |
| | | GCTCGTGAAAGTGATGGGCCGGCACAAGCCCGAGAAC | |
| | | ATCGTGATCGAAATGGCCAGAGAGAACCAGACCACCC | |
| | | AGAAGGGACAGAAGAACAGCCGCGAGAGAATGAAGC | |
| | | GGATCGAAGAGGGCATCAAAGAGCTGGGCAGCCAGAT | |
| | | CCTGAAAGAACACCCCGTGGAAAACACCCAGCTGCAG | |
| | | AACGAGAAGCTGTACCTGTACTACCTGCAGAATGGGC | |
| | | GGGATATGTACGTGGACCAGGAACTGGACATCAACCG | |
| | | GCTGTCCGACTACGATGTGGACCATATCGTGCCTCAGA | |
| | | GCTTTCTGAAGGACGACTCCATCGACAACAAGGTGCTG | |
| | | ACCAGAAGCGACAAGAACCGGGGCAAGAGCGACAAC | |
| | | GTGCCCTCCGAAGAGGTCGTGAAGAAGATGAAGAACT | |
| | | ACTGGCGGCAGCTGCTGAACGCCAAGCTGATTACCCA | |
| | | GAGAAAGTTCGACAATCTGACCAAGGCCGAGAGAGGC | |
| | | GGCCTGAGCGAACTGGATAAGGCCGGCTTCATCAAGA | |
| | | GACAGCTGGTGGAAACCCGGCAGATCACAAAGCACGT | |
| | | GGCACAGATCCTGGACTCCCGGATGAACACTAAGTAC | |
| | | GACGAGAATGACAAGCTGATCCGGGAAGTGAAAGTGA | |
| | | TCACCCTGAAGTCCAAGCTGGTGTCCGATTTCCGGAAG | |
| | | GATTTCCAGTTTTACAAAGTGCGCGAGATCAACAACTA | |
| | | CCACCACGCCCACGACGCCTACCTGAACGCCGTCGTGG | |
| | | GAACCGCCCTGATCAAAAAGTACCCTAAGCTGGAAAG | |
| | | CGAGTTCGTGTACGGCGACTACAAGGTGTACGACGTG | |
| | | CGGAAGATGATCGCCAAGAGCGAGCAGGAAATCGGCA | |
| | | AGGCTACCGCCAAGTACTTCTTCTACAGCAACATCATG | |
| | | AACTTTTTCAAGACCGAGATTACCCTGGCCAACGGCGA | |
| | | GATCCGGAAGCGGCCTCTGATCGAGACAAACGGCGAA | |
| | | ACCGGGGAGATCGTGTGGGATAAGGGCCGGGATTTTG | |
| | | CCACCGTGCGGAAAGTGCTGAGCATGCCCCAAGTGAA | |
| | | TATCGTGAAAAAGACCGAGGTGCAGACAGGCGGCTTC | |
| | | AGCAAAGAGTCTATCCTGCCCAAGAGGAACAGCGATA | |
| | | AGCTGATCGCCAGAAAGAAGGACTGGGACCCTAAGAA | |
| | | GTACGGCGGCTTCGACAGCCCCACCGTGGCCTATTCTG | |
| | | TGCTGGTGGTGGCCAAAGTGGAAAAGGGCAAGTCCAA | |
| | | GAAACTGAAGAGTGTGAAAGAGCTGCTGGGGATCACC | |
| | | ATCATGGAAAGAAGCAGCTTCGAGAAGAATCCCATCG | |
| | | ACTTTCTGGAAGCCAAGGGCTACAAAGAAGTGAAAAA | |
| | | GGACCTGATCATCAAGCTGCCTAAGTACTCCCTGTTCG | |
| | | AGCTGGAAAACGGCCGGAAGAGAATGCTGGCCTCTGC | |
| | | CGGCGAACTGCAGAAGGGAAACGAACTGGCCCTGCCC | |
| | | TCCAAATATGTGAACTTCCTGTACCTGGCCAGCCACTA | |
| | | TGAGAAGCTGAAGGGCTCCCCCGAGGATAATGAGCAG | |
| | | AAACAGCTGTTTGTGGAACAGCACAAGCACTACCTGG | |
| | | ACGAGATCATCGAGCAGATCAGCGAGTTCTCCAAGAG | |
| | | AGTGATCCTGGCCGACGCTAATCTGGACAAAGTGCTGT | |
| | | CCGCCTACAACAAGCACCGGGATAAGCCCATCAGAGA | |
| | | GCAGGCCGAGAATATCATCCACCTGTTTACCCTGACCA | |
| | | ATCTGGGAGCCCCTGCCGCCTTCAAGTACTTTGACACC | |
| | | ACCATCGACCGGAAGAGGTACACCAGCACCAAAGAGG | |
| | | TGCTGGACGCCACCCTGATCCACCAGAGCATCACCGGC | |
| | | CTGTACGAGACACGGATCGACCTGTCTCAGCTGGGAG | |
| | | GTGAC | |
| | Protein | DKKYSIGLAIGTNSVGWAVITDEYKVPSKKFKVLGNTDR | 40 |
| | | HSIKKNLIGALLFDSGETAEATRLKRTARRRYTRRKNRIC | |
| | | YLQEIFSNEMAKVDDSFFHRLEESFLVEEDKKHERHPIFG | |
| | | NIVDEVAYHEKYPTIYHLRKKLVDSTDKADLRLIYLALA | |
| | | HMIKFRGHFLIEGDLNPDNSDVDKLFIQLVQTYNQLFEEN | |
| | | PINASGVDAKAILSARLSKSRRLENLIAQLPGEKKNGLFG | |
| | | NLIALSLGLTPNFKSNFDLAEDAKLQLSKDTYDDDLDNL | |
| | | LAQIGDQYADLFLAAKNLSDAILLSDILRVNTEITKAPLSA | |
| | | SMIKRYDEHHQDLTLLKALVRQQLPEKYKEIFFDQSKNG | |
| | | YAGYIDGGASQEEFYKFIKPILEKMDGTEELLVKLNREDL | |
| | | LRKQRTFDNGSIPHQIHLGELHAILRRQEDFYPFLKDNRE | |
| | | KIEKILTFRIPYYVGPLARGNSRFAWMTRKSEETITPWNFE | |
| | | EVVDKGASAQSFIERMTNFDKNLPNEKVLPKHSLLYEYF | |
| | | TVYNELTKVKYVTEGMRKPAFLSGEQKKAIVDLLFKTNR | |
| | | KVTVKQLKEDYFKKIECFDSVEISGVEDRFNASLGTYHDL | |
| | | LKIIKDKDFLDNEENEDILEDIVLTLTLFEDREMIEERLKT | |
| | | YAHLFDDKVMKQLKRRRYTGWGRLSRKLINGIRDKQSG | |
| | | KTILDFLKSDGFANRNFMQLIHDDSLTFKEDIQKAQVSGQ | |
| | | GDSLHEHIANLAGSPAIKKGILQTVKVVDELVKVMGRHK | |
| | | PENIVIEMARENQTTQKGQKNSRERMKRIEEGIKELGSQI | |
| | | LKEHPVENTQLQNEKLYLYYLQNGRDMYVDQELDINRL | |
| | | SDYDVDHIVPQSFLKDDSIDNKVLTRSDKNRGKSDNVPS | |
| | | EEVVKKMKNYWRQLLNAKLITQRKFDNLTKAERGGLSE | |
| | | LDKAGFIKRQLVETRQITKHVAQILDSRMNTKYDENDKLI | |
| | | REVKVITLKSKLVSDFRKDFQFYKVREINNYHHAHDAYL | |
| | | NAVVGTALIKKYPKLESEFVYGDYKVYDVRKMIAKSEQ | |
| | | EIGKATAKYFFYSNIMNFFKTEITLANGEIRKRPLIETNGE | |
| | | TGEIVWDKGRDFATVRKVLSMPQVNIVKKTEVQTGGFS | |
| | | KESILPKRNSDKLIARKKDWDPKKYGGFDSPTVAYSVLV | |
| | | VAKVEKGKSKKLKSVKELLGITIMERSSFEKNPIDFLEAK | |
| | | GYKEVKKDLIIKLPKYSLFELENGRKRMLASAGELQKGN | |
| | | ELALPSKYVNFLYLASHYEKLKGSPEDNEQKQLFVEQHK | |
| | | HYLDEIIEQISEFSKRVILADANLDKVLSAYNKHRDKPIRE | |
| | | QAENIIHLFTLTNLGAPAAFKYFDTTIDRKRYTSTKEVLD | |
| | | ATLIHQSITGLYETRIDLSQLGGD | |
| Linker | DNA | GAGGGAGCTGAT | 2184 |
| between | Protein | EGAD | 2144 |
| Cas9 | | | |
| nickase | | | |
| and NLS | | | |
| Nuclear | DNA | AAGCGCACCGCCGATGGTTCCGAGTTCGAAAGCCCCA | 2185 |
| localization | | AGAAGAAGAGGAAAGTCTAA | |
| sequence | Protein | KRTADGSEFESPKKKRKV | 2146 |
| (NLS) | | | |

MS004 mRNA and protein sequences

| | | | SEQ ID |
|---|---|---|---|
| Region | Sequence | | NO |
| Full | mRNA | AGGAAAu′AAGAGAGAAAAGAAGAGu′AAGAAGAAAu′ | 2186 |
| Sequence | | Au′AAGAGCCACCAu′GGCCCCCAAGAAGAAGCGGAAG | |
| | | Gu′GGGCAu′CCACGGCGu′GCCCGCCGCCGACAAGAAG | |
| | | u′ACAGCAu′CGGCCu′GGACAu′CGGCACCAACAGCGu′G | |
| | | GGCu′GGGCCGu′GAu′CACCGACGAGu′ACAAGGu′GCCC | |
| | | AGCAAGAAGu′u′CAAGGu′GCu′GGGCAACACCGACCGG | |
| | | CACAGCAu′CAAGAAGAACCu′GAu′CGGCGCCCu′GCu′G | |
| | | u′u′CGACAGCGGCGAGACGGCCGAGGCCACCCGGCu′G | |
| | | AAGCGGACCGCCCGGCGGCGGu′ACACCCGGCGGAAG | |
| | | AACCGGAu′Cu′GCu′ACCu′GCAGGAGAu′Cu′u′CAGCAA | |
| | | CGAGAu′GGCCAAGGu′GGACGACAGCu′u′Cu′u′CCACC | |
| | | GGCu′GGAGGAGAGCu′u′CCu′GGu′GGAGGAGGACAAG | |
| | | AAGCACGAGCGGCACCCCAu′Cu′u′CGGCAACAu′CGu′G | |
| | | GACGAGGu′GGCCu′ACCACGAGAAGu′ACCCCACCAu′C | |
| | | u′ACCACCu′GCGGAAGAAGCu′GGu′GGACAGCACCGAC | |
| | | AAGGCCGACCu′GCGGCu′GAu′Cu′ACCu′GGCCCu′GGCC | |
| | | CACAu′GAu′CAAGu′u′CCGGGGCCACu′u′CCu′GAu′CGA | |
| | | GGGCGACCu′GAACCCCGACAACAGCGACGu′GGACAA | |
| | | GCu′Gu′u′CAu′CCAGCu′GGu′GCAGACCu′ACAACCAGCu | |
| | | ′Gu′u′CGAGGAGAACCCCAu′CAACGCCAGCGGCGu′GG | |
| | | ACGCCAAGGCCAu′CCu′GAGCGCCCGGCu′GAGCAAGA | |
| | | GCCGGCGGCu′GGAGAACCu′GAu′CGCCCAGCu′GCCCG | |
| | | GCGAGAAGAAGAACGGCCu′Gu′u′CGGCAACCu′GAu′C | |
| | | GCCCu′GAGCCu′GGGCCu′GACCCCCAACu′u′CAAGAGC | |
| | | AACu′u′CGACCu′GGCCGAGGACGCCAAGCu′GCAGCu′G | |
| | | AGCAAGGACACCu′ACGACGACGACCu′GGACAACCu′G | |
| | | Cu′GGCCCAGAu′CGGCGACCAGu′ACGCCGACCu′Gu′u′C | |
| | | Cu′GGCCGCCAAGAACCu′GAGCGACGCCAu′CCu′GCu′G | |
| | | AGCGACAu′CCu′GCGGGu′GAACACCGAGAu′CACCAAG | |
| | | GCCCCCCu′GAGCGCCAGCAu′GAu′CAAGCGGu′ACGAC | |
| | | GAGCACCACCAGGACCu′GACCCu′GCu′GAAGGCCCu′G | |
| | | Gu′GCGGCAGCAGCu′GCCCGAGAAGu′ACAAGGAGAu′C | |
| | | u′u′Cu′u′CGACCAGAGCAAGAACGGCu′ACGCCGGCu′AC | |
| | | Au′CGACGGCGGCGCCAGCCAGGAGGAGu′u′Cu′ACAAG | |
| | | u′u′CAu′CAAGCCCAu′CCu′GGAGAAGAu′GGACGGCAC | |
| | | CGAGGAGCu′GCu′GGu′GAAGCu′GAACCGGGAGGACCU | |
| | | ′GCu′GCGGAAGCAGCGGACCu′u′CGACAACGGCAGCAu | |
| | | ′CCCCCACCAGAu′CCACCu′GGGCGAGCu′GCACGCCAu′ | |
| | | CCu′GCGGCGGCAGGAGGACu′u′Cu′ACCCCu′u′CCu′GA | |
| | | AGGACAACCGGGAGAAGAu′CGAGAAGAu′CCu′GACCu′ | |
| | | u′CCGGAu′CCCCu′ACu′ACGu′GGGCCCCCu′GGCCCGGG | |
| | | GCAACAGCCGGu′u′CGCCu′GGAu′GACCCGCAAGAGCG | |
| | | AGGAGACGAu′CACCCCCu′GGAACu′u′CGAGGAGGu′G | |
| | | Gu′GGACAAGGGCGCCAGCGCCCAGAGCu′u′CAu′CGAG | |
| | | CGGAu′GACCAACu′u′CGACAAGAACCu′GCCCAACGAG | |
| | | AAGGu′GCu′GCCCAAGCACAGCCu′GCu′Gu′ACGAGu′A | |
| | | Cu′u′CACCGu′Gu′ACAACGAGCu′GACCAAGGu′GAAGu′ | |
| | | ACGu′GACCGAGGGCAu′GCGGAAGCCCGCCu′u′CCu′GA | |
| | | GCGGCGAGCAGAAGAAGGCCAu′CGu′GGACCu′GCu′Gu | |
| | | ′u′CAAGACCAACCGGAAGGu′GACCGu′GAAGCAGCu′G | |
| | | AAGGAGGACu′ACu′u′CAAGAAGAu′CGAGu′GCu′u′CGA | |
| | | CAGCGu′GGAGAu′CAGCGGCGu′GGAGGACCGGu′u′CA | |
| | | ACGCCAGCCu′GGGCACCu′ACCACGACCu′GCu′GAAGA | |
| | | u′CAu′CAAGGACAAGGACu′u′CCu′GGACAACGAGGAG | |
| | | AACGAGGACAu′CCu′GGAGGACAu′CGu′GCu′GACCCu′ | |
| | | GACCCu′Gu′u′CGAGGACCGGGAGAu′GAu′CGAGGAGC | |
| | | GGCu′GAAGACCu′ACGCCCACCu′Gu′u′CGACGACAAGG | |
| | | u′GAu′GAAGCAGCu′GAAGCGGCGGCGGu′ACACCGGCu | |
| | | ′GGGGCCGGCu′GAGCCGGAAGCu′GAu′CAACGGCAu′C | |
| | | CGGGACAAGCAGAGCGGCAAGACCAu′CCu′GGACu′u′C | |
| | | Cu′CAAGAGCGACGGCu′u′CGCCAACCGGAACu′u′CAu′G | |
| | | CAGCu′GAu′CCACGACGACAGCCu′GACCu′u′CAAGGAG | |
| | | GACAu′CCAGAAGGCCCAGGu′GAGCGGCCAGGGCGAC | |
| | | AGCCu′GCACGAGCACAu′CGCCAACCu′GGCCGGCAGC | |
| | | CCCGCCAu′CAAGAAGGGCAu′CCu′GCAGACCGu′GAAG | |
| | | Gu′GGu′GGACGAGCu′GGu′GAAGGu′GAu′GGGCCGGCA | |
| | | CAAGCCCGAGAACAu′CGu′GAu′CGAGAu′GGCCCGGGA | |
| | | GAACCAGACCACCCAGAAGGGCCAGAAGAACAGCCG | |
| | | GGAGCGGAu′GAAGCGGAu′CGAGGAGGGCAu′CAAGG | |
| | | AGCu′GGGCAGCCAGAu′CCu′GAAGGAGCACCCCGu′GG | |
| | | AGAACACCCAGCu′GCAGAACGAGAAGCu′Gu′ACCu′Gu′ | |
| | | ACu′ACCu′GCAGAACGGCCGGGACAu′Gu′ACGu′GGACC | |
| | | AGGAGCu′GGACAu′CAACCGGCu′GAGCGACu′ACGACG | |
| | | u′GGACCACAu′CGu′GCCCCAGAGCu′u′CCu′GAAGGACG | |
| | | ACAGCAu′CGACAACAAGGu′GCu′GACCCGGAGCGACA | |
| | | AGAACCGGGGCAAGAGCGACAACGu′GCCCAGCGAGG | |
| | | AGGu′GGu′GAAGAAGAu′GAAGAACu′ACu′GGCGGCAG | |
| | | Cu′GCu′GAACGCCAAGCu′GAu′CACCCAGCGGAAGu′u′C | |
| | | GACAACCu′GACCAAGGCCGAGCGGGGCGGCCu′GAGC | |
| | | GAGCu′GGACAAGGCCGGCu′u′CAu′CAAGCGGCAGCu′G | |
| | | Gu′GGAGACGCGGCAGAu′CACCAAGCACGu′GGCCCAG | |
| | | Au′CCu′GGACAGCCGGAu′GAACACCAAGu′ACGACGAG | |
| | | AACGACAAGCu′GAu′CCGGGAGGu′GAAGGu′GAu′CAC | |
| | | CCu′CAAGAGCAAGCu′GGu′GAGCGACu′u′CCGGAAGG | |
| | | ACu′u′CCAGu′u′Cu′ACAAGGu′GCGGGAGAu′CAACAAC | |
| | | u′ACCACCACGCCCACGACGCCu′ACCu′GAACGCCGu′G | |
| | | Gu′GGGCACCGCCCu′GAu′CAAGAAGu′ACCCCAAGCu′G | |
| | | GAGAGCGAGu′u′CGu′Gu′ACGGCGACu′ACAAGGu′Gu′A | |
| | | CGACGu′GCGGAAGAu′GAu′CGCCAAGAGCGAGCAGGA | |
| | | GAu′CGGCAAGGCCACCGCCAAGu′ACu′u′Cu′u′Cu′ACA | |
| | | GCAACAu′CAu′GAACu′u′Cu′u′CAAGACCGAGAu′CACC | |
| | | Cu′GGCCAACGGCGAGAu′CCGGAAGCGGCCCCu′GAu′C | |
| | | GAGACGAACGGCGAGACGGGCGAGAu′CGu′Gu′GGGAC | |
| | | AAGGGCCGGGACu′u′CGCCACCGu′GCGGAAGGu′GCu′G | |
| | | AGCAu′GCCCCAGGu′GAACAu′CGu′GAAGAAGACCGAG | |
| | | Gu′GCAGACCGGCGGCu′u′CAGCAAGGAGAGCAu′CCu′G | |
| | | CCCAAGCGGAACAGCGACAAGCu′GAu′CGCCCGGAAG | |
| | | AAGGACu′GGGACCCCAAGAAGu′ACGGCGGCu′u′CGAC | |
| | | AGCCCCACCGu′GGCCu′ACAGCGu′GCu′GGu′GGu′GGCC | |
| | | AAGGu′GGAGAAGGGCAAGAGCAAGAAGCu′CAAGAGC | |
| | | Gu′GAAGGAGCu′GCu′GGGCAu′CACCAu′CAu′GGAGCG | |
| | | GAGCAGCu′u′CGAGAAGAACCCCAu′CGACu′u′CCu′GG | |
| | | AGGCCAAGGGCu′ACAAGGAGGu′GAAGAAGGACCu′GA | |
| | | u′CAu′CAAGCu′GCCCAAGu′ACAGCCu′Gu′u′CGAGCu′G | |
| | | GAGAACGGCCGGAAGCGGAu′GCu′GGCCAGCGCCGGC | |
| | | GAGCu′GCAGAAGGGCAACGAGCu′GGCCCu′GCCCAGC | |
| | | AAGu′ACGu′GAACu′u′CCu′Gu′ACCu′GGCCAGCCACu′A | |
| | | CGAGAAGCu′GAAGGGCAGCCCCGAGGACAACGAGCA | |
| | | GAAGCAGCu′Gu′u′CGu′GGAGCAGCACAAGCACu′ACCu | |
| | | ′GGACGAGAu′CAu′CGAGCAGAu′CAGCGAGu′u′CAGCA | |
| | | AGCGGGu′GAu′CCu′GGCCGACGCCAACCu′GGACAAGG | |
| | | u′GCu′GAGCGCCu′ACAACAAGCACCGGGACAAGCCCA | |
| | | u′CCGGGAGCAGGCCGAGAACAu′CAu′CCACCu′Gu′u′CA | |
| | | CCCu′GACCAACCu′GGGCGCCCCCGCCGCCu′u′CAAGu′ | |
| | | ACu′u′CGACACCACCAu′CGACCGGAAGCGGu′ACACCA | |
| | | GCACCAAGGAGGu′GCu′GGACGCCACCCu′GAu′CCACC | |
| | | AGAGCAu′CACCGGCCu′Gu′ACGAGACGCGGAu′CGACC | |
| | | u′GAGCCAGCu′GGGCGGCGACAGCGGCGGCAAGCGGC | |
| | | CCGCCGCCACCAAGAAGGCCGGCCAGGCCAAGAAGAA | |
| | | GAAGu′AAu′GAu′AGGCGGCCGCu′u′AAu′u′AAGCu′GCC | |
| | | u′u′Cu′GCGGGGCu′u′GCCu′u′Cu′GGCCAu′GCCCu′u′Cu′u | |
| | | ′Cu′Cu′CCCu′u′GCACCu′Gu′ACCu′Cu′u′GGu′Cu′u′u′GAA | |
| | | u′AAAGCCu′GAGu′AGGAAGu′Cu′AGA | |
| 5′ UTR | mRNA | AGGAAAu′AAGAGAGAAAAGAAGAGu′AAGAAGAAAu′ | 2138 |
| | | Au′AAGAGCCACC | |
| CDS | mRNA | Au′GGCCCCCAAGAAGAAGCGGAAGGu′GGGCAu′CCAC | 2187 |
| | | GGCGu′GCCCGCCGCCGACAAGAAGu′ACAGCAu′CGGC | |
| | | Cu′GGACAu′CGGCACCAACAGCGu′GGGCu′GGGCCGu′G | |
| | | Au′CACCGACGAGu′ACAAGGu′GCCCAGCAAGAAGu′u′C | |
| | | AAGGu′GCu′GGGCAACACCGACCGGCACAGCAu′CAAG | |
| | | AAGAACCu′GAu′CGGCGCCCu′GCu′Gu′u′CGACAGCGGC | |
| | | GAGACGGCCGAGGCCACCCGGCu′GAAGCGGACCGCCC | |
| | | GGCGGCGGu′ACACCCGGCGGAAGAACCGGAu′Cu′GCu′ | |
| | | ACCu′GCAGGAGAu′Cu′u′CAGCAACGAGAu′GGCCAAG | |
| | | Gu′GGACGACAGCu′u′Cu′u′CCACCGGCu′GGAGGAGAG | |
| | | Cu′u′CCu′GGu′GGAGGAGGACAAGAAGCACGAGCGGCA | |
| | | CCCCAu′Cu′u′CGGCAACAu′CGu′GGACGAGGu′GGCCu′ | |
| | | ACCACGAGAAGu′ACCCCACCAu′Cu′ACCACCu′GCGGA | |
| | | AGAAGCu′GGu′GGACAGCACCGACAAGGCCGACCu′GC | |
| | | GGCu′GAu′Cu′ACCu′GGCCCu′GGCCCACAu′GAu′CAAGu | |
| | | ′u′CCGGGGCCACu′u′CCu′GAu′CGAGGGCGACCu′GAAC | |
| | | CCCGACAACAGCGACGu′GGACAAGCu′Gu′u′CAu′CCAG | |
| | | Cu′GGu′GCAGACCu′ACAACCAGCu′Gu′u′CGAGGAGAA | |
| | | CCCCAu′CAACGCCAGCGGCGu′GGACGCCAAGGCCAu′ | |
| | | CCu′GAGCGCCCGGCu′GAGCAAGAGCCGGCGGCu′GGA | |
| | | GAACCu′GAu′CGCCCAGCu′GCCCGGCGAGAAGAAGAA | |
| | | CGGCCu′Gu′u′CGGCAACCu′GAu′CGCCCu′GAGCCu′GG | |
| | | GCCu′GACCCCCAACu′u′CAAGAGCAACu′u′CGACCu′GG | |
| | | CCGAGGACGCCAAGCu′GCAGCu′GAGCAAGGACACCu′ | |
| | | ACGACGACGACCu′GGACAACCu′GCu′GGCCCAGAu′CG | |
| | | GCGACCAGu′ACGCCGACCu′Gu′u′CCu′GGCCGCCAAGA | |
| | | ACCu′GAGCGACGCCAu′CCu′GCu′GAGCGACAu′CCu′GC | |
| | | GGGu′GAACACCGAGAu′CACCAAGGCCCCCCu′GAGCG | |
| | | CCAGCAu′GAu′CAAGCGGu′ACGACGAGCACCACCAGG | |
| | | ACCu′GACCCu′GCu′GAAGGCCCu′GGu′GCGGCAGCAGC | |
| | | u′GCCCGAGAAGu′ACAAGGAGAu′Cu′u′Cu′u′CGACCAG | |
| | | AGCAAGAACGGCu′ACGCCGGCu′ACAu′CGACGGCGGC | |
| | | GCCAGCCAGGAGGAGu′u′Cu′ACAAGu′u′CAu′CAAGCC | |
| | | CAu′CCu′GGAGAAGAu′GGACGGCACCGAGGAGCu′GCu | |
| | | ′GGu′GAAGCu′GAACCGGGAGGACCu′GCu′GCGGAAGC | |
| | | AGCGGACCu′u′CGACAACGGCAGCAu′CCCCCACCAGAu | |
| | | ′CCACCu′GGGCGAGCu′GCACGCCAu′CCu′GCGGCGGCA | |
| | | GGAGGACu′u′Cu′ACCCCu′u′CCu′GAAGGACAACCGGG | |
| | | AGAAGAu′CGAGAAGAu′CCu′GACCu′u′CCGGAu′CCCCu | |
| | | ′ACu′ACGu′GGGCCCCCu′GGCCCGGGGCAACAGCCGGu′ | |
| | | u′CGCCu′GGAu′GACCCGCAAGAGCGAGGAGACGAu′CA | |
| | | CCCCCu′GGAACu′u′CGAGGAGGu′GGu′GGACAAGGGC | |
| | | GCCAGCGCCCAGAGCu′u′CAu′CGAGCGGAu′GACCAAC | |
| | | u′u′CGACAAGAACCu′GCCCAACGAGAAGGu′GCu′GCCC | |
| | | AAGCACAGCCu′GCu′Gu′ACGAGu′ACu′u′CACCGu′Gu′A | |
| | | CAACGAGCu′GACCAAGGu′GAAGu′ACGu′GACCGAGGG | |
| | | CAu′GCGGAAGCCCGCCu′u′CCu′GAGCGGCGAGCAGAA | |
| | | GAAGGCCAu′CGu′GGACCu′GCu′Gu′u′CAAGACCAACC | |
| | | GGAAGGu′GACCGu′GAAGCAGCu′GAAGGAGGACu′ACu | |
| | | ′u′CAAGAAGAu′CGAGu′GCu′u′CGACAGCGu′GGAGAu′C | |
| | | AGCGGCGu′GGAGGACCGGu′u′CAACGCCAGCCu′GGGC | |
| | | ACCu′ACCACGACCu′GCu′GAAGAu′CAu′CAAGGACAAG | |
| | | GACu′u′CCu′GGACAACGAGGAGAACGAGGACAu′CCu′ | |
| | | GGAGGACAu′CGu′GCu′GACCCu′GACCCu′Gu′u′CGAGG | |
| | | ACCGGGAGAu′GAu′CGAGGAGCGGCu′GAAGACCu′ACG | |
| | | CCCACCu′Gu′u′CGACGACAAGGu′GAu′GAAGCAGCu′G | |
| | | AAGCGGCGGCGGu′ACACCGGCu′GGGGCCGGCu′GAGC | |
| | | CGGAAGCu′GAu′CAACGGCAu′CCGGGACAAGCAGAGC | |
| | | GGCAAGACCAu′CCu′GGACu′u′CCu′CAAGAGCGACGGC | |
| | | u′u′CGCCAACCGGAACu′u′CAu′GCAGCu′GAu′CCACGA | |
| | | CGACAGCCu′GACCu′u′CAAGGAGGACAu′CCAGAAGGC | |
| | | CCAGGu′GAGCGGCCAGGGCGACAGCCu′GCACGAGCA | |
| | | CAu′CGCCAACCu′GGCCGGCAGCCCCGCCAu′CAAGAA | |
| | | GGGCAu′CCu′GCAGACCGu′GAAGGu′GGu′GGACGAGCu | |
| | | ′GGu′GAAGGu′GAu′GGGCCGGCACAAGCCCGAGAACAu | |
| | | ′CGu′GAu′CGAGAu′GGCCCGGGAGAACCAGACCACCCA | |
| | | GAAGGGCCAGAAGAACAGCCGGGAGCGGAu′GAAGCG | |
| | | GAu′CGAGGAGGGCAu′CAAGGAGCu′GGGCAGCCAGAu | |
| | | ′CCu′GAAGGAGCACCCCGu′GGAGAACACCCAGCu′GCA | |
| | | GAACGAGAAGCu′Gu′ACCu′Gu′ACu′ACCu′GCAGAACG | |
| | | GCCGGGACAu′Gu′ACGu′GGACCAGGAGCu′GGACAu′C | |
| | | AACCGGCu′GAGCGACu′ACGACGu′GGACCACAu′CGu′G | |
| | | CCCCAGAGCu′u′CCu′GAAGGACGACAGCAu′CGACAAC | |
| | | AAGGu′GCu′GACCCGGAGCGACAAGAACCGGGGCAAG | |
| | | AGCGACAACGu′GCCCAGCGAGGAGGu′GGu′GAAGAAG | |
| | | Au′GAAGAACu′ACu′GGCGGCAGCu′GCu′GAACGCCAA | |
| | | GCu′GAu′CACCCAGCGGAAGu′u′CGACAACCu′GACCAA | |
| | | GGCCGAGCGGGGCGGCCu′GAGCGAGCu′GGACAAGGC | |
| | | CGGCu′u′CAu′CAAGCGGCAGCu′GGu′GGAGACGCGGCA | |
| | | GAu′CACCAAGCACGu′GGCCCAGAu′CCu′GGACAGCCG | |
| | | GAu′GAACACCAAGu′ACGACGAGAACGACAAGCu′GAu′ | |
| | | CCGGGAGGu′GAAGGu′GAu′CACCCu′CAAGAGCAAGCu | |
| | | ′GGu′GAGCGACu′u′CCGGAAGGACu′u′CCAGu′u′Cu′ACA | |
| | | AGGu′GCGGGAGAu′CAACAACu′ACCACCACGCCCACG | |
| | | ACGCCu′ACCu′GAACGCCGu′GGu′GGGCACCGCCCu′GA | |
| | | u′CAAGAAGu′ACCCCAAGCu′GGAGAGCGAGu′u′CGu′Gu | |
| | | ′ACGGCGACu′ACAAGGu′Gu′ACGACGu′GCGGAAGAu′G | |
| | | Au′CGCCAAGAGCGAGCAGGAGAu′CGGCAAGGCCACC | |
| | | GCCAAGu′ACu′u′Cu′u′Cu′ACAGCAACAu′CAu′GAACu′u′ | |
| | | Cu′u′CAAGACCGAGAu′CACCCu′GGCCAACGGCGAGAu′ | |
| | | CCGGAAGCGGCCCCu′GAu′CGAGACGAACGGCGAGAC | |
| | | GGGCGAGAu′CGu′Gu′GGGACAAGGGCCGGGACu′u′CG | |
| | | CCACCGu′GCGGAAGGu′GCu′GAGCAu′GCCCCAGGu′GA | |
| | | ACAu′CGu′GAAGAAGACCGAGGu′GCAGACCGGCGGCu′ | |
| | | u′CAGCAAGGAGAGCAu′CCu′GCCCAAGCGGAACAGCG | |
| | | ACAAGCu′GAu′CGCCCGGAAGAAGGACu′GGGACCCCA | |
| | | AGAAGu′ACGGCGGCu′u′CGACAGCCCCACCGu′GGCCu′ | |
| | | ACAGCGu′GCu′GGu′GGu′GGCCAAGGu′GGAGAAGGGC | |
| | | AAGAGCAAGAAGCu′CAAGAGCGu′GAAGGAGCu′GCu′ | |
| | | GGGCAu′CACCAu′CAu′GGAGCGGAGCAGCu′u′CGAGA | |
| | | AGAACCCCAu′CGACu′u′CCu′GGAGGCCAAGGGCu′ACA | |
| | | AGGAGGu′GAAGAAGGACCu′GAu′CAu′CAAGCu′GCCC | |
| | | AAGu′ACAGCCu′Gu′u′CGAGCu′GGAGAACGGCCGGAA | |
| | | GCGGAu′GCu′GGCCAGCGCCGGCGAGCu′GCAGAAGGG | |
| | | CAACGAGCu′GGCCCu′GCCCAGCAAGu′ACGu′GAACu′u′ | |
| | | CCu′Gu′ACCu′GGCCAGCCACu′ACGAGAAGCu′GAAGGG | |
| | | CAGCCCCGAGGACAACGAGCAGAAGCAGCu′Gu′u′CGu′ | |
| | | GGAGCAGCACAAGCACu′ACCu′GGACGAGAu′CAu′CGA | |
| | | GCAGAu′CAGCGAGu′u′CAGCAAGCGGGu′GAu′CCu′GG | |
| | | CCGACGCCAACCu′GGACAAGGu′GCu′GAGCGCCu′ACA | |
| | | ACAAGCACCGGGACAAGCCCAu′CCGGGAGCAGGCCG | |
| | | AGAACAu′CAu′CCACCu′Gu′u′CACCCu′GACCAACCu′GG | |
| | | GCGCCCCCGCCGCCu′u′CAAGu′ACu′u′CGACACCACCA | |
| | | u′CGACCGGAAGCGGu′ACACCAGCACCAAGGAGGu′GC | |
| | | u′GGACGCCACCCu′GAu′CCACCAGAGCAu′CACCGGCC | |
| | | u′Gu′ACGAGACGCGGAu′CGACCu′GAGCCAGCu′GGGCG | |
| | | GCGACAGCGGCGGCAAGCGGCCCGCCGCCACCAAGAA | |
| | | GGCCGGCCAGGCCAAGAAGAAGAAGu′AAu′GAu′AG | |
| | Protein | MAPKKKRKVGIHGVPAADKKYSIGLDIGTNSVGWAVITD | |
| | | EYKVPSKKFKVLGNTDRHSIKKNLIGALLFDSGETAEATR | |
| | | LKRTARRRYTRRKNRICYLQEIFSNEMAKVDDSFFHRLEE | |
| | | SFLVEEDKKHERHPIFGNIVDEVAYHEKYPTIYHLRKKLV | |
| | | DSTDKADLRLIYLALAHMIKFRGHFLIEGDLNPDNSDVD | |
| | | KLFIQLVQTYNQLFEENPINASGVDAKAILSARLSKSRRLE | |
| | | NLIAQLPGEKKNGLFGNLIALSLGLTPNFKSNFDLAEDAK | |
| | | LQLSKDTYDDDLDNLLAQIGDQYADLFLAAKNLSDAILL | |
| | | SDILRVNTEITKAPLSASMIKRYDEHHQDLTLLKALVRQQ | |
| | | LPEKYKEIFFDQSKNGYAGYIDGGASQEEFYKFIKPILEK | |
| | | MDGTEELLVKLNREDLLRKQRTFDNGSIPHQIHLGELHAI | |
| | | LRRQEDFYPFLKDNREKIEKILTFRIPYYVGPLARGNSRFA | |
| | | WMTRKSEETITPWNFEEVVDKGASAQSFIERMTNFDKNL | |
| | | PNEKVLPKHSLLYEYFTVYNELTKVKYVTEGMRKPAFLS | |
| | | GEQKKAIVDLLFKTNRKVTVKQLKEDYFKKIECFDSVEIS | |
| | | GVEDRFNASLGTYHDLLKIIKDKDFLDNEENEDILEDIVL | |
| | | TLTLFEDREMIEERLKTYAHLFDDKVMKQLKRRRYTGW | |
| | | GRLSRKLINGIRDKQSGKTILDFLKSDGFANRNFMQLIHD | |
| | | DSLTFKEDIQKAQVSGQGDSLHEHIANLAGSPAIKKGILQ | |
| | | TVKVVDELVKVMGRHKPENIVIEMARENQTTQKGQKNS | |
| | | RERMKRIEEGIKELGSQILKEHPVENTQLQNEKLYLYYLQ | |
| | | NGRDMYVDQELDINRLSDYDVDHIVPQSFLKDDSIDNKV | |
| | | LTRSDKNRGKSDNVPSEEVVKKMKNYWRQLLNAKLITQ | |
| | | RKFDNLTKAERGGLSELDKAGFIKRQLVETRQITKHVAQI | |
| | | LDSRMNTKYDENDKLIREVKVITLKSKLVSDFRKDFQFY | |
| | | KVREINNYHHAHDAYLNAVVGTALIKKYPKLESEFVYG | |
| | | DYKVYDVRKMIAKSEQEIGKATAKYFFYSNIMNFFKTEIT | |
| | | LANGEIRKRPLIETNGETGEIVWDKGRDFATVRKVLSMP | |
| | | QVNIVKKTEVQTGGFSKESILPKRNSDKLIARKKDWDPK | |
| | | KYGGFDSPTVAYSVLVVAKVEKGKSKKLKSVKELLGITI | |
| | | MERSSFEKNPIDFLEAKGYKEVKKDLIIKLPKYSLFELENG | |
| | | RKRMLASAGELQKGNELALPSKYVNFLYLASHYEKLKG | |
| | | SPEDNEQKQLFVEQHKHYLDEIIEQISEFSKRVILADANLD | |
| | | KVLSAYNKHRDKPIREQAENIIHLFTLTNLGAPAAFKYFD | |
| | | TTIDRKRYTSTKEVLDATLIHQSITGLYETRIDLSQLGGDS | |
| | | GGKRPAATKKAGQAKKKK | |
| 3′ UTR | mRNA | GCGGCCGCu′u′AAu′u′AAGCu′GCCu′u′Cu′GCGGGGCu′u′ | 2147 |
| | | GCCu′u′Cu′GGCCAu′GCCCu′u′Cu′u′Cu′Cu′CCCu′u′GCAC | |
| | | Cu′Gu′ACCu′Cu′u′GGu′Cu′u′u′GAAu′AAAGCCu′GAGu′A | |
| | | GGAAGu′Cu′AGA | |

MS010 mRNA and protein sequences

| | | | SEQ ID |
|---|---|---|---|
| Region | Sequence | | NO |
| Full | mRNA | AGGAAAu′AAGAGAGAAAAGAAGAGu′AAGAAGAAAu′ | 2189 |
| Sequence | | Au′AAGAGCCACCAu′GGCCCCCAAGAAGAAGCGCAAG | |
| | | Gu′GGGCAu′CCACGGCGu′GCCCGCCGCCGACAAGAAG | |
| | | u′ACAGCAu′CGGCCu′GGACAu′CGGCACCAACAGCGu′G | |
| | | GGCu′GGGCCGu′GAu′CACCGACGAGu′ACAAGGu′GCCC | |
| | | AGCAAGAAGu′u′CAAGGu′GCu′GGGCAACACCGACCGC | |
| | | CACAGCAu′CAAGAAGAACCu′GAu′CGGCGCCCu′GCu′G | |
| | | u′u′CGACAGCGGCGAGACAGCCGAGGCCACCCGCCu′G | |
| | | AAGCGCACCGCCCGCCGCCGCu′ACACCCGCCGCAAGA | |
| | | ACCGCAu′Cu′GCu′ACCu′GCAGGAGAu′Cu′u′CAGCAAC | |
| | | GAGAu′GGCCAAGGu′GGACGACAGCu′u′Cu′u′CCACCG | |
| | | CCu′GGAGGAGAGCu′u′CCu′GGu′GGAGGAGGACAAGA | |
| | | AGCACGAGCGCCACCCCAu′Cu′u′CGGCAACAu′CGu′GG | |
| | | ACGAGGu′GGCCu′ACCACGAGAAGu′ACCCCACCAu′Cu′ | |
| | | ACCACCu′GCGCAAGAAGCu′GGu′GGACAGCACCGACA | |
| | | AGGCCGACCu′GCGCCu′GAu′Cu′ACCu′GGCCCu′GGCCC | |
| | | ACAu′GAu′CAAGu′u′CCGCGGCCACu′u′CCu′GAu′CGAG | |
| | | GGCGACCu′GAACCCCGACAACAGCGACGu′GGACAAG | |
| | | Cu′Gu′u′CAu′CCAGCu′GGu′GCAGACCu′ACAACCAGCu′ | |
| | | Gu′u′CGAGGAGAACCCCAu′CAACGCCAGCGGCGu′GGA | |
| | | CGCCAAGGCCAu′CCu′GAGCGCCCGCCu′GAGCAAGAG | |
| | | CCGCCGCCu′GGAGAACCu′GAu′CGCCCAGCu′GCCCGG | |
| | | CGAGAAGAAGAACGGCCu′Gu′u′CGGCAACCu′GAu′CGC | |
| | | CCu′GAGCCu′GGGCCu′GACCCCCAACu′u′CAAGAGCAA | |
| | | Cu′u′CGACCu′GGCCGAGGACGCCAAGCu′GCAGCu′GAG | |
| | | CAAGGACACCu′ACGACGACGACCu′GGACAACCu′GCu′ | |
| | | GGCCCAGAu′CGGCGACCAGu′ACGCCGACCu′Gu′u′CCu′ | |
| | | GGCCGCCAAGAACCu′GAGCGACGCCAu′CCu′GCu′GAG | |
| | | CGACAu′CCu′GCGCGu′GAACACCGAGAu′CACCAAGGC | |
| | | CCCCCu′GAGCGCCAGCAu′GAu′CAAGCGCu′ACGACGA | |
| | | GCACCACCAGGACCu′GACCCu′GCu′GAAGGCCCu′GGu′ | |
| | | GCGCCAGCAGCu′GCCCGAGAAGu′ACAAGGAGAu′Cu′u′ | |
| | | Cu′u′CGACCAGAGCAAGAACGGCu′ACGCCGGCu′ACAu′ | |
| | | CGACGGCGGCGCCAGCCAGGAGGAGu′u′Cu′ACAAGu′u′ | |
| | | CAu′CAAGCCCAu′CCu′GGAGAAGAu′GGACGGCACCGA | |
| | | GGAGCu′GCu′GGu′GAAGCu′GAACCGCGAGGACCu′GCu | |
| | | ′GCGCAAGCAGCGCACCu′u′CGACAACGGCAGCAu′CCC | |
| | | CCACCAGAu′CCACCu′GGGCGAGCu′GCACGCCAu′CCu′ | |
| | | GCGCCGCCAGGAGGACu′u′Cu′ACCCCu′u′CCu′GAAGGA | |
| | | CAACCGCGAGAAGAu′CGAGAAGAu′CCu′GACCu′u′CCG | |
| | | CAu′CCCCu′ACu′ACGu′GGGCCCCCu′GGCCCGCGGCAA | |
| | | CAGCCGCu′u′CGCCu′GGAu′GACCCGCAAGAGCGAGGA | |
| | | GACAAu′CACCCCCu′GGAACu′u′CGAGGAGGu′GGu′GG | |
| | | ACAAGGGCGCCAGCGCCCAGAGCu′u′CAu′CGAGCGCA | |
| | | u′GACCAACu′u′CGACAAGAACCu′GCCCAACGAGAAGG | |
| | | u′GCu′GCCCAAGCACAGCCu′GCu′Gu′ACGAGu′ACu′u′C | |
| | | ACCGu′Gu′ACAACGAGCu′GACCAAGGu′GAAGu′ACGu′ | |
| | | GACCGAGGGCAu′GCGCAAGCCCGCCu′u′CCu′GAGCGG | |
| | | CGAGCAGAAGAAGGCCAu′CGu′GGACCu′GCu′Gu′u′CA | |
| | | AGACCAACCGCAAGGu′GACCGu′GAAGCAGCu′GAAGG | |
| | | AGGACu′ACu′u′CAAGAAGAu′CGAGu′GCu′u′CGACAGC | |
| | | Gu′GGAGAu′CAGCGGCGu′GGAGGACCGCu′u′CAACGCC | |
| | | AGCCu′GGGCACCu′ACCACGACCu′GCu′GAAGAu′CAu′C | |
| | | AAGGACAAGGACu′u′CCu′GGACAACGAGGAGAACGAG | |
| | | GACAu′CCu′GGAGGACAu′CGu′GCu′GACCCu′GACCCu′ | |
| | | Gu′u′CGAGGACCGCGAGAu′GAu′CGAGGAGCGCCu′GA | |
| | | AGACCu′ACGCCCACCu′Gu′u′CGACGACAAGGu′GAu′G | |
| | | AAGCAGCu′GAAGCGCCGCCGCu′ACACCGGCu′GGGGC | |
| | | CGCCu′GAGCCGCAAGCu′GAu′CAACGGCAu′CCGCGAC | |
| | | AAGCAGAGCGGCAAGACCAu′CCu′GGACu′u′CCu′CAAG | |
| | | AGCGACGGCu′u′CGCCAACCGCAACu′u′CAu′GCAGCu′G | |
| | | Au′CCACGACGACAGCCu′GACCu′u′CAAGGAGGACAu′C | |
| | | CAGAAGGCCCAGGu′GAGCGGCCAGGGCGACAGCCu′G | |
| | | CACGAGCACAu′CGCCAACCu′GGCCGGCAGCCCCGCCA | |
| | | u′CAAGAAGGGCAu′CCu′GCAGACCGu′GAAGGu′GGu′G | |
| | | GACGAGCu′GGu′GAAGGu′GAu′GGGCCGCCACAAGCCC | |
| | | GAGAACAu′CGu′GAu′CGAGAu′GGCCCGCGAGAACCAG | |
| | | ACCACCCAGAAGGGCCAGAAGAACAGCCGCGAGCGCA | |
| | | u′GAAGCGCAu′CGAGGAGGGCAu′CAAGGAGCu′GGGC | |
| | | AGCCAGAu′CCu′GAAGGAGCACCCCGu′GGAGAACACC | |
| | | CAGCu′GCAGAACGAGAAGCu′Gu′ACCu′Gu′ACu′ACCu′ | |
| | | GCAGAACGGCCGCGACAu′Gu′ACGu′GGACCAGGAGCu′ | |
| | | GGACAu′CAACCGCCu′GAGCGACu′ACGACGu′GGACCA | |
| | | CAu′CGu′GCCCCAGAGCu′u′CCu′GAAGGACGACAGCAu′ | |
| | | CGACAACAAGGu′GCu′GACCCGCAGCGACAAGAACCG | |
| | | CGGCAAGAGCGACAACGu′GCCCAGCGAGGAGGu′GGu′ | |
| | | GAAGAAGAu′GAAGAACu′ACu′GGCGCCAGCu′GCu′GA | |
| | | ACGCCAAGCu′GAu′CACCCAGCGCAAGu′u′CGACAACC | |
| | | u′GACCAAGGCCGAGCGCGGCGGCCu′GAGCGAGCu′GG | |
| | | ACAAGGCCGGCu′u′CAu′CAAGCGCCAGCu′GGu′GGAGA | |
| | | CACGCCAGAu′CACCAAGCACGu′GGCCCAGAu′CCu′GG | |
| | | ACAGCCGCAu′GAACACCAAGu′ACGACGAGAACGACA | |
| | | AGCu′GAu′CCGCGAGGu′GAAGGu′GAu′CACCCu′CAAG | |
| | | AGCAAGCu′GGu′GAGCGACu′u′CCGCAAGGACu′u′CCA | |
| | | Gu′u′Cu′ACAAGGu′GCGCGAGAu′CAACAACu′ACCACC | |
| | | ACGCCCACGACGCCu′ACCu′GAACGCCGu′GGu′GGGCA | |
| | | CCGCCCu′GAu′CAAGAAGu′ACCCCAAGCu′GGAGAGCG | |
| | | AGu′u′CGu′Gu′ACGGCGACu′ACAAGGu′Gu′ACGACGu′G | |
| | | CGCAAGAu′GAu′CGCCAAGAGCGAGCAGGAGAu′CGGC | |
| | | AAGGCCACCGCCAAGu′ACu′u′Cu′u′Cu′ACAGCAACAu′ | |
| | | CAu′GAACu′u′Cu′u′CAAGACCGAGAu′CACCCu′GGCCA | |
| | | ACGGCGAGAu′CCGCAAGCGCCCCCu′GAu′CGAGACAA | |
| | | ACGGCGAGACAGGCGAGAu′CGu′Gu′GGGACAAGGGCC | |
| | | GCGACu′u′CGCCACCGu′GCGCAAGGu′GCu′GAGCAu′GC | |
| | | CCCAGGu′GAACAu′CGu′GAAGAAGACCGAGGu′GCAGA | |
| | | CCGGCGGCu′u′CAGCAAGGAGAGCAu′CCu′GCCCAAGC | |
| | | GCAACAGCGACAAGCu′GAu′CGCCCGCAAGAAGGACu′ | |
| | | GGGACCCCAAGAAGu′ACGGCGGCu′u′CGACAGCCCCA | |
| | | CCGu′GGCCu′ACAGCGu′GCu′GGu′GGu′GGCCAAGGu′G | |
| | | GAGAAGGGCAAGAGCAAGAAGCu′CAAGAGCGu′GAAG | |
| | | GAGCu′GCu′GGGCAu′CACCAu′CAu′GGAGCGCAGCAGC | |
| | | u′u′CGAGAAGAACCCCAu′CGACu′u′CCu′GGAGGCCAA | |
| | | GGGCu′ACAAGGAGGu′GAAGAAGGACCu′GAu′CAu′CA | |
| | | AGCu′GCCCAAGu′ACAGCCu′Gu′u′CGAGCu′GGAGAAC | |
| | | GGCCGCAAGCGCAu′GCu′GGCCAGCGCCGGCGAGCu′G | |
| | | CAGAAGGGCAACGAGCu′GGCCCu′GCCCAGCAAGu′AC | |
| | | Gu′GAACu′u′CCu′Gu′ACCu′GGCCAGCCACu′ACGAGAA | |
| | | GCu′GAAGGGCAGCCCCGAGGACAACGAGCAGAAGCA | |
| | | GCu′Gu′u′CGu′GGAGCAGCACAAGCACu′ACCu′GGACG | |
| | | AGAu′CAu′CGAGCAGAu′CAGCGAGu′u′CAGCAAGCGC | |
| | | Gu′GAu′CCu′GGCCGACGCCAACCu′GGACAAGGu′GCu′ | |
| | | GAGCGCCu′ACAACAAGCACCGCGACAAGCCCAu′CCG | |
| | | CGAGCAGGCCGAGAACAu′CAu′CCACCu′Gu′u′CACCCu′ | |
| | | GACCAACCu′GGGCGCCCCCGCCGCCu′u′CAAGu′ACu′u′ | |
| | | CGACACCACCAu′CGACCGCAAGCGCu′ACACCAGCACC | |
| | | AAGGAGGu′GCu′GGACGCCACCCu′GAu′CCACCAGAGC | |
| | | Au′CACCGGCCu′Gu′ACGAGACACGCAu′CGACCu′GAGC | |
| | | CAGCu′GGGCGGCGACAGCGGCGGCAAGCGCCCCGCCG | |
| | | CCACCAAGAAGGCCGGCCAGGCCAAGAAGAAGAAGu′ | |
| | | AAu′AAu′AAGCGGCCGCu′u′AAu′u′AAGCu′GCCu′u′Cu′G | |
| | | CGGGGCu′u′GCCu′u′Cu′GGCCAu′GCCCu′u′Cu′u′Cu′Cu′C | |
| | | CCu′u′GCACCu′Gu′ACCu′Cu′u′GGu′Cu′u′u′GAAu′AAAG | |
| | | CCu′GAGu′AGGAAGu′Cu′AGA | |
| 5′ UTR | mRNA | AGGAAAu′AAGAGAGAAAAGAAGAGu′AAGAAGAAAu′ | 2138 |
| | | Au′AAGAGCCACC | |
| CDS | mRNA | Au′GGCCCCCAAGAAGAAGCGCAAGGu′GGGCAu′CCAC | 2190 |
| | | GGCGu′GCCCGCCGCCGACAAGAAGu′ACAGCAu′CGGC | |
| | | Cu′GGACAu′CGGCACCAACAGCGu′GGGCu′GGGCCGu′G | |
| | | Au′CACCGACGAGu′ACAAGGu′GCCCAGCAAGAAGu′u′C | |
| | | AAGGu′GCu′GGGCAACACCGACCGCCACAGCAu′CAAG | |
| | | AAGAACCu′GAu′CGGCGCCCu′GCu′Gu′u′CGACAGCGGC | |
| | | GAGACAGCCGAGGCCACCCGCCu′GAAGCGCACCGCCC | |
| | | GCCGCCGCu′ACACCCGCCGCAAGAACCGCAu′Cu′GCu′ | |
| | | ACCu′GCAGGAGAu′Cu′u′CAGCAACGAGAu′GGCCAAG | |
| | | Gu′GGACGACAGCu′u′Cu′u′CCACCGCCu′GGAGGAGAG | |
| | | Cu′u′CCu′GGu′GGAGGAGGACAAGAAGCACGAGCGCCA | |
| | | CCCCAu′Cu′u′CGGCAACAu′CGu′GGACGAGGu′GGCCu′ | |
| | | ACCACGAGAAGu′ACCCCACCAu′Cu′ACCACCu′GCGCA | |
| | | AGAAGCu′GGu′GGACAGCACCGACAAGGCCGACCu′GC | |
| | | GCCu′GAu′Cu′ACCu′GGCCCu′GGCCCACAu′GAu′CAAGu | |
| | | ′u′CCGCGGCCACu′u′CCu′GAu′CGAGGGCGACCu′GAAC | |
| | | CCCGACAACAGCGACGu′GGACAAGCu′Gu′u′CAu′CCAG | |
| | | Cu′GGu′GCAGACCu′ACAACCAGCu′Gu′u′CGAGGAGAA | |
| | | CCCCAu′CAACGCCAGCGGCGu′GGACGCCAAGGCCAu′ | |
| | | CCu′GAGCGCCCGCCu′GAGCAAGAGCCGCCGCCu′GGA | |
| | | GAACCu′GAu′CGCCCAGCu′GCCCGGCGAGAAGAAGAA | |
| | | CGGCCu′Gu′u′CGGCAACCu′GAu′CGCCCu′GAGCCu′GG | |
| | | GCCu′GACCCCCAACu′u′CAAGAGCAACu′u′CGACCu′GG | |
| | | CCGAGGACGCCAAGCu′GCAGCu′GAGCAAGGACACCu′ | |
| | | ACGACGACGACCu′GGACAACCu′GCu′GGCCCAGAu′CG | |
| | | GCGACCAGu′ACGCCGACCu′Gu′u′CCu′GGCCGCCAAGA | |
| | | ACCu′GAGCGACGCCAu′CCu′GCu′GAGCGACAu′CCu′GC | |
| | | GCGu′GAACACCGAGAu′CACCAAGGCCCCCCu′GAGCG | |
| | | CCAGCAu′GAu′CAAGCGCu′ACGACGAGCACCACCAGG | |
| | | ACCu′GACCCu′GCu′GAAGGCCCu′GGu′GCGCCAGCAGC | |
| | | u′GCCCGAGAAGu′ACAAGGAGAu′Cu′u′Cu′u′CGACCAG | |
| | | AGCAAGAACGGCu′ACGCCGGCu′ACAu′CGACGGCGGC | |
| | | GCCAGCCAGGAGGAGu′u′Cu′ACAAGu′u′CAu′CAAGCC | |
| | | CAu′CCu′GGAGAAGAu′GGACGGCACCGAGGAGCu′GCu | |
| | | ′GGu′GAAGCu′GAACCGCGAGGACCu′GCu′GCGCAAGC | |
| | | AGCGCACCu′u′CGACAACGGCAGCAu′CCCCCACCAGAu | |
| | | ′CCACCu′GGGCGAGCu′GCACGCCAu′CCu′GCGCCGCCA | |
| | | GGAGGACu′u′Cu′ACCCCu′u′CCu′GAAGGACAACCGCGA | |
| | | GAAGAu′CGAGAAGAu′CCu′GACCu′u′CCGCAu′CCCCu′ | |
| | | ACu′ACGu′GGGCCCCCu′GGCCCGCGGCAACAGCCGCu′ | |
| | | u′CGCCu′GGAu′GACCCGCAAGAGCGAGGAGACAAu′CA | |
| | | CCCCCu′GGAACu′u′CGAGGAGGu′GGu′GGACAAGGGC | |
| | | GCCAGCGCCCAGAGCu′u′CAu′CGAGCGCAu′GACCAAC | |
| | | u′u′CGACAAGAACCu′GCCCAACGAGAAGGu′GCu′GCCC | |
| | | AAGCACAGCCu′GCu′Gu′ACGAGu′ACu′u′CACCGu′Gu′A | |
| | | CAACGAGCu′GACCAAGGu′GAAGu′ACGu′GACCGAGGG | |
| | | CAu′GCGCAAGCCCGCCu′u′CCu′GAGCGGCGAGCAGAA | |
| | | GAAGGCCAu′CGu′GGACCu′GCu′Gu′u′CAAGACCAACC | |
| | | GCAAGGu′GACCGu′GAAGCAGCu′GAAGGAGGACu′ACu | |
| | | ′u′CAAGAAGAu′CGAGu′GCu′u′CGACAGCGu′GGAGAu′C | |
| | | AGCGGCGu′GGAGGACCGCu′u′CAACGCCAGCCu′GGGC | |
| | | ACCu′ACCACGACCu′GCu′GAAGAu′CAu′CAAGGACAAG | |
| | | GACu′u′CCu′GGACAACGAGGAGAACGAGGACAu′CCu′ | |
| | | GGAGGACAu′CGu′GCu′GACCCu′GACCCu′Gu′u′CGAGG | |
| | | ACCGCGAGAu′GAu′CGAGGAGCGCCu′GAAGACCu′ACG | |
| | | CCCACCu′Gu′u′CGACGACAAGGu′GAu′GAAGCAGCu′G | |
| | | AAGCGCCGCCGCu′ACACCGGCu′GGGGCCGCCu′GAGC | |
| | | CGCAAGCu′GAu′CAACGGCAu′CCGCGACAAGCAGAGC | |
| | | GGCAAGACCAu′CCu′GGACu′u′CCu′CAAGAGCGACGGC | |
| | | u′u′CGCCAACCGCAACu′u′CAu′GCAGCu′GAu′CCACGAC | |
| | | GACAGCCu′GACCu′u′CAAGGAGGACAu′CCAGAAGGCC | |
| | | CAGGu′GAGCGGCCAGGGCGACAGCCu′GCACGAGCAC | |
| | | Au′CGCCAACCu′GGCCGGCAGCCCCGCCAu′CAAGAAG | |
| | | GGCAu′CCu′GCAGACCGu′GAAGGu′GGu′GGACGAGCu′ | |
| | | GGu′GAAGGu′GAu′GGGCCGCCACAAGCCCGAGAACAu′ | |
| | | CGu′GAu′CGAGAu′GGCCCGCGAGAACCAGACCACCCA | |
| | | GAAGGGCCAGAAGAACAGCCGCGAGCGCAu′GAAGCG | |
| | | CAu′CGAGGAGGGCAu′CAAGGAGCu′GGGCAGCCAGAu′ | |
| | | CCu′GAAGGAGCACCCCGu′GGAGAACACCCAGCu′GCA | |
| | | GAACGAGAAGCu′Gu′ACCu′Gu′ACu′ACCu′GCAGAACG | |
| | | GCCGCGACAu′Gu′ACGu′GGACCAGGAGCu′GGACAu′CA | |
| | | ACCGCCu′GAGCGACu′ACGACGu′GGACCACAu′CGu′GC | |
| | | CCCAGAGCu′u′CCu′GAAGGACGACAGCAu′CGACAACA | |
| | | AGGu′GCu′GACCCGCAGCGACAAGAACCGCGGCAAGA | |
| | | GCGACAACGu′GCCCAGCGAGGAGGu′GGu′GAAGAAGA | |
| | | u′GAAGAACu′ACu′GGCGCCAGCu′GCu′GAACGCCAAGC | |
| | | u′GAu′CACCCAGCGCAAGu′u′CGACAACCu′GACCAAGG | |
| | | CCGAGCGCGGCGGCCu′GAGCGAGCu′GGACAAGGCCG | |
| | | GCu′u′CAu′CAAGCGCCAGCu′GGu′GGAGACACGCCAGA | |
| | | u′CACCAAGCACGu′GGCCCAGAu′CCu′GGACAGCCGCA | |
| | | u′GAACACCAAGu′ACGACGAGAACGACAAGCu′GAu′CC | |
| | | GCGAGGu′GAAGGu′GAu′CACCCu′CAAGAGCAAGCu′G | |
| | | Gu′GAGCGACu′u′CCGCAAGGACu′u′CCAGu′u′Cu′ACAA | |
| | | GGu′GCGCGAGAu′CAACAACu′ACCACCACGCCCACGA | |
| | | CGCCu′ACCu′GAACGCCGu′GGu′GGGCACCGCCCu′GAu′ | |
| | | CAAGAAGu′ACCCCAAGCu′GGAGAGCGAGu′u′CGu′Gu′ | |
| | | ACGGCGACu′ACAAGGu′Gu′ACGACGu′GCGCAAGAu′G | |
| | | Au′CGCCAAGAGCGAGCAGGAGAu′CGGCAAGGCCACC | |
| | | GCCAAGu′ACu′u′Cu′u′Cu′ACAGCAACAu′CAu′GAACu′u′ | |
| | | Cu′u′CAAGACCGAGAu′CACCCu′GGCCAACGGCGAGAu′ | |
| | | CCGCAAGCGCCCCCu′GAu′CGAGACAAACGGCGAGAC | |
| | | AGGCGAGAu′CGu′Gu′GGGACAAGGGCCGCGACu′u′CG | |
| | | CCACCGu′GCGCAAGGu′GCu′GAGCAu′GCCCCAGGu′GA | |
| | | ACAu′CGu′GAAGAAGACCGAGGu′GCAGACCGGCGGCu′ | |
| | | u′CAGCAAGGAGAGCAu′CCu′GCCCAAGCGCAACAGCG | |
| | | ACAAGCu′GAu′CGCCCGCAAGAAGGACu′GGGACCCCA | |
| | | AGAAGu′ACGGCGGCu′u′CGACAGCCCCACCGu′GGCCu′ | |
| | | ACAGCGu′GCu′GGu′GGu′GGCCAAGGu′GGAGAAGGGC | |
| | | AAGAGCAAGAAGCu′CAAGAGCGu′GAAGGAGCu′GCu′ | |
| | | GGGCAu′CACCAu′CAu′GGAGCGCAGCAGCu′u′CGAGAA | |
| | | GAACCCCAu′CGACu′u′CCu′GGAGGCCAAGGGCu′ACAA | |
| | | GGAGGu′GAAGAAGGACCu′GAu′CAu′CAAGCu′GCCCA | |
| | | AGu′ACAGCCu′Gu′u′CGAGCu′GGAGAACGGCCGCAAGC | |
| | | GCAu′GCu′GGCCAGCGCCGGCGAGCu′GCAGAAGGGCA | |
| | | ACGAGCu′GGCCCu′GCCCAGCAAGu′ACGu′GAACu′u′CC | |
| | | u′Gu′ACCu′GGCCAGCCACu′ACGAGAAGCu′GAAGGGCA | |
| | | GCCCCGAGGACAACGAGCAGAAGCAGCu′Gu′u′CGu′GG | |
| | | AGCAGCACAAGCACu′ACCu′GGACGAGAu′CAu′CGAGC | |
| | | AGAu′CAGCGAGu′u′CAGCAAGCGCGu′GAu′CCu′GGCC | |
| | | GACGCCAACCu′GGACAAGGu′GCu′GAGCGCCu′ACAAC | |
| | | AAGCACCGCGACAAGCCCAu′CCGCGAGCAGGCCGAG | |
| | | AACAu′CAu′CCACCu′Gu′u′CACCCu′GACCAACCu′GGGC | |
| | | GCCCCCGCCGCCu′u′CAAGu′ACu′u′CGACACCACCAu′C | |
| | | GACCGCAAGCGCu′ACACCAGCACCAAGGAGGu′GCu′G | |
| | | GACGCCACCCu′GAu′CCACCAGAGCAu′CACCGGCCu′G | |
| | | u′ACGAGACACGCAu′CGACCu′GAGCCAGCu′GGGCGGC | |
| | | GACAGCGGCGGCAAGCGCCCCGCCGCCACCAAGAAGG | |
| | | CCGGCCAGGCCAAGAAGAAGAAGu′AAu′AAu′AA | |
| | Protein | MAPKKKRKVGIHGVPAADKKYSIGLDIGTNSVGWAVITD | 2188 |
| | | EYKVPSKKFKVLGNTDRHSIKKNLIGALLFDSGETAEATR | |
| | | LKRTARRRYTRRKNRICYLQEIFSNEMAKVDDSFFHRLEE | |
| | | SFLVEEDKKHERHPIFGNIVDEVAYHEKYPTIYHLRKKLV | |
| | | DSTDKADLRLIYLALAHMIKFRGHFLIEGDLNPDNSDVD | |
| | | KLFIQLVQTYNQLFEENPINASGVDAKAILSARLSKSRRLE | |
| | | NLIAQLPGEKKNGLFGNLIALSLGLTPNFKSNFDLAEDAK | |
| | | LQLSKDTYDDDLDNLLAQIGDQYADLFLAAKNLSDAILL | |
| | | SDILRVNTEITKAPLSASMIKRYDEHHQDLTLLKALVRQQ | |
| | | LPEKYKEIFFDQSKNGYAGYIDGGASQEEFYKFIKPILEK | |
| | | MDGTEELLVKLNREDLLRKQRTFDNGSIPHQIHLGELHAI | |
| | | LRRQEDFYPFLKDNREKIEKILTFRIPYYVGPLARGNSRFA | |
| | | WMTRKSEETITPWNFEEVVDKGASAQSFIERMTNFDKNL | |
| | | PNEKVLPKHSLLYEYFTVYNELTKVKYVTEGMRKPAFLS | |
| | | GEQKKAIVDLLFKTNRKVTVKQLKEDYFKKIECFDSVEIS | |
| | | GVEDRFNASLGTYHDLLKIIKDKDFLDNEENEDILEDIVL | |
| | | TLTLFEDREMIEERLKTYAHLFDDKVMKQLKRRRYTGW | |
| | | GRLSRKLINGIRDKQSGKTILDFLKSDGFANRNFMQLIHD | |
| | | DSLTFKEDIQKAQVSGQGDSLHEHIANLAGSPAIKKGILQ | |
| | | TVKVVDELVKVMGRHKPENIVIEMARENQTTQKGQKNS | |
| | | RERMKRIEEGIKELGSQILKEHPVENTQLQNEKLYLYYLQ | |
| | | NGRDMYVDQELDINRLSDYDVDHIVPQSFLKDDSIDNKV | |
| | | LTRSDKNRGKSDNVPSEEVVKKMKNYWRQLLNAKLITQ | |
| | | RKFDNLTKAERGGLSELDKAGFIKRQLVETRQITKHVAQI | |
| | | LDSRMNTKYDENDKLIREVKVITLKSKLVSDFRKDFQFY | |
| | | KVREINNYHHAHDAYLNAVVGTALIKKYPKLESEFVYG | |
| | | DYKVYDVRKMIAKSEQEIGKATAKYFFYSNIMNFFKTEIT | |
| | | LANGEIRKRPLIETNGETGEIVWDKGRDFATVRKVLSMP | |
| | | QVNIVKKTEVQTGGFSKESILPKRNSDKLIARKKDWDPK | |
| | | KYGGFDSPTVAYSVLVVAKVEKGKSKKLKSVKELLGITI | |
| | | MERSSFEKNPIDFLEAKGYKEVKKDLIIKLPKYSLFELENG | |
| | | RKRMLASAGELQKGNELALPSKYVNFLYLASHYEKLKG | |
| | | SPEDNEQKQLFVEQHKHYLDEIIEQISEFSKRVILADANLD | |
| | | KVLSAYNKHRDKPIREQAENIIHLFTLTNLGAPAAFKYFD | |
| | | TTIDRKRYTSTKEVLDATLIHQSITGLYETRIDLSQLGGDS | |
| | | GGKRPAATKKAGQAKKKK | |
| 3′ UTR | mRNA | GCGGCCGCu′u′AAu′u′AAGCu′GCCu′u′Cu′GCGGGGCu′u′ | 2147 |
| | | GCCu′u′Cu′GGCCAu′GCCCu′u′Cu′u′Cu′Cu′CCCu′u′GCAC | |
| | | Cu′Gu′ACCu′Cu′u′GGu′Cu′u′u′GAAu′AAAGCCu′GAGu′A | |
| | | GGAAGu′Cu′AGA | |

The mutations at amino acid positions 691 and 1135 of the nCas9 component and their
corresponding nucleotide sequences are indicated as bold and underlined.
u′: N¹-methylpseudouridine
The first nucleotide in the 5′ UTR has a 2′-O-methyl modification.

TABLE 24
Guide RNA (SgRNA/gRNA) sequences

| | | | SEQ | | SEQ | |
|---|---|---|---|---|---|---|
| Gene | gRNA | Protospacer | ID | | ID | |
| Target | ID | (5′-3′) | NO: | Sequence (5′-3′) | NO: | Editor |
| hcPCS | GA01 | CGCCTGC | 252 | csgscsCUGCCAGCGCCUGGCGAG | 452 | CBE |
| K9 | 2 | CAGCGC | | UUUUAGAGCUAGAAAUAGCAAG | | |
| | | CTGGCG | | UUAAAAUAAGGCUAGUCCGUUA | | |
| | | A | | UCAACUUGAAAAAGUGGCACCG | | |
| | | | | AGUCGGUGCUsususu | | |
| hcPCS | GA01 | CGTGCG | 163 | csgsusGCGCAGGAGGACGAGGAG | 341 | CBE |
| K9 | 4 | CAGGAG | | UUUUAGAGCUAGAAAUAGCAAG | | |
| | | GACGAG | | UUAAAAUAAGGCUAGUCCGUUA | | |
| | | GA | | UCAACUUGAAAAAGUGGCACCG | | |
| | | | | AGUCGGUGCUsususu | | |
| hPCS | GA01 | GGTGCT | 66 | gsgsusGCUAGCCUUGCGUUCCGg | 1618 | SpCas |
| K9 | 8 | AGCCTTG | | UUUUAGagcuagaaauagcaaGUUaAaA | | 9 |
| | | CGTTCCG | | uAaggcuaGUccGUUAucAAcuugaaaa | | |
| | | | | agugGcaccgagucggugcuususu | | |
| hPCS | GA01 | GGTGCT | 66 | gsgsuGCUAGCCUUGCGUUCCGgU | 1619 | SpCas |
| K9 | 9 | AGCCTTG | | UUUAGagcuagaaauagcaaGUUaAaAu | | 9 |
| | | CGTTCCG | | AaggcuaGUccGUUAucAAcuugaaaaa | | |
| | | | | gugGcaccgagucggugcusususu | | |
| hPCS | GA02 | GGTGCT | 66 | gsgsuGCUAGCCUUGCGUUCCGgU | 1620 | SpCas |
| K9 | 0 | AGCCTTG | | UUUAGagcuagaaauagcaaGUUaAaAu | | 9 |
| | | CGTTCCG | | AaggcuaGUccGUUAucAAcuugaaaaa | | |
| | | | | gugGcaccgagucggugcuususu | | |
| hPCS | GA02 | GGTGCT | 66 | gsgsuGCUAGCCUUGCGUUCCGgU | 1621 | SpCas |
| K9 | 1 | AGCCTTG | | UUUAGagcuagaaauagcaaGUUaAaAu | | 9 |
| | | CGTTCCG | | AaggcuaGUccGUUAucAAcuugaaaaa | | |
| hPCS | GA02 | GGTGCT | 66 | gsgsusGCUAGCCUUGCGUUCCGg | 2292 | SpCas |
| K9 | 2 | AGCCTTG | | UUUuAGagcuagaaauagcaaGUUaAaA | | 9 |
| | | CGTTCCG | | uAaggcuaGUccGUUAucAAcuugaaaa | | |
| | | | | agugGcaccgagucggugcusususu | | |
| hPCS | GA02 | GGTGCT | 66 | gsgsusGCUAGCCUUGCGUUCCGg | 2293 | SpCas |
| K9 | 3 | AGCCTTG | | UUUUAGagcuagaaauagcaaGUUaAaA | | 9 |
| | | CGTTCCG | | uAaggcuaGUccGUuAucAAcuugaaaaa | | |
| | | | | gugGcaccgagucggugcusususu | | |
| hPCS | GA02 | GGTGCT | 66 | gsgsusGCUAGCCUUGCGUUCCGg | 2294 | SpCas |
| K9 | 4 | AGCCTTG | | UUUuAGagcuagaaauagcaaGUUaAaA | | 9 |
| | | CGTTCCG | | uAaggcuaGUccGUuAucAAcuugaaaaa | | |
| | | | | gugGcaccgagucggugcusususu | | |
| hPCS | GA02 | GGTGCT | 66 | gsgsusGCUAGCCUUGCGUUCCGg | 2295 | SpCas |
| K9 | 5 | AGCCTTG | | UUUuAGagcuagaaauagcaaGUuaAaA | | 9 |
| | | CGTTCCG | | uAaggcuaGUccGUUAucAAcuugaaaa | | |
| | | | | agugGcaccgagucggugcusususu | | |
| hPCS | GA02 | GGTGCT | 66 | gsgsusGCUAGCCUUGCGUUCCGg | 2296 | SpCas |
| K9 | 6 | AGCCTTG | | UUUUAGagcuagaaauagcaaGUuaAaA | | 9 |
| | | CGTTCCG | | uAaggcuaGUccGUuAucAAcuugaaaaa | | |
| | | | | gugGcaccgagucggugcusususu | | |
| hPCS | GA02 | GGTGCT | 66 | gsgsusGCUAGCCUUGCGUUCCGg | 2297 | SpCas |
| K9 | 7 | AGCCTTG | | UUUuAGagcuagaaauagcaaGUuaAaA | | 9 |
| | | CGTTCCG | | uAaggcuaGUccGUuAucAAcuugaaaaa | | |
| | | | | gugGcaccgagucggugcusususu | | |
| hPCS | GA02 | GGTGCT | 66 | gsgsusGCUAGCCUUGCGUUCCGg | 2298 | SpCas |
| K9 | 8 | AGCCTTG | | UUUuAGagcuagaaauagcaaGUusaAaA | | 9 |
| | | CGTTCCG | | uAaggcuaGUccGUusAucAAcuugaaaa | | |
| | | | | agugGcaccgagucggugcusususu | | |
| hPCS | GA02 | GGTGCT | 66 | gsgsusGCuAGCCUuGCGUUCcGgU | 2299 | SpCas |
| K9 | 9 | AGCCTTG | | UUUAGagcuagaaauagcaaGUUaAaAu | | 9 |
| | | CGTTCCG | | AaggcuaGUccGUUAucAAcuugaaaaa | | |
| | | | | gugGcaccgagucggugcusususu | | |
| hPCS | GA03 | GGTGCT | 66 | gsgsusGCuAGCCUuGCGUUCcGgU | 2300 | SpCas |
| K9 | 9 | AGCCTTG | | UUUAGagcuagaaauagcaaGUUsaAaA | | 9 |
| | | CGTTCCG | | uAaggcuaGUccGUUsAucAAcuugaaaa | | |
| | | | | agugGcaccgagucggugcusususu | | |
| hANG | GA05 | GCCAAT | 109 | iscscsAAUGGCCUCCUUCAGUUGU | 1622 | SpCas |
| PTL3 | 8 | GGCCTCC | | UUUAGAgcuagaaauagcAAGUUAAA | | 9 |
| | | TTCAGTT | | AUAAGGCUAGUCCGUUAUCAacu | | |
| | | | | ugaaaaaguggcaccgagucggugcusususu | | |
| hANG | GA05 | CCAATG | 1594 | cscsAAUGGCCUCCUUCAGUUGU | 1623 | SpCas |
| PTL3 | 9 | GCCTCCT | | UUUAGAgcuagaaauagcAAGUUAAA | | 9 |
| | | TCAGTT | | AUAAGGCUAGUCCGUUAUCAacu | | |
| | | | | ugaaaaaguggcaccgagucggugcusususu | | |
| hANG | GA06 | CAATGG | 1595 | csAAUGGCCUCCUUCAGUUGUUU | 1624 | SpCas |
| PTL3 | 0 | CCTCCTT | | UAGAgcuagaaauagcAAGUUAAAAU | | 9 |
| | | CAGTT | | AAGGCUAGUCCGUUAUCAacuuga | | |
| | | | | aaaaguggcaccgagucggugcusususu | | |
| hANG | GA06 | CAATGG | 1595 | csasAUGGCCUCCUUCAGUUGUU | 1625 | SpCas |
| PTL3 | 1 | CCTCCTT | | UUAGAgcuagaaauagcAAGUUAAAA | | 9 |
| | | CAGTT | | UAAGGCUAGUCCGUUAUCAacuu | | |
| | | | | gaaaaaguggcaccgagucggugcusususu | | |
| hANG | GA06 | AATGGC | 1596 | AAUGGCCUCCUUCAGUUGUUUU | 1626 | SpCas |
| PTL3 | 2 | CTCCTTC | | AGAgcuagaaauagcAAGUUAAAAUA | | 9 |
| | | AGTT | | AGGCUAGUCCGUUAUCAacuugaaa | | |
| | | | | aaguggcaccgagucggugcusususu | | |
| hANG | GA06 | AATGGC | 1596 | asasUGGCCUCCUUCAGUUGUUU | 1627 | SpCas |
| PTL3 | 3 | CTCCTTC | | UAGAgcuagaaauagcAAGUUAAAAU | | 9 |
| | | AGTT | | AAGGCUAGUCCGUUAUCAacuuga | | |
| | | | | aaaaguggcaccgagucggugcusususu | | |
| hANG | GA06 | GCCAAT | 109 | gscscsAAUGGCCUCCUUCAIUUGU | 1628 | SpCas |
| PTL3 | 4 | GGCCTCC | | UUUAGAgcuagaaauagcAAGUUAAA | | 9 |
| | | TTCAGTT | | AUAAGGCUAGUCCGUUAUCAacu | | |
| | | | | ugaaaaaguggcaccgagucggugcusususu | | |
| hANG | GA06 | TCCAATG | 1597 | iscscsAAUGGCCUCCUUCAIUUGU | 1629 | SpCas |
| PTL3 | 5 | GCCTCCT | | UUUAGAgcuagaaauagcAAGUUAAA | | 9 |
| | | TCAGTT | | AUAAGGCUAGUCCGUUAUCAacu | | |
| | | | | ugaaaaaguggcaccgagucggugcusususu | | |
| hANG | GA06 | GCCAAT | 109 | gscscsAAUIICCUCCUUCAIUUGUU | 1630 | SpCas |
| PTL3 | 8 | GGCCTCC | | UUAGAgcuagaaauagcAAGUUAAAA | | 9 |
| | | TTCAGTT | | UAAGGCUAGUCCGUUAUCAacuu | | |
| | | | | gaaaaaguggcaccgagucggugcusususu | | |
| hANG | GA06 | GCCAAT | 109 | ascscsAAUGGCCUCCUUCAGUUG | 1631 | SpCas |
| PTL3 | 9 | GGCCTCC | | UUUUAGAgcuagaaauagcAAGUUAA | | 9 |
| | | TTCAGTT | | AAUAAGGCUAGUCCGUUAUCAa | | |
| | | | | cuugaaaaaguggcaccgagucggugcususus | | |
| | | | | u | | |
| hANG | GA07 | GCCAAT | 50 | iscscsAAUiGCCUCCUUCAGUUGU | 1632 | SpCas |
| PTL3 | 0 | GGCCTCC | | UUUAGAgcuagaaauagcAAGUUAAA | | 9 |
| | | TTCAGTT | | AUAAGGCUAGUCCGUUAUCAacu | | |
| | | | | ugaaaaaguggcaccgagucggugcusususu | | |
| hANG | GA07 | GCCAAT | 109 | gscscsAAUiGCCUCCUUCAGUUGU | 1633 | SpCas |
| PTL3 | 1 | GGCCTCC | | UUUAGAgcuagaaauagcAAGUUAAA | | 9 |
| | | TTCAGTT | | AUAAGGCUAGUCCGUUAUCAacu | | |
| | | | | ugaaaaaguggcaccgagucggugcusususu | | |
| mAN | GA15 | GCGAAT | 1598 | gscsgsAAUGGCCUCCUGCAGCUG | 1634 | SpCas |
| GPTL | 4 | GGCCTCC | | UUUUAGAGCUAGAAAUAGCAAG | | 9 |
| 3 | | TGCAGCT | | UUAAAAUAAGGCUAGUCCGUUA | | |
| | | | | UCAACUUGAAAAAGUGGCACCG | | |
| | | | | AGUCGGUGCUsususu | | |
| mAN | GA15 | AGCCCTT | 1599 | asgscsCCUUCAACACAAGGUCAG | 1635 | SpCas |
| GPTL | 5 | CAACAC | | UUUUAGAGCUAGAAAUAGCAAG | | 9 |
| 3 | | AAGGTC | | UUAAAAUAAGGCUAGUCCGUUA | | |
| | | A | | UCAACUUGAAAAAGUGGCACCG | | |
| | | | | AGUCGGUGCUsususu | | |
| hcAN | GA27 | TAAGAC | 1600 | usasasGACCAUGUCCCAACUGAG | 2191 | SpCas |
| GPTL | 5 | CATGTCC | | UUUUAGAGCUAGAAAUAGCAAG | | 9 |
| 3 | | CAACTG | | UUAAAAUAAGGCUAGUCCGUUA | | |
| | | A | | UCAACUUGAAAAAGUGGCACCG | | |
| | | | | AGUCGGUGCUsususu | | |
| hcAN | GA28 | CAATGTC | 1601 | csasasUGUCCCCAAUGCAAUCCG | 1637 | SpCas |
| GPTL | 0 | CCCAAT | | UUUUAGAGCUAGAAAUAGCAAG | | 9 |
| 3 | | GCAATC | | UUAAAAUAAGGCUAGUCCGUUA | | |
| | | C | | UCAACUUGAAAAAGUGGCACCG | | |
| | | | | AGUCGGUGCUsususu | | |
| hcAN | GA28 | TTGTTTT | 1602 | ususgsUUUUCCGGGAUUGCAUUG | 1638 | SpCas |
| GPTL | 1 | CCGGGA | | UUUUAGAGCUAGAAAUAGCAAG | | 9 |
| 3 | | TTGCATT | | UUAAAAUAAGGCUAGUCCGUUA | | |
| | | | | UCAACUUGAAAAAGUGGCACCG | | |
| | | | | AGUCGGUGCUsususu | | |
| hcAN | GA28 | TTTGTTT | 1603 | usususGUUUUCCGGGAUUGCAUG | 1639 | SpCas |
| GPTL | 2 | TCCGGG | | UUUUAGAGCUAGAAAUAGCAAG | | 9 |
| 3 | | ATTGCAT | | UUAAAAUAAGGCUAGUCCGUUA | | |
| | | | | UCAACUUGAAAAAGUGGCACCG | | |
| | | | | AGUCGGUGCUsususu | | |
| hcAN | GA28 | AATCCC | 1604 | asasusCCCGGAAAACAAAGAUUG | 1640 | SpCas |
| GPTL | 3 | GGAAAA | | UUUUAGAGCUAGAAAUAGCAAG | | 9 |
| 3 | | CAAAGA | | UUAAAAUAAGGCUAGUCCGUUA | | |
| | | TT | | UCAACUUGAAAAAGUGGCACCG | | |
| | | | | AGUCGGUGCUsususu | | |
| hcAN | GA28 | TGTTTTC | 1605 | usgsusUUUCCGGGAUUGCAUUGG | 1641 | SpCas |
| GPTL | 5 | CGGGAT | | UUUUAGAGCUAGAAAUAGCAAG | | 9 |
| 3 | | TGCATTG | | UUAAAAUAAGGCUAGUCCGUUA | | |
| | | | | UCAACUUGAAAAAGUGGCACCG | | |
| | | | | AGUCGGUGCUsususu | | |
| mPCS | GA29 | cccatacCT | 69 | cscscsAUACCUUGGAGCAACGGG | 2291 | ABE |
| K9 | 2 | TGGAGC | | UUUUAGAGCUAGAAAUAGCAAG | | |
| | | AACGG | | UUAAAAUAAGGCUAGUCCGUUA | | |
| | | | | UCAACUUGAAAAAGUGGCACCG | | |
| | | | | AGUCGGUGCUsususu | | |
| hcPCS | GA30 | GCTTACC | 67 | gscsusUACCUGUCUGUGGAAGCg | 2301 | ABE |
| K9 | 7 | TGTCTGT | | UUUUAGagcuagaaauagcaaGUUaAaA | | |
| | | GGAAGC | | uAaggcuaGUccGUUAucAAcuugaaaa | | |
| | | | | agugGcaccgagucggugcusususu | | |
| hcPCS | GA30 | TGCTTAC | 68 | usgscsUUACCUGUCUGUGGAAGg | 2302 | ABE |
| K9 | 8 | CTGTCTG | | UUUUAGagcuagaaauagcaaGUUaAaA | | |
| | | TGGAAG | | uAaggcuaGUccGUUAucAAcuugaaaa | | |
| | | | | agugGcaccgagucggugcusususu | | |
| mPCS | GA34 | CCCATAC | 69 | cscscsAUACCUUGGAGCAACGGG | 2303 | ABE |
| K9 | 8 | CTTGGA | | UUUUAGAgcuagaaauagcAAGUUAA | | |
| | | GCAACG | | AAUAAGGCUAGUCCGUUAUCAa | | |
| | | G | | cuugaaaaaguggcaccgagucggugcususus | | |
| | | | | u | | |
| mPCS | GA35 | CCCATAC | 69 | cscscsAUACCUUGGAGCAACGGgU | 1642 | ABE |
| K9 | 4 | CTTGGA | | UUUAGagcuaGaaauagcaaGUUaAaAu | | |
| | | GCAACG | | AaggcuaGUccGUUAucAAcuuGaaaaa | | |
| | | G | | gugGcaccgagucggugcuususu | | |
| mPCS | GA35 | CCCATAC | 69 | cscscsAUACCUUGGAGCAACGGgU | 1643 | ABE |
| K9 | 5 | CTTGGA | | UUUAGagcuaGaaauagcaaGUUaAaAu | | |
| | | GCAACG | | AaggcuaGUccGUUAucAAcuuGaaaaa | | |
| | | G | | | | |
| mPCS | GA35 | CCCATAC | 69 | cscscsAUACCUUGGAGCAACGGgU | 1644 | ABE |
| K9 | 6 | CTTGGA | | UUUAGagcuaGaaauagcaaGUUaAaAu | | |
| | | GCAACG | | AaggcuaGUccGUUAucAAcuuGaaaaa | | |
| | | G | | | | |
| mPCS | GA35 | CCCATAC | 69 | cscscsAUACCUUGGAGCAACGGgU | 1645 | ABE |
| K9 | 7 | CTTGGA | | UUUAGagcuaGaaauagcaaGUUsaAaA | | |
| | | GCAACG | | uAaggcuaGUccGUUsAucAAcuuGaaa | | |
| | | G | | | | |
| mPCS | GA35 | CCCATAC | 69 | cscscsAUACCUUGGAGCAACGGgU | 1646 | ABE |
| K9 | 8 | CTTGGA | | UUUAGagcuaGaaauagcaaGUUsaAaA | | |
| | | GCAACG | | uAaggcuaGUccGUUAucAAcuuGaaaa | | |
| | | G | | | | |
| mPCS | GA35 | CCCATAC | 69 | cscscsAUACCUUGGAGCAACGGgU | 1647 | ABE |
| K9 | 9 | CTTGGA | | UUUAGagcuaGaaauagcaaGUUaAaAu | | |
| | | GCAACG | | AaggcuaGUccGUUsAucAAcuuGaaaa | | |
| | | G | | | | |
| mPCS | GA36 | CCCATAC | 69 | cscscsAUACCUUGGAGCAACGGgU | 2304 | ABE |
| K9 | 0 | CTTGGA | | UUUAGagcuaGaaauagcaaGUUsaAaA | | |
| | | GCAACG | | uAaggcuaGUccGUUsAucAAcuuGaaa | | |
| | | G | | aagugGcaccgagucggugcuususuuUu | | |
| mPCS | GA36 | CCCATAC | 69 | cscscsAUACCUUGGAGCAACGGgU | 2305 | ABE |
| K9 | 1 | CTTGGA | | UUUAGagcuaGaaauagcaaGUUsaAaA | | |
| | | GCAACG | | uAaggcuaGUccGUUAucAAcuuGaaaa | | |
| | | G | | agugGcaccgagucggugcuususuuUu | | |
| mPCS | GA36 | CCCATAC | 69 | cscscsAUACCUUGGAGCAACGGgU | 2306 | ABE |
| K9 | 2 | CTTGGA | | UUUAGagcuaGaaauagcaaGUUaAaAu | | |
| | | GCAACG | | AaggcuaGUccGUUsAucAAcuuGaaaa | | |
| | | G | | agugGcaccgagucggugcuususuuUu | | |
| mPCS | GA36 | CCCATAC | 69 | cscscsAUACCUUGGAGCAACGGgU | 2307 | ABE |
| K9 | 3 | CTTGGA | | UUUAGagcuagaaauagcaaGUUaAaAu | | |
| | | GCAACG | | AaggcuaGUCcGUUAucAAcuugaaaaa | | |
| | | G | | guggcaccgagucggugcusususu | | |
| mPCS | GA36 | CCCATAC | 69 | cscscsAUACCUUGGAGCAACGGgU | 2308 | ABE |
| K9 | 4 | CTTGGA | | UUUAGagcuagaaauagcaaGUUaAaAu | | |
| | | GCAACG | | AaggcuaGuCcGUUaucAAcuugaaaaag | | |
| | | G | | uggcaccgagucggugcusususu | | |
| mPCS | GA36 | CCCATAC | 69 | cscscsAUACCUUGGAGCAACGGgU | 2309 | ABE |
| K9 | 5 | CTTGGA | | UUuagagcuagaaauagcaaGUUaAaAuaa | | |
| | | GCAACG | | ggcuaGuccgUUaucaacuugaaaaaguggca | | |
| | | G | | ccgagucggugcusususu | | |
| hPCS | GA37 | CCCGCA | 13 | cscscsGCACCUUGGCGCAGCGGgU | 10 | ABE |
| K9 | 4 | CCTTGGC | | UUUAGagcuagaaauagcaaGUUaAaAu | | |
| | | GCAGCG | | AaggcuaGUccGUUAacAAcuugaaaaag | | |
| | | G | | ugGcaccgagucggugcusususu | | |
| hPCS | GA37 | CCCGCA | 13 | cscscsGdCACCUdUGGdCGdCAGdC | 1648 | ABE |
| K9 | 8 | CCTTGGC | | GGgUUUUAGagcuaGaaauagcaaGUU | | |
| | | GCAGCG | | aAaAuAaggcuaGUccGUUAucAAcuu | | |
| | | G | | GaaaaagugGcaccgagucggugcusususu | | |
| hPCS | GA37 | CCCGCA | 13 | cscscsGCdACCUUdGGCdGCdAGCd | 1649 | ABE |
| K9 | 9 | CCTTGGC | | GGGUUUUAGAgUUUUAGagcuaGa | | |
| | | GCAGCG | | aauagcaaGUUaAaAuAaggcuaGUccG | | |
| | | G | | UUAucAAcuuGaaaaagugGcaccgaguc | | |
| | | | | ggugcusususu | | |
| hPCS | GA39 | CCCGCA | 13 | cscscsGCACCUUGGCGCAGCGGgU | 2310 | ABE |
| K9 | 0 | CCTTGGC | | UUuagagcuagaaauagcaaGUUaAaAuaa | | |
| | | GCAGCG | | ggcuaGuccgUUaucaacuugaaaaaguggca | | |
| | | G | | ccgagucggugcusususu | | |
| hANG | GA39 | AAGATA | 15 | asgsAUACCUGAAUAACCCUCgUU | 1650 | ABE |
| PTL3 | 2 | CCTGAAT | | UUAGagcuaGaaauagcaaGUUaAaAuA | | |
| | | AACCCTC | | aggcuaGUccGUUAucAAcuuGaaaaag | | |
| | | | | ugGcaccgagucggugcusususu | | |
| hcPCS | GA43 | CCCGCA | 13 | cscscsGCACCUUGGCGCAGCGGgU | 2277 | ABE |
| K9 | 9 | CCTTGGC | | UUUAGagcuaGaaauagcaaGUUaAaAu | | |
| | | GCAGCG | | AaggcuaGUccGUUAucAAcuuGaaaaa | | |
| | | G | | gugGcaccgagucggugcusususuUUu | | |
| hcPCS | GA44 | CCCGCA | 13 | cscscsGCACCUUGGCGCAGCGGgU | 2278 | ABE |
| K9 | 0 | CCTTGGC | | UUUAGagcuagaaauagcaaGUUaAaAu | | |
| | | GCAGCG | | AaggcuaGUccGUUAucAAcuugaaaaa | | |
| | | G | | gugGcaccgagucggugcusususuUUu | | |
| hANG | GA46 | AGATAC | 248 | asgsasUACCUGAAUAACCCUCGU | 2311 | ABE |
| PTL3 | 2 | CTGAAT | | UUUAGAGCUAGAAAUAGCAAGU | | |
| | | AACCCTC | | UAAAAUAAGGCUAGUCCGUUAU | | |
| | | | | CAACUUGAAAAAGUGGCACCGA | | |
| | | | | GUCGGUGCUsususu | | |
| hANG | GA46 | GATACCT | 249 | gsasUACCUGAAUAACCCUCGUU | 2312 | ABE |
| PTL3 | 3 | GAATAA | | UUAGAGCUAGAAAUAGCAAGUU | | |
| | | CCCTC | | AAAAUAAGGCUAGUCCGUUAUC | | |
| | | | | AACUUGAAAAAGUGGCACCGAG | | |
| | | | | UCGGUGCUsususu | | |
| hANG | GA46 | ATACCTG | 250 | asusACCUGAAUAACCCUCGUUU | 2313 | ABE |
| PTL3 | 4 | AATAAC | | UAGAGCUAGAAAUAGCAAGUUA | | |
| | | CCTC | | AAAUAAGGCUAGUCCGUUAUCA | | |
| | | | | ACUUGAAAAAGUGGCACCGAGU | | |
| | | | | CGGUGCUsususu | | |
| hANG | GA46 | AGATAC | 248 | asgsAUACCUGAAUAACCCUCGU | 2314 | ABE |
| PTL3 | 5 | CTGAAT | | UUUAGAGCUAGAAAUAGCAAGU | | |
| | | AACCCTC | | UAAAAUAAGGCUAGUCCGUUAU | | |
| | | | | CAACUUGAAAAAGUGGCACCGA | | |
| | | | | GUCGGUGCUsususu | | |
| hANG | GA46 | GATACCT | 249 | gsasUsACCUGAAUAACCCUCGUU | 1651 | ABE |
| PTL3 | 6 | GAATAA | | UUAGAGCUAGAAAUAGCAAGUU | | |
| | | CCCTC | | AAAAUAAGGCUAGUCCGUUAUC | | |
| | | | | AACUUGAAAAAGUGGCACCGAG | | |
| | | | | UCGGUGCUsususu | | |
| hANG | GA46 | ATACCTG | 250 | asUsACCUGAAUAACCCUCGUUU | 2315 | ABE |
| PTL3 | 7 | AATAAC | | UAGAGCUAGAAAUAGCAAGUUA | | |
| | | CCTC | | AAAUAAGGCUAGUCCGUUAUCA | | |
| | | | | ACUUGAAAAAGUGGCACCGAGU | | |
| | | | | CGGUGCUsususu | | |
| CANG | GA51 | GATACCT | 1606 | gsasUsACCUGAAUAACUCUCgUU | 1652 | ABE |
| PTL3 | 7 | GAATAA | | UUAGagcuaGaaauagcaaGUUaAaAuA | | |
| | | CTCTC | | aggcuaGUccGUUAucAAcuuGaaaaag | | |
| | | | | ugGcaccgagucggugcusususu | | |
| CANG | GA51 | ATACCTG | 1607 | asusAsCCUGAAUAACUCUCgUUU | 1653 | ABE |
| PTL3 | 8 | AATAAC | | UAGagcuaGaaauagcaaGUUaAaAuAa | | |
| | | TCTC | | ggcuaGUccGUUAucAAcuuGaaaaagu | | |
| | | | | gGcaccgagucggugcusususu | | |
| hANG | GA53 | AAGATA | 15 | asasgsAUXCCUGAAUAACCCUCgU | 1654 | ABE |
| PTL3 | 9 | CCTGAAT | | UUUAGagcuaGaaauagcaaGUUaAaAu | | |
| | | AACCCTC | | AaggcuaGUccGUUAucAAcuuGaaaaa | | |
| | | | | gugGcaccgagucggugcusususu | | |
| hANG | GA54 | AAGATA | 15 | asasgsAUXCCUGXAUAACCCUCgU | 1655 | ABE |
| PTL3 | 0 | CCTGAAT | | UUUAGagcuaGaaauagcaaGUUaAaAu | | |
| | | AACCCTC | | AaggcuaGUccGUUAucAAcuuGaaaaa | | |
| | | | | gugGcaccgagucggugcusususu | | |
| hANG | GA54 | AAGATA | 15 | asasgsAUXCCUGAAUAXCCCUCgU | 1656 | ABE |
| PTL3 | 1 | CCTGAAT | | UUUAGagcuaGaaauagcaaGUUaAaAu | | |
| | | AACCCTC | | AaggcuaGUccGUUAucAAcuuGaaaaa | | |
| | | | | gugGcaccgagucggugcusususu | | |
| hANG | GA54 | AAGATA | 15 | asasgsAUXCCUGXAUXACCCUCgU | 1657 | ABE |
| PTL3 | 2 | CCTGAAT | | UUUAGagcuaGaaauagcaaGUUaAaAu | | |
| | | AACCCTC | | AaggcuaGUccGUUAucAAcuuGaaaaa | | |
| | | | | gugGcaccgagucggugcusususu | | |
| hANG | GA54 | AAGATA | 15 | asasgsXUXCCUGAAUAACCCUCgU | 1658 | ABE |
| PTL3 | 3 | CCTGAAT | | UUUAGagcuaGaaauagcaaGUUaAaAu | | |
| | | AACCCTC | | AaggcuaGUccGUUAucAAcuuGaaaaa | | |
| | | | | gugGcaccgagucggugcusususu | | |
| hANG | GA54 | AAGATA | 15 | asasgsXUXCCUGAAUAXCCCUCgU | 1659 | ABE |
| PTL3 | 4 | CCTGAAT | | UUUAGagcuaGaaauagcaaGUUaAaAu | | |
| | | AACCCTC | | AaggcuaGUccGUUAucAAcuuGaaaaa | | |
| | | | | gugGcaccgagucggugcusususu | | |
| hANG | GA54 | AAGATA | 15 | asasgsXUACCUGAAUXACCCUCgU | 1660 | ABE |
| PTL3 | 5 | CCTGAAT | | UUUAGagcuaGaaauagcaaGUUaAaAu | | |
| | | AACCCTC | | AaggcuaGUccGUUAucAAcuuGaaaaa | | |
| | | | | gugGcaccgagucggugcusususu | | |
| hANG | GA54 | AAGATA | 15 | asasgsAUACCUGXAUAACCCUCgU | 1661 | ABE |
| PTL3 | 6 | CCTGAAT | | UUUAGagcuaGaaauagcaaGUUaAaAu | | |
| | | AACCCTC | | AaggcuaGUccGUUAucAAcuuGaaaaa | | |
| | | | | gugGcaccgagucggugcusususu | | |
| hANG | GA54 | AAGATA | 15 | asasgsAUACCUGAAUAACUCUCgU | 445 | ABE |
| PTL3 | 7 | CCTGAAT | | UUUAGagcuaGaaauagcaaGUUaAaAu | | |
| | | AACCCTC | | AaggcuaGUccGUUAucAAcuuGaaaaa | | |
| | | | | guggcaccgagucggugcusususuUUu | | |
| hANG | GA54 | AAGATA | 15 | asasgsAUACCUGXAUAXCCCUCgU | 1662 | ABE |
| PTL3 | 8 | CCTGAAT | | UUUAGagcuaGaaauagcaaGUUaAaAu | | |
| | | AACCCTC | | AaggcuaGUccGUUAucAAcuuGaaaaa | | |
| | | | | gugGcaccgagucggugcusususu | | |
| hcAN | GA54 | CCGCAC | 247 | asasgsAUXCCUGAAUAXCCCUCgU | 1656 | ABE |
| GPTL | 9 | CTTGGCG | | UUUAGagcuaGaaauagcaaGUUaAaAu | | |
| 3 | | CAGCGG | | AaggcuaGUccGUUAucAAcuuGaaaaa | | |
| | | | | gugGcaccgagucggugcusususu | | |
| mcPC | GA00 | CAGGTTC | 81 | 5′csasgsGUUCCAUGGGAUGCUCU | 1663 | SpCas |
| SK9 | 394 | CATGGG | | gUUUUsAGagcuagaaauagcaaGUUaA | | 9 |
| | | ATGCTCT | | aAuAaggCUaGUCcGUUAucAAcuug | | |
| | | | | aaaaaguGgcaccgAgUcggugcuususu-3′ | | |
| mcPC | GA00 | CAGGTTC | 81 | 5′csasgsGUUCCAUGGGAUGCUCU | 2316 | SpCas |
| SK9 | 395 | CATGGG | | gUUUUsAGagcuagaaauagcaaGUUaA | | 9 |
| | | ATGCTCT | | aAuAaggcuaGUccGUUAucAAcuuGa | | |
| | | | | aaaaguGgcaccgAgUCggugcuususu-3′ | | |
| mcPC | GA00 | CAGGTTC | 81 | 5′csasgsGUUCCAUGGGAUGCUCU | 1664 | SpCas |
| SK9 | 396 | CATGGG | | gUUUUsAGagcuaGaaauagcaaGUUaA | | 9 |
| | | ATGCTCT | | aAuAaggCUaGUCcGUUAucAAcuug | | |
| | | | | aaaaaguGgcaccgAgUCggugcusususu- | | |
| | | | | 3′ | | |
| mcPC | GA00 | CAGGTTC | 81 | 5′csasgsGUUCCAUGGGAUGCUCU | 2317 | SpCas |
| SK9 | 397 | CATGGG | | gUUUUsAGagcuaGaaauagcaaGUUaA | | 9 |
| | | ATGCTCT | | aAuAaggCUaGUCcGUUAucAAcuug | | |
| | | | | aaaaaguGgcaccgAgUcggugcuususu-3′ | | |
| mcPC | GA00 | CAGGTTC | 81 | 5′csasgsGUUCCAUGGGAUGCUCU | 2318 | SpCas |
| SK9 | 398 | CATGGG | | gUUUUsAGagcuaGaaauagcaaGUUaA | | 9 |
| | | ATGCTCT | | aAuAaggcuaGUccGUUAucAAcuuGa | | |
| | | | | aaaaguGgcaccgAgUCggugcuususu-3′ | | |
| mPCS | GA00 | CCCATAC | 69 | 5′cscscsAUACCUUGGAGCAACGGg | 1665 | ABE |
| K9 | 399 | CTTGGA | | UUUUAGagcuaGaaauagcaaGUUsaAa | | |
| | | GCAACG | | AuAaggCUaGUCcGUUsAucAAcuuG | | |
| | | G | | aaaaaguGgcaccgAgUCggugcuususu-3′ | | |
| mPCS | GA00 | CCCATAC | 69 | 5′cscscsAUACCUUGGAGCAACGGg | 2319 | ABE |
| K9 | 400 | CTTGGA | | UUUUAGagcuagaaauagcaaGUUsaAa | | |
| | | GCAACG | | AuAaggcuaGUccGUUsAucAAcuugaa | | |
| | | G | | aaagugGcaccgagucggugcuususu-3′ | | |
| mPCS | GA00 | CCCATAC | 69 | 5′cscscsAUACCUUGGAGCAACGGg | 2320 | ABE |
| K9 | 401 | CTTGGA | | UUUUAGagcuaGaaauagcaaGUUsaAa | | |
| | | GCAACG | | AuAaggcuaGUccGUUsAucAAcuuGa | | |
| | | G | | aaaagugGcaccgagucggugcuususu-3′ | | |
| mAN | GA00 | GAGATA | 241 | 5′gsasgsAUACCUGAGUAACUUUC | 1666 | ABE |
| GPTL | 402 | CCTGAGT | | gUUUUAGagcuaGaaauagcaaGUUsaA | | |
| 3 | | AACTTTC | | aAuAaggCUaGUCcGUUsAucAAcuu | | |
| | | | | GaaaaaguGgcaccgAgUCggugcuususu- | | |
| | | | | 3′ | | |
| mAN | GA00 | GAGATA | 241 | 5′gsasgsAUACCUGAGUAACUUUC | 2321 | ABE |
| GPTL | 403 | CCTGAGT | | gUUUUAGagcuagaaauagcaaGUUsaA | | |
| 3 | | AACTTTC | | aAuAaggcuaGUccGUUsAucAAcuuga | | |
| | | | | aaaagugGcaccgagucggugcuususu-3′ | | |
| mAN | GA00 | GAGATA | 241 | 5′gsasgsAUACCUGAGUAACUUUC | 2322 | ABE |
| GPTL | 404 | CCTGAGT | | gUUUUAGagcuaGaaauagcaaGUUsaA | | |
| 3 | | AACTTTC | | aAuAaggcuaGUccGUUsAucAAcuuG | | |
| | | | | aaaaagugGcaccgagucggugcuususu-3′ | | |
| mcPC | GA00 | CAGGTTC | 81 | 5′csasgsGUUCCAUGGGAUGCUCU | 1667 | SpCas |
| SK9 | 405 | CATGGG | | gUUUUAGagcuaGaaauagcaaGUUsaA | | 9 |
| | | ATGCTCT | | aAuAaggcuaGUccGUUsAucAAcuuG | | |
| | | | | aaaaagugGcaccgagucggugcuususu-3′ | | |
| mcPC | GA00 | CAGGTTC | 81 | 5′csasgsGUUCCAUGGGAUGCUCU | 2323 | SpCas |
| SK9 | 406 | CATGGG | | gUUUUAGagcuagaaauagcaaGUUsaA | | 9 |
| | | ATGCTCT | | aAuAaggCUaGUCcGUUsAucAAcuu | | |
| | | | | GaaaaaguGgcaccgAgUCggugcuususu- | | |
| | | | | 3′ | | |
| mcPC | GA00 | CAGGTTC | 81 | 5′csasgsGUUCCAUGGGAUGCUCU | 2324 | SpCas |
| SK9 | 407 | CATGGG | | gUUUUAGagcuagaaauagcaaGUUsaA | | 9 |
| | | ATGCTCT | | aAuAaggcuaGUccGUUsAucAAcuuG | | |
| | | | | aaaaaguGgcaccgAgUCggugcuususu-3′ | | |
| mcPC | GA00 | CAGGTTC | 81 | 5′csasgsGUUCCAUGGGAUGCUCU | 2325 | SpCas |
| SK9 | 408 | CATGGG | | gUUUUAGagcuagaaauagcaaGUUsaA | | 9 |
| | | ATGCTCT | | aAuAaggCUaGUCcGUUsAucAAcuu | | |
| | | | | gaaaaaguGgcaccgAgUCggugcuususu- | | |
| | | | | 3′ | | |
| mcPC | GA00 | CAGGTTC | 81 | 5′csasgsGUUCCAUGGGAUGCUCU | 1668 | SpCas |
| SK9 | 409 | CATGGG | | gUUUUAGagcuagaaauagcaaGUUsaA | | 9 |
| | | ATGCTCT | | aAuAaggCUaGUCcGUUsAucAAcuu | | |
| | | | | gaaaaaguGgcaccgAgUcggugcusususu- | | |
| | | | | 3′ | | |
| mcPC | GA00 | CAGGTTC | 81 | 5′csasgsGUUCCAUGGGAUGCUCU | 2324 | SpCas |
| SK9 | 410 | CATGGG | | gUUUUAGagcuagaaauagcaaGUUsaA | | 9 |
| | | ATGCTCT | | aAuAaggcuaGUccGUUsAucAAcuuG | | |
| | | | | aaaaaguGgcaccgAgUCggugcuususu-3′ | | |
| mcPC | GA00 | CAGGTTC | 81 | 5′csasgsGUUCCAUGGGAUGCUCU | 2326 | SpCas |
| SK9 | 411 | CATGGG | | gUUUUAGagcuaGaaauagcaaGUUsaA | | 9 |
| | | ATGCTCT | | aAuAaggCUaGUCcGUUsAucAAcuu | | |
| | | | | gaaaaaguGgcaccgAgUCggugcuususu- | | |
| | | | | 3′ | | |
| mcPC | GA00 | CAGGTTC | 81 | 5′csasgsGUUCCAUGGGAUGCUCU | 2327 | SpCas |
| SK9 | 412 | CATGGG | | gUUUUAGagcuaGaaauagcaaGUUsaA | | 9 |
| | | ATGCTCT | | aAuAaggCUaGUCcGUUsAucAAcuu | | |
| | | | | gaaaaaguGgcaccgAgUcggugcuususu- | | |
| | | | | 3′ | | |
| mcPC | GA00 | CAGGTTC | 81 | 5′csasgsGUUCCAUGGGAUGCUCU | 2328 | SpCas |
| SK9 | 413 | CATGGG | | gUUUUAGagcuaGaaauagcaaGUUsaA | | 9 |
| | | ATGCTCT | | aAuAaggcuaGUccGUUsAucAAcuuG | | |
| | | | | aaaaaguGgcaccgAgUCggugcuususu-3′ | | |
| mPCS | GA00 | CCCATAC | 69 | 5′cscscsAUACCUUGGAGCAACGGg | 1669 | ABE |
| K9 | 414 | CTTGGA | | UUUUsAGagcuaGaaauagcaaGUUsaA | | |
| | | GCAACG | | aAuAaggCUaGUCcGUUAucAAcuuG | | |
| | | G | | aaaaaguGgcaccgAgUCggugcuususu-3′ | | |
| mPCS | GA00 | CCCATAC | 69 | 5′cscscsAUACCUUGGAGCAACGGg | 2329 | ABE |
| K9 | 415 | CTTGGA | | UUUUsAGagcuagaaauagcaaGUUsaA | | |
| | | GCAACG | | aAuAaggcuaGUccGUUAucAAcuugaa | | |
| | | G | | aaagugGcaccgagucggugcuususu-3′ | | |
| mPCS | GA00 | CCCATAC | 69 | 5′cscscsAUACCUUGGAGCAACGGg | 2330 | ABE |
| K9 | 416 | CTTGGA | | UUUUsAGagcuaGaaauagcaaGUUsaA | | |
| | | GCAACG | | aAuAaggcuaGUccGUUAucAAcuuGa | | |
| | | G | | aaaagugGcaccgagucggugcuususu-3′ | | |
| mAN | GA00 | GAGATA | 241 | 5′gsasgsAUACCUGAGUAACUUUC | 1670 | ABE |
| GPTL | 417 | CCTGAGT | | gUUUUsAGagcuaGaaauagcaaGUUsa | | |
| 3 | | AACTTTC | | AaAuAaggCUaGUCcGUUAucAAcuu | | |
| | | | | GaaaaaguGgcaccgAgUCggugcuususu- | | |
| | | | | 3′ | | |
| mAN | GA00 | GAGATA | 241 | 5′gsasgsAUACCUGAGUAACUUUC | 2331 | ABE |
| GPTL | 418 | CCTGAGT | | gUUUUsAGagcuagaaauagcaaGUUsa | | |
| 3 | | AACTTTC | | AaAuAaggcuaGUccGUUAucAAcuug | | |
| | | | | aaaaagugGcaccgagucggugcuususu-3′ | | |
| mAN | GA00 | GAGATA | 241 | 5′gsasgsAUACCUGAGUAACUUUC | 2332 | ABE |
| GPTL | 419 | CCTGAGT | | gUUUUsAGagcuaGaaauagcaaGUUsa | | |
| 3 | | AACTTTC | | AaAuAaggcuaGUccGUUAucAAcuuG | | |
| | | | | aaaaagugGcaccgagucggugcuususu-3′ | | |
| mcPC | GA00 | CAGGTTC | 81 | 5′csasgsGUUCCAUGGGAUGCUCU | 1671 | SpCas |
| SK9 | 420 | CATGGG | | gUUUUsAGagcuaGaaauagcaaGUUsa | | 9 |
| | | ATGCTCT | | AaAuAaggcuaGUccGUUAucAAcuuG | | |
| | | | | aaaaagugGcaccgagucggugcuususu-3′ | | |
| mcPC | GA00 | CAGGTTC | 81 | 5′csasgsGUUCCAUGGGAUGCUCU | 2333 | SpCas |
| SK9 | 421 | CATGGG | | gUUUUsAGagcuagaaauagcaaGUUsa | | 9 |
| | | ATGCTCT | | AaAuAaggCUaGUCcGUUAucAAcuu | | |
| | | | | GaaaaaguGgcaccgAgUCggugcuususu- | | |
| | | | | 3′ | | |
| mcPC | GA00 | CAGGTTC | 81 | 5′csasgsGUUCCAUGGGAUGCUCU | 2334 | SpCas |
| SK9 | 422 | CATGGG | | gUUUUsAGagcuagaaauagcaaGUUsa | | 9 |
| | | ATGCTCT | | AaAuAaggcuaGUccGUUAucAAcuuG | | |
| | | | | aaaaaguGgcaccgAgUCggugcuususu-3′ | | |
| mcPC | GA00 | CAGGTTC | 81 | 5′csasgsGUUCCAUGGGAUGCUCU | 2335 | SpCas |
| SK9 | 423 | CATGGG | | gUUUUsAGagcuagaaauagcaaGUUsa | | 9 |
| | | ATGCTCT | | AaAuAaggCUaGUCcGUUAucAAcuu | | |
| | | | | gaaaaaguGgcaccgAgUCggugcuususu- | | |
| | | | | 3′ | | |
| mcPC | GA00 | CAGGTTC | 81 | 5′csasgsGUUCCAUGGGAUGCUCU | 2336 | SpCas |
| SK9 | 424 | CATGGG | | gUUUUsAGagcuagaaauagcaaGUUsa | | 9 |
| | | ATGCTCT | | AaAuAaggCUaGUCcGUUAucAAcuu | | |
| | | | | gaaaaaguGgcaccgAgUcggugcuususu- | | |
| | | | | 3′ | | |
| mcPC | GA00 | CAGGTTC | 81 | 5′csasgsGUUCCAUGGGAUGCUCU | 1672 | SpCas |
| SK9 | 425 | CATGGG | | gUUUUsAGagcuagaaauagcaaGUUsa | | 9 |
| | | ATGCTCT | | AaAuAaggcuaGUccGUUAucAAcuuG | | |
| | | | | aaaaaguGgcaccgAgUCggugcusususu- | | |
| | | | | 3′ | | |
| mcPC | GA00 | CAGGTTC | 81 | 5′csasgsGUUCCAUGGGAUGCUCU | 2337 | SpCas |
| SK9 | 426 | CATGGG | | gUUUUsAGagcuaGaaauagcaaGUUsa | | 9 |
| | | ATGCTCT | | AaAuAaggCUaGUCcGUUAucAAcuu | | |
| | | | | gaaaaaguGgcaccgAgUCggugcuususu- | | |
| | | | | 3′ | | |
| mcPC | GA00 | CAGGTTC | 81 | 5′csasgsGUUCCAUGGGAUGCUCU | 2338 | SpCas |
| SK9 | 427 | CATGGG | | gUUUUsAGagcuaGaaauagcaaGUUsa | | 9 |
| | | ATGCTCT | | AaAuAaggCUaGUCcGUUAucAAcuu | | |
| | | | | gaaaaaguGgcaccgAgUcggugcuususu- | | |
| | | | | 3′ | | |
| mcPC | GA00 | CAGGTTC | 81 | 5′csasgsGUUCCAUGGGAUGCUCU | 2339 | SpCas |
| SK9 | 428 | CATGGG | | gUUUUsAGagcuaGaaauagcaaGUUsa | | 9 |
| | | ATGCTCT | | AaAuAaggcuaGUccGUUAucAAcuuG | | |
| | | | | aaaaaguGgcaccgAgUCggugcuususu-3′ | | |
| mPCS | GA00 | CCCATAC | 69 | 5′cscscsAUACCUUGGAGCAACGGg | 1673 | ABE |
| K9 | 429 | CTTGGA | | UUUUsAGagcuaGaaauagcaaGUUaAa | | |
| | | GCAACG | | AuAaggCUaGUCcGUUsAucAAcuuG | | |
| | | G | | aaaaaguGgcaccgAgUCggugcuususu-3′ | | |
| mPCS | GA00 | CCCATAC | 69 | 5′cscscsAUACCUUGGAGCAACGGg | 2340 | ABE |
| K9 | 430 | CTTGGA | | UUUUsAGagcuagaaauagcaaGUUaAa | | |
| | | GCAACG | | AuAaggcuaGUccGUUsAucAAcuugaa | | |
| | | G | | aaagugGcaccgagucggugcuususu-3′ | | |
| mPCS | GA00 | CCCATAC | 69 | 5′cscscsAUACCUUGGAGCAACGGg | 2341 | ABE |
| K9 | 431 | CTTGGA | | UUUUsAGagcuaGaaauagcaaGUUaAa | | |
| | | GCAACG | | AuAaggcuaGUccGUUsAucAAcuuGa | | |
| | | G | | aaaagugGcaccgagucggugcuususu-3′ | | |
| mPCS | GA00 | GAGATA | 241 | 5′gsasgsAUACCUGAGUAACUUUC | 1674 | ABE |
| K9 | 432 | CCTGAGT | | gUUUUsAGagcuaGaaauagcaaGUUaA | | |
| | | AACTTTC | | aAuAaggCUaGUCcGUUsAucAAcuu | | |
| | | | | GaaaaaguGgcaccgAgUCggugcuususu- | | |
| | | | | 3′ | | |
| mAN | GA00 | GAGATA | 241 | 5′gsasgsAUACCUGAGUAACUUUC | 2342 | ABE |
| GPTL | 433 | CCTGAGT | | gUUUUsAGagcuagaaauagcaaGUUaA | | |
| 3 | | AACTTTC | | aAuAaggcuaGUccGUUsAucAAcuuga | | |
| | | | | aaaagugGcaccgagucggugcuususu-3′ | | |
| mAN | GA00 | GAGATA | 241 | 5′gsasgsAUACCUGAGUAACUUUC | 2343 | ABE |
| GPTL | 434 | CCTGAGT | | gUUUUsAGagcuaGaaauagcaaGUUaA | | |
| 3 | | AACTTTC | | aAuAaggcuaGUccGUUsAucAAcuuG | | |
| | | | | aaaaagugGcaccgagucggugcuususu-3′ | | |
| mAN | GA00 | CAGGTTC | 81 | 5′csasgsGUUCCAUGGGAUGCUCU | 1675 | SpCas |
| GPTL | 435 | CATGGG | | gUUUUsAGagcuaGaaauagcaaGUUaA | | 9 |
| 3 | | ATGCTCT | | aAuAaggcuaGUccGUUsAucAAcuuG | | |
| | | | | aaaaagugGcaccgagucggugcuususu-3′ | | |
| mcPC | GA00 | CAGGTTC | 81 | 5′csasgsGUUCCAUGGGAUGCUCU | 2344 | SpCas |
| SK9 | 436 | CATGGG | | gUUUUsAGagcuagaaauagcaaGUUaA | | 9 |
| | | ATGCTCT | | aAuAaggCUaGUCcGUUsAucAAcuu | | |
| | | | | GaaaaaguGgcaccgAgUCggugcuususu- | | |
| | | | | 3′ | | |
| mcPC | GA00 | CAGGTTC | 81 | 5′csasgsGUUCCAUGGGAUGCUCU | 2345 | SpCas |
| SK9 | 437 | CATGGG | | gUUUUsAGagcuagaaauagcaaGUUaA | | 9 |
| | | ATGCTCT | | aAuAaggcuaGUccGUUsAucAAcuuG | | |
| | | | | aaaaaguGgcaccgAgUCggugcuususu-3′ | | |
| mcPC | GA00 | CAGGTTC | 81 | 5′csasgsGUUCCAUGGGAUGCUCU | 2346 | SpCas |
| SK9 | 438 | CATGGG | | gUUUUsAGagcuagaaauagcaaGUUaA | | 9 |
| | | ATGCTCT | | aAuAaggCUaGUCcGUUsAucAAcuu | | |
| | | | | gaaaaaguGgcaccgAgUCggugcuususu- | | |
| | | | | 3′ | | |
| mcPC | GA00 | CAGGTTC | 81 | 5′csasgsGUUCCAUGGGAUGCUCU | 2347 | SpCas |
| SK9 | 443 | CATGGG | | gUUUUsAGagcuaGaaauagcaaGUUaA | | 9 |
| | | ATGCTCT | | aAuAaggcuaGUccGUUsAucAAcuuG | | |
| | | | | aaaaaguGgcaccgAgUCggugcuususu-3′ | | |
| mPCS | GA00 | CCCATAC | 69 | 5′cscscsAUACCUUGGAGCAACGGg | 1676 | ABE |
| K9 | 444 | CTTGGA | | UUUUsAGagcuaGaaauagcaaGUUsaA | | |
| | | GCAACG | | aAuAaggCUaGUCcGUUsAucAAcuu | | |
| | | G | | GaaaaaguGgcaccgAgUCggugcuususu- | | |
| | | | | 3′ | | |
| mPCS | GA00 | CCCATAC | 69 | 5′cscscsAUACCUUGGAGCAACGGg | 2348 | ABE |
| K9 | 445 | CTTGGA | | UUUUsAGagcuagaaauagcaaGUUsaA | | |
| | | GCAACG | | aAuAaggcuaGUccGUUsAucAAcuuga | | |
| | | G | | aaaagugGcaccgagucggugcuususu-3′ | | |
| mPCS | GA00 | CCCATAC | 69 | 5′cscscsAUACCUUGGAGCAACGGg | 2349 | ABE |
| K9 | 446 | CTTGGA | | UUUUsAGagcuaGaaauagcaaGUUsaA | | |
| | | GCAACG | | aAuAaggcuaGUccGUUsAucAAcuuG | | |
| | | G | | aaaaagugGcaccgagucggugcuususu-3′ | | |
| mAN | GA00 | GAGATA | 241 | 5′gsasgsAUACCUGAGUAACUUUC | 1677 | ABE |
| GPTL | 447 | CCTGAGT | | gUUUUsAGagcuaGaaauagcaaGUUsa | | |
| 3 | | AACTTTC | | AaAuAaggCUaGUCcGUUsAucAAcu | | |
| | | | | uGaaaaaguGgcaccgAgUCggugcuususu- | | |
| | | | | 3′ | | |
| mAN | GA00 | GAGATA | 241 | 5′gsasgsAUACCUGAGUAACUUUC | 2350 | ABE |
| GPTL | 448 | CCTGAGT | | gUUUUsAGagcuagaaauagcaaGUUsa | | |
| 3 | | AACTTTC | | AaAuAaggcuaGUccGUUsAucAAcuu | | |
| | | | | gaaaaagugGcaccgagucggugcuususu-3′ | | |
| mAN | GA00 | GAGATA | 241 | 5′gsasgsAUACCUGAGUAACUUUC | 2351 | ABE |
| GPTL | 449 | CCTGAGT | | gUUUUsAGagcuaGaaauagcaaGUUsa | | |
| 3 | | AACTTTC | | AaAuAaggcuaGUccGUUsAucAAcuu | | |
| | | | | GaaaaagugGcaccgagucggugcuususu-3′ | | |
| mcPC | GA00 | CAGGTTC | 81 | 5′csasgsGUUCCAUGGGAUGCUCU | 1678 | SpCas |
| SK9 | 450 | CATGGG | | gUUUUsAGagcuaGaaauagcaaGUUsa | | 9 |
| | | ATGCTCT | | AaAuAaggcuaGUccGUUsAucAAcuu | | |
| | | | | GaaaaagugGcaccgagucggugcuususu-3′ | | |
| mcPC | GA00 | CAGGTTC | 81 | 5′csasgsGUUCCAUGGGAUGCUCU | 2352 | SpCas |
| SK9 | 451 | CATGGG | | gUUUUsAGagcuagaaauagcaaGUUsa | | 9 |
| | | ATGCTCT | | AaAuAaggCUaGUCcGUUsAucAAcu | | |
| | | | | uGaaaaaguGgcaccgAgUCggugcuususu- | | |
| | | | | 3′ | | |
| mcPC | GA00 | CAGGTTC | 81 | 5′csasgsGUUCCAUGGGAUGCUCU | 2353 | SpCas |
| SK9 | 452 | CATGGG | | gUUUUsAGagcuagaaauagcaaGUUsa | | 9 |
| | | ATGCTCT | | AaAuAaggcuaGUccGUUsAucAAcuu | | |
| | | | | GaaaaaguGgcaccgAgUCggugcuususu- | | |
| | | | | 3′ | | |
| mcPC | GA00 | CAGGTTC | 81 | 5′csasgsGUUCCAUGGGAUGCUCU | 2354 | SpCas |
| SK9 | 453 | CATGGG | | gUUUUsAGagcuagaaauagcaaGUUsa | | 9 |
| | | ATGCTCT | | AaAuAaggCUaGUCcGUUsAucAAcu | | |
| | | | | ugaaaaaguGgcaccgAgUCggugcuususu- | | |
| | | | | 3′ | | |
| mcPC | GA00 | CAGGTTC | 81 | 5′csasgsGUUCCAUGGGAUGCUCU | 2355 | SpCas |
| SK9 | 454 | CATGGG | | gUUUUsAGagcuagaaauagcaaGUUsa | | 9 |
| | | ATGCTCT | | AaAuAaggCUaGUCcGUUsAucAAcu | | |
| | | | | ugaaaaaguGgcaccgAgUcggugcuususu- | | |
| | | | | 3′ | | |
| mcPC | GA00 | CAGGTTC | 81 | 5′csasgsGUUCCAUGGGAUGCUCU | 2353 | SpCas |
| SK9 | 455 | CATGGG | | gUUUUsAGagcuagaaauagcaaGUUsa | | 9 |
| | | ATGCTCT | | AaAuAaggcuaGUccGUUsAucAAcuu | | |
| | | | | GaaaaaguGgcaccgAgUCggugcuususu- | | |
| | | | | 3′ | | |
| mcPC | GA00 | CAGGTTC | 81 | 5′csasgsGUUCCAUGGGAUGCUCU | 2356 | SpCas |
| SK9 | 456 | CATGGG | | gUUUUsAGagcuaGaaauagcaaGUUsa | | 9 |
| | | ATGCTCT | | AaAuAaggCUaGUCcGUUsAucAAcu | | |
| | | | | ugaaaaaguGgcaccgAgUCggugcuususu- | | |
| | | | | 3′ | | |
| mcPC | GA00 | CAGGTTC | 81 | 5′csasgsGUUCCAUGGGAUGCUCU | 2357 | SpCas |
| SK9 | 457 | CATGGG | | gUUUUsAGagcuaGaaauagcaaGUUsa | | 9 |
| | | ATGCTCT | | AaAuAaggCUaGUCcGUUsAucAAcu | | |
| | | | | ugaaaaaguGgcaccgAgUcggugcuususu- | | |
| | | | | 3′ | | |
| mcPC | GA00 | CAGGTTC | 81 | 5′csasgsGUUCCAUGGGAUGCUCU | 2358 | SpCas |
| SK9 | 458 | CATGGG | | gUUUUsAGagcuaGaaauagcaaGUUsa | | 9 |
| | | ATGCTCT | | AaAuAaggcuaGUccGUUsAucAAcuu | | |
| | | | | GaaaaaguGgcaccgAgUCggugcuususu- | | |
| | | | | 3′ | | |
| mcPC | GA00 | CAGGTTC | 81 | 5′csasgGUUCCAUGGGAUGCUCUg | 1679 | SpCas |
| SK9 | 459 | CATGGG | | UUUUAGagcuaGaaauagcaaGUUaAa | | 9 |
| | | ATGCTCT | | AuAaggCUaGUCcGUUAucAAcuuGa | | |
| | | | | aaaaguGgcaccgAgUCggugcuususu-3 | | |
| mcPC | GA00 | CAGGTTC | 81 | 5′csasgGUUCCAUGGGAUGCUCUg | 1680 | SpCas |
| SK9 | 460 | CATGGG | | UUUUAGagcuagaaauagcaaGUUaAaA | | 9 |
| | | ATGCTCT | | uAaggcuaGUccGUUAucAAcuugaaaa | | |
| | | | | agugGcaccgagucggugcuususu-3′ | | |
| mPCS | GA00 | CCCATAC | 69 | 5′cscscAUACCUUGGAGCAACGGg | 1681 | ABE |
| K9 | 461 | CTTGGA | | UUUUAGagcuaGaaauagcaaGUUaAa | | |
| | | GCAACG | | AuAaggCUaGUCcGUUAucAAcuuGa | | |
| | | G | | aaaaguGgcaccgAgUCggugcuususu-3′ | | |
| mPCS | GA00 | CCCATAC | 69 | 5′cscscAUACCUUGGAGCAACGGg | 1682 | ABE |
| K9 | 478 | CTTGGA | | UUUUAGagcuaGaaauagcaaGUUaAa | | |
| | | GCAACG | | AuAaggcuaGUccGUUsAucAAcuuGa | | |
| | | G | | aaaagugGcaccgagucggugcuususu-3′ | | |
| mAN | GA00 | GAGATA | 241 | 5′gsasgAUACCUGAGUAACUUUCg | 1683 | ABE |
| GPTL | 479 | CCTGAGT | | UUUUAGagcuaGaaauagcaaGUUaAa | | |
| 3 | | AACTTTC | | AuAaggCUaGUCcGUUsAucAAcuuG | | |
| | | | | aaaaaguGgcaccgAgUCggugcuususu-3′ | | |
| mAN | GA00 | GAGATA | 241 | 5′gsasgAUACCUGAGUAACUUUCg | 2359 | ABE |
| GPTL | 480 | CCTGAGT | | UUUUAGagcuagaaauagcaaGUUaAaA | | |
| 3 | | AACTTTC | | uAaggcuaGUccGUUsAucAAcuugaaaa | | |
| | | | | agugGcaccgagucggugcuususu-3′ | | |
| mAN | GA00 | GAGATA | 241 | 5′gsasgAUACCUGAGUAACUUUCg | 2360 | ABE |
| GPTL | 481 | CCTGAGT | | UUUUAGagcuaGaaauagcaaGUUaAa | | |
| 3 | | AACTTTC | | AuAaggcuaGUccGUUsAucAAcuuGa | | |
| | | | | aaaagugGcaccgagucggugcuususu-3′ | | |
| mcPC | GA00 | CAGGTTC | 81 | 5′csasgGUUCCAUGGGAUGCUCUg | 1684 | SpCas |
| SK9 | 482 | CATGGG | | UUUUAGagcuaGaaauagcaaGUUaAa | | 9 |
| | | ATGCTCT | | AuAaggcuaGUccGUUsAucAAcuuGa | | |
| | | | | aaaagugGcaccgagucggugcuususu-3′ | | |
| mcPC | GA00 | CAGGTTC | 81 | 5′csasgGUUCCAUGGGAUGCUCUg | 2361 | SpCas |
| SK9 | 483 | CATGGG | | UUUUAGagcuagaaauagcaaGUUaAaA | | 9 |
| | | ATGCTCT | | uAaggCUaGUCcGUUsAucAAcuuGaa | | |
| | | | | aaaguGgcaccgAgUCggugcuususu-3′ | | |
| mcPC | GA00 | CAGGTTC | 81 | 5′csasgGUUCCAUGGGAUGCUCUg | 2362 | SpCas |
| SK9 | 484 | CATGGG | | UUUUAGagcuagaaauagcaaGUUaAaA | | 9 |
| | | ATGCTCT | | uAaggcuaGUccGUUsAucAAcuuGaaa | | |
| | | | | aaguGgcaccgAgUCggugcuususu-3′ | | |
| mcPC | GA00 | CAGGTTC | 81 | 5′csasgGUUCCAUGGGAUGCUCUg | 2363 | SpCas |
| SK9 | 485 | CATGGG | | UUUUAGagcuagaaauagcaaGUUaAaA | | 9 |
| | | ATGCTCT | | uAaggCUaGUCcGUUsAucAAcuugaa | | |
| | | | | aaaguGgcaccgAgUCggugcuususu-3′ | | |
| mcPC | GA00 | CAGGTTC | 81 | 5′csasgGUUCCAUGGGAUGCUCUg | 2364 | SpCas |
| SK9 | 486 | CATGGG | | UUUUAGagcuagaaauagcaaGUUaAaA | | 9 |
| | | ATGCTCT | | uAaggCUaGUCcGUUsAucAAcuugaa | | |
| | | | | aaaguGgcaccgAgUcggugcuususu-3′ | | |
| mcPC | GA00 | CAGGTTC | 81 | 5′csasgGUUCCAUGGGAUGCUCUg | 2362 | SpCas |
| SK9 | 487 | CATGGG | | UUUUAGagcuagaaauagcaaGUUaAaA | | 9 |
| | | ATGCTCT | | uAaggcuaGUccGUUsAucAAcuuGaaa | | |
| | | | | aaguGgcaccgAgUCggugcuususu-3′ | | |
| mcPC | GA00 | CAGGTTC | 81 | 5′csasgGUUCCAUGGGAUGCUCUg | 2365 | SpCas |
| SK9 | 488 | CATGGG | | UUUUAGagcuaGaaauagcaaGUUaAa | | 9 |
| | | ATGCTCT | | AuAaggCUaGUCcGUUsAucAAcuug | | |
| | | | | aaaaaguGgcaccgAgUCggugcuususu-3′ | | |
| mcPC | GA00 | CAGGTTC | 81 | 5′csasgGUUCCAUGGGAUGCUCUg | 2366 | SpCas |
| SK9 | 489 | CATGGG | | UUUUAGagcuaGaaauagcaaGUUaAa | | 9 |
| | | ATGCTCT | | AuAaggCUaGUCcGUUsAucAAcuug | | |
| | | | | aaaaaguGgcaccgAgUcggugcuususu-3′ | | |
| mcPC | GA00 | CAGGTTC | 81 | 5′csasgGUUCCAUGGGAUGCUCUg | 2367 | SpCas |
| SK9 | 490 | CATGGG | | UUUUAGagcuaGaaauagcaaGUUaAa | | 9 |
| | | ATGCTCT | | AuAaggcuaGUccGUUsAucAAcuuGa | | |
| | | | | aaaaguGgcaccgAgUCggugcuususu-3′ | | |
| mcPC | GA00 | CCCATAC | 69 | 5′cscscAUACCUUGGAGCAACGGg | 1685 | ABE |
| SK9 | 491 | CTTGGA | | UUUUAGagcuaGaaauagcaaGUUsaAa | | |
| | | GCAACG | | AuAaggCUaGUCcGUUAucAAcuuGa | | |
| | | G | | aaaaguGgcaccgAgUCggugcuususu-3′ | | |
| mcPC | GA00 | CCCATAC | 69 | 5′cscscAUACCUUGGAGCAACGGg | 2368 | ABE |
| SK9 | 492 | CTTGGA | | UUUUAGagcuagaaauagcaaGUUsaAa | | |
| | | GCAACG | | AuAaggcuaGUccGUUAucAAcuugaaa | | |
| | | G | | aagugGcaccgagucggugcuususu-3′ | | |
| mcPC | GA00 | CCCATAC | 69 | 5′cscscAUACCUUGGAGCAACGGg | 2369 | ABE |
| SK9 | 493 | CTTGGA | | UUUUAGagcuaGaaauagcaaGUUsaAa | | |
| | | GCAACG | | AuAaggcuaGUccGUUAucAAcuuGaa | | |
| | | G | | aaagugGcaccgagucggugcuususu-3′ | | |
| mcPC | GA00 | GAGATA | 241 | 5′gsasgAUACCUGAGUAACUUUCg | 1686 | ABE |
| SK9 | 494 | CCTGAGT | | UUUUAGagcuaGaaauagcaaGUUsaAa | | |
| | | AACTTTC | | AuAaggCUaGUCcGUUAucAAcuuGa | | |
| | | | | aaaaguGgcaccgAgUCggugcuususu-3′ | | |
| mcPC | GA00 | GAGATA | 241 | 5′gsasgAUACCUGAGUAACUUUCg | 2370 | ABE |
| SK9 | 495 | CCTGAGT | | UUUUAGagcuagaaauagcaaGUUsaAa | | |
| | | AACTTTC | | AuAaggcuaGUccGUUAucAAcuugaaa | | |
| | | | | aagugGcaccgagucggugcuususu-3′ | | |
| mcPC | GA00 | GAGATA | 241 | 5′gsasgAUACCUGAGUAACUUUCg | 2371 | ABE |
| SK9 | 496 | CCTGAGT | | UUUUAGagcuaGaaauagcaaGUUsaAa | | |
| | | AACTTTC | | AuAaggcuaGUccGUUAucAAcuuGaa | | |
| | | | | aaagugGcaccgagucggugcuususu-3′ | | |
| mcPC | GA00 | CAGGTTC | 81 | 5′csasgGUUCCAUGGGAUGCUCUg | 1687 | SpCas |
| SK9 | 497 | CATGGG | | UUUUAGagcuaGaaauagcaaGUUsaAa | | 9 |
| | | ATGCTCT | | AuAaggcuaGUccGUUAucAAcuuGaa | | |
| | | | | aaagugGcaccgagucggugcuususu-3′ | | |
| mcPC | GA00 | CAGGTTC | 81 | 5′csasgGUUCCAUGGGAUGCUCUg | 2372 | SpCas |
| SK9 | 498 | CATGGG | | UUUUAGagcuagaaauagcaaGUUsaAa | | 9 |
| | | ATGCTCT | | AuAaggCUaGUCcGUUAucAAcuuGa | | |
| | | | | aaaaguGgcaccgAgUCggugcuususu-3′ | | |
| mcPC | GA00 | CAGGTTC | 81 | 5′csasgGUUCCAUGGGAUGCUCUg | 2373 | SpCas |
| SK9 | 499 | CATGGG | | UUUUAGagcuagaaauagcaaGUUsaAa | | 9 |
| | | ATGCTCT | | AuAaggcuaGUccGUUAucAAcuuGaa | | |
| | | | | aaaguGgcaccgAgUCggugcuususu-3′ | | |
| mcPC | GA00 | CAGGTTC | 81 | 5′csasgGUUCCAUGGGAUGCUCUg | 1688 | SpCas |
| SK9 | 500 | CATGGG | | UUUUAGagcuagaaauagcaaGUUsaAa | | 9 |
| | | ATGCTCT | | AuAaggCUaGUCcGUUAucAAcuuga | | |
| | | | | aaaaguGgcaccgAgUCggugcusususu-3′ | | |
| mcPC | GA00 | CAGGTTC | 81 | 5′csasgGUUCCAUGGGAUGCUCUg | 2374 | SpCas |
| SK9 | 501 | CATGGG | | UUUUAGagcuagaaauagcaaGUUsaAa | | 9 |
| | | ATGCTCT | | AuAaggCUaGUCcGUUAucAAcuuga | | |
| | | | | aaaaguGgcaccgAgUcggugcuususu-3′ | | |
| mcPC | GA00 | CAGGTTC | 81 | 5′csasgGUUCCAUGGGAUGCUCUg | 2373 | SpCas |
| SK9 | 502 | CATGGG | | UUUUAGagcuagaaauagcaaGUUsaAa | | 9 |
| | | ATGCTCT | | AuAaggcuaGUccGUUAucAAcuuGaa | | |
| | | | | aaaguGgcaccgAgUCggugcuususu-3′ | | |
| mcPC | GA00 | CAGGTTC | 81 | 5′csasgGUUCCAUGGGAUGCUCUg | 2375 | SpCas |
| SK9 | 503 | CATGGG | | UUUUAGagcuaGaaauagcaaGUUsaAa | | 9 |
| | | ATGCTCT | | AuAaggCUaGUCcGUUAucAAcuuga | | |
| | | | | aaaaguGgcaccgAgUCggugcuususu-3′ | | |
| mcPC | GA00 | CAGGTTC | 81 | 5′csasgGUUCCAUGGGAUGCUCUg | 2376 | SpCas |
| SK9 | 504 | CATGGG | | UUUUAGagcuaGaaauagcaaGUUsaAa | | 9 |
| | | ATGCTCT | | AuAaggCUaGUCcGUUAucAAcuuga | | |
| | | | | aaaaguGgcaccgAgUcggugcuususu-3′ | | |
| mcPC | GA00 | CAGGTTC | 81 | 5′csasgGUUCCAUGGGAUGCUCUg | 2377 | SpCas |
| SK9 | 505 | CATGGG | | UUUUAGagcuaGaaauagcaaGUUsaAa | | 9 |
| | | ATGCTCT | | AuAaggcuaGUccGUUAucAAcuuGaa | | |
| | | | | aaaguGgcaccgAgUCggugcuususu-3′ | | |
| mPCS | GA00 | CCCATAC | 69 | 5′cscscAUACCUUGGAGCAACGGg | 1689 | ABE |
| K9 | 506 | CTTGGA | | UUUUsAGagcuaGaaauagcaaGUUaAa | | |
| | | GCAACG | | AuAaggCUaGUCcGUUAucAAcuuGa | | |
| | | G | | aaaaguGgcaccgAgUCggugcuususu-3′ | | |
| mPCS | GA00 | CCCATAC | 69 | 5′cscscAUACCUUGGAGCAACGGg | 2378 | ABE |
| K9 | 507 | CTTGGA | | UUUUsAGagcuagaaauagcaaGUUaAa | | |
| | | GCAACG | | AuAaggcuaGUccGUUAucAAcuugaaa | | |
| | | G | | aagugGcaccgagucggugcuususu-3′ | | |
| mPCS | GA00 | CCCATAC | 69 | 5′cscscAUACCUUGGAGCAACGGg | 2379 | ABE |
| K9 | 508 | CTTGGA | | UUUUsAGagcuaGaaauagcaaGUUaAa | | |
| | | GCAACG | | AuAaggcuaGUccGUUAucAAcuuGaa | | |
| | | G | | aaagugGcaccgagucggugcuususu-3′ | | |
| mAN | GA00 | GAGATA | 241 | 5′gsasgAUACCUGAGUAACUUUCg | 1690 | ABE |
| GPTL | 509 | CCTGAGT | | UUUUsAGagcuaGaaauagcaaGUUaAa | | |
| 3 | | AACTTTC | | AuAaggCUaGUCcGUUAucAAcuuGa | | |
| | | | | aaaaguGgcaccgAgUCggugcuususu-3′ | | |
| mAN | GA00 | GAGATA | 241 | 5′gsasgAUACCUGAGUAACUUUCg | 2380 | ABE |
| GPTL | 510 | CCTGAGT | | UUUUsAGagcuagaaauagcaaGUUaAa | | |
| 3 | | AACTTTC | | AuAaggcuaGUccGUUAucAAcuugaaa | | |
| | | | | aagugGcaccgagucggugcuususu-3′ | | |
| mAN | GA00 | GAGATA | 241 | 5′gsasgAUACCUGAGUAACUUUCg | 2381 | ABE |
| GPTL | 511 | CCTGAGT | | UUUUsAGagcuaGaaauagcaaGUUaAa | | |
| 3 | | AACTTTC | | AuAaggcuaGUccGUUAucAAcuuGaa | | |
| | | | | aaagugGcaccgagucggugcuususu-3′ | | |
| mcPC | GA00 | CAGGTTC | 81 | 5′csasgGUUCCAUGGGAUGCUCUg | 1691 | SpCas |
| SK9 | 512 | CATGGG | | UUUUsAGagcuaGaaauagcaaGUUaAa | | 9 |
| | | ATGCTCT | | AuAaggcuaGUccGUUAucAAcuuGaa | | |
| | | | | aaagugGcaccgagucggugcuususu-3′ | | |
| mcPC | GA00 | CAGGTTC | 81 | 5′csasgGUUCCAUGGGAUGCUCUg | 2382 | SpCas |
| SK9 | 513 | CATGGG | | UUUUsAGagcuagaaauagcaaGUUaAa | | 9 |
| | | ATGCTCT | | AuAaggCUaGUCcGUUAucAAcuuGa | | |
| | | | | aaaaguGgcaccgAgUCggugcuususu-3′ | | |
| mcPC | GA00 | CAGGTTC | 81 | 5′csasgGUUCCAUGGGAUGCUCUg | 2383 | SpCas |
| SK9 | 514 | CATGGG | | UUUUsAGagcuagaaauagcaaGUUaAa | | 9 |
| | | ATGCTCT | | AuAaggcuaGUccGUUAucAAcuuGaa | | |
| | | | | aaaguGgcaccgAgUCggugcuususu-3′ | | |
| mcPC | GA00 | CAGGTTC | 81 | 5′csasgGUUCCAUGGGAUGCUCUg | 2384 | SpCas |
| SK9 | 515 | CATGGG | | UUUUsAGagcuagaaauagcaaGUUaAa | | 9 |
| | | ATGCTCT | | AuAaggCUaGUCcGUUAucAAcuuga | | |
| | | | | aaaaguGgcaccgAgUCggugcuususu-3′ | | |
| mcPC | GA00 | CAGGTTC | 81 | 5′csasgGUUCCAUGGGAUGCUCUg | 2385 | SpCas |
| SK9 | 516 | CATGGG | | UUUUsAGagcuagaaauagcaaGUUaAa | | 9 |
| | | ATGCTCT | | AuAaggCUaGUCcGUUAucAAcuuga | | |
| | | | | aaaaguGgcaccgAgUcggugcuususu-3′ | | |
| mcPC | GA00 | CAGGTTC | 81 | 5′csasgGUUCCAUGGGAUGCUCUg | 1692 | SpCas |
| SK9 | 550 | CATGGG | | UUUUsAGagcuaGaaauagcaaGUUsaA | | 9 |
| | | ATGCTCT | | aAuAaggcuaGUccGUUAucAAcuuGa | | |
| | | | | aaaaguGgcaccgAgUCggugcuususu-3′ | | |
| mPCS | GA00 | CCCATAC | 69 | 5′cscscAUACCUUGGAGCAACGGg | 1693 | ABE |
| K9 | 551 | CTTGGA | | UUUUsAGagcuaGaaauagcaaGUUaAa | | |
| | | GCAACG | | AuAaggCUaGUCcGUUsAucAAcuuG | | |
| | | G | | aaaaaguGgcaccgAgUCggugcuususu-3′ | | |
| mPCS | GA00 | CCCATAC | 69 | 5′cscscAUACCUUGGAGCAACGGg | 2386 | ABE |
| K9 | 552 | CTTGGA | | UUUUsAGagcuagaaauagcaaGUUaAa | | |
| | | GCAACG | | AuAaggcuaGUccGUUsAucAAcuugaa | | |
| | | G | | aaagugGcaccgagucggugcuususu-3′ | | |
| mPCS | GA00 | CCCATAC | 69 | 5′cscscAUACCUUGGAGCAACGGg | 2387 | ABE |
| K9 | 553 | CTTGGA | | UUUUsAGagcuaGaaauagcaaGUUaAa | | |
| | | GCAACG | | AuAaggcuaGUccGUUsAucAAcuuGa | | |
| | | G | | aaaagugGcaccgagucggugcuususu-3′ | | |
| mAN | GA00 | GAGATA | 241 | 5′gsasgAUACCUGAGUAACUUUCg | 1694 | ABE |
| GPTL | 554 | CCTGAGT | | UUUUsAGagcuaGaaauagcaaGUUaAa | | |
| 3 | | AACTTTC | | AuAaggCUaGUCcGUUsAucAAcuuG | | |
| | | | | aaaaaguGgcaccgAgUCggugcuususu-3′ | | |
| mAN | GA00 | GAGATA | 241 | 5′gsasgAUACCUGAGUAACUUUCg | 2388 | ABE |
| GPTL | 555 | CCTGAGT | | UUUUsAGagcuagaaauagcaaGUUaAa | | |
| 3 | | AACTTTC | | AuAaggcuaGUccGUUsAucAAcuugaa | | |
| | | | | aaagugGcaccgagucggugcuususu-3′ | | |
| mAN | GA00 | GAGATA | 241 | 5′gsasgAUACCUGAGUAACUUUCg | 2389 | ABE |
| GPTL | 556 | CCTGAGT | | UUUUsAGagcuaGaaauagcaaGUUaAa | | |
| 3 | | AACTTTC | | AuAaggcuaGUccGUUsAucAAcuuGa | | |
| | | | | aaaagugGcaccgagucggugcuususu-3′ | | |
| mcPC | GA00 | CAGGTTC | 81 | 5′csasgGUUCCAUGGGAUGCUCUg | 1695 | SpCas |
| SK9 | 557 | CATGGG | | UUUUsAGagcuaGaaauagcaaGUUaAa | | 9 |
| | | ATGCTCT | | AuAaggcuaGUccGUUsAucAAcuuGa | | |
| | | | | aaaagugGcaccgagucggugcuususu-3′ | | |
| mcPC | GA00 | CAGGTTC | 81 | 5′csasgGUUCCAUGGGAUGCUCUg | 2390 | SpCas |
| SK9 | 558 | CATGGG | | UUUUsAGagcuagaaauagcaaGUUaAa | | 9 |
| | | ATGCTCT | | AuAaggCUaGUCcGUUsAucAAcuuG | | |
| | | | | aaaaaguGgcaccgAgUCggugcuususu-3′ | | |
| mcPC | GA00 | CAGGTTC | 81 | 5′csasgGUUCCAUGGGAUGCUCUg | 2391 | SpCas |
| SK9 | 559 | CATGGG | | UUUUsAGagcuagaaauagcaaGUUaAa | | 9 |
| | | ATGCTCT | | AuAaggcuaGUccGUUsAucAAcuuGa | | |
| | | | | aaaaguGgcaccgAgUCggugcuususu-3′ | | |
| mcPC | GA00 | CAGGTTC | 81 | 5′csasgGUUCCAUGGGAUGCUCUg | 2392 | SpCas |
| SK9 | 560 | CATGGG | | UUUUsAGagcuagaaauagcaaGUUaAa | | 9 |
| | | ATGCTCT | | AuAaggCUaGUCcGUUsAucAAcuug | | |
| | | | | aaaaaguGgcaccgAgUCggugcuususu-3′ | | |
| mcPC | GA00 | CAGGTTC | 81 | 5′csasgGUUCCAUGGGAUGCUCUg | 2393 | SpCas |
| SK9 | 561 | CATGGG | | UUUUsAGagcuagaaauagcaaGUUaAa | | 9 |
| | | ATGCTCT | | AuAaggCUaGUCcGUUsAucAAcuug | | |
| | | | | aaaaaguGgcaccgAgUcggugcuususu-3′ | | |
| mcPC | GA00 | CAGGTTC | 81 | 5′csasgGUUCCAUGGGAUGCUCUg | 2391 | SpCas |
| SK9 | 562 | CATGGG | | UUUUsAGagcuagaaauagcaaGUUaAa | | 9 |
| | | ATGCTCT | | AuAaggcuaGUccGUUsAucAAcuuGa | | |
| | | | | aaaaguGgcaccgAgUCggugcuususu-3′ | | |
| mcPC | GA00 | CAGGTTC | 81 | 5′csasgGUUCCAUGGGAUGCUCUg | 2394 | SpCas |
| SK9 | 563 | CATGGG | | UUUUsAGagcuaGaaauagcaaGUUaAa | | 9 |
| | | ATGCTCT | | AuAaggCUaGUCcGUUsAucAAcuug | | |
| | | | | aaaaaguGgcaccgAgUCggugcuususu-3′ | | |
| mcPC | GA00 | CAGGTTC | 81 | 5′csasgGUUCCAUGGGAUGCUCUg | 2395 | SpCas |
| SK9 | 564 | CATGGG | | UUUUsAGagcuaGaaauagcaaGUUaAa | | 9 |
| | | ATGCTCT | | AuAaggCUaGUCcGUUsAucAAcuug | | |
| | | | | aaaaaguGgcaccgAgUcggugcuususu-3′ | | |
| mcPC | GA00 | CAGGTTC | 81 | 5′csasgGUUCCAUGGGAUGCUCUg | 2396 | SpCas |
| SK9 | 565 | CATGGG | | UUUUsAGagcuaGaaauagcaaGUUaAa | | 9 |
| | | ATGCTCT | | AuAaggcuaGUccGUUsAucAAcuuGa | | |
| | | | | aaaaguGgcaccgAgUCggugcuususu-3′ | | |
| mPCS | GA00 | CCCATAC | 69 | 5′cscscAUACCUUGGAGCAACGGg | 1696 | ABE |
| K9 | 566 | CTTGGA | | UUUUsAGagcuaGaaauagcaaGUUsaA | | |
| | | GCAACG | | aAuAaggCUaGUCcGUUsAucAAcuu | | |
| | | G | | GaaaaaguGgcaccgAgUCggugcuususu- | | |
| | | | | 3′ | | |
| mPCS | GA00 | CCCATAC | 69 | 5′cscscAUACCUUGGAGCAACGGg | 2397 | ABE |
| K9 | 567 | CTTGGA | | UUUUsAGagcuagaaauagcaaGUUsaA | | |
| | | GCAACG | | aAuAaggcuaGUccGUUsAucAAcuuga | | |
| | | G | | aaaagugGcaccgagucggugcuususu-3′ | | |
| mPCS | GA00 | CCCATAC | 69 | 5′cscscAUACCUUGGAGCAACGGg | 2398 | ABE |
| K9 | 568 | CTTGGA | | UUUUsAGagcuaGaaauagcaaGUUsaA | | |
| | | GCAACG | | aAuAaggcuaGUccGUUsAucAAcuuG | | |
| | | G | | aaaaagugGcaccgagucggugcuususu-3′ | | |
| mAN | GA00 | GAGATA | 241 | 5′gsasgAUACCUGAGUAACUUUCg | 1697 | ABE |
| GPTL | 569 | CCTGAGT | | UUUUsAGagcuaGaaauagcaaGUUsaA | | |
| 3 | | AACTTTC | | aAuAaggCUaGUCcGUUsAucAAcuu | | |
| | | | | GaaaaaguGgcaccgAgUCggugcuususu- | | |
| | | | | 3′ | | |
| mAN | GA00 | GAGATA | 241 | 5′gsasgAUACCUGAGUAACUUUCg | 2399 | ABE |
| GPTL | 570 | CCTGAGT | | UUUUsAGagcuagaaauagcaaGUUsaA | | |
| 3 | | AACTTTC | | aAuAaggcuaGUccGUUsAucAAcuuga | | |
| | | | | aaaagugGcaccgagucggugcuususu-3′ | | |
| mAN | GA00 | GAGATA | 241 | 5′gsasgAUACCUGAGUAACUUUCg | 2400 | ABE |
| GPTL | 571 | CCTGAGT | | UUUUsAGagcuaGaaauagcaaGUUsaA | | |
| 3 | | AACTTTC | | aAuAaggcuaGUccGUUsAucAAcuuG | | |
| | | | | aaaaagugGcaccgagucggugcuususu-3′ | | |
| mcPC | GA00 | CAGGTTC | 81 | 5′csasgGUUCCAUGGGAUGCUCUg | 1698 | SpCas |
| SK9 | 572 | CATGGG | | UUUUsAGagcuaGaaauagcaaGUUsaA | | 9 |
| | | ATGCTCT | | aAuAaggcuaGUccGUUsAucAAcuuG | | |
| | | | | aaaaagugGcaccgagucggugcuususu-3′ | | |
| mcPC | GA00 | CAGGTTC | 81 | 5′csasgGUUCCAUGGGAUGCUCUg | 2401 | SpCas |
| SK9 | 573 | CATGGG | | UUUUsAGagcuagaaauagcaaGUUsaA | | 9 |
| | | ATGCTCT | | aAuAaggCUaGUCcGUUsAucAAcuu | | |
| | | | | GaaaaaguGgcaccgAgUCggugcuususu- | | |
| | | | | 3′ | | |
| mcPC | GA00 | CAGGTTC | 81 | 5′csasgGUUCCAUGGGAUGCUCUg | 2402 | SpCas |
| SK9 | 574 | CATGGG | | UUUUsAGagcuagaaauagcaaGUUsaA | | 9 |
| | | ATGCTCT | | aAuAaggcuaGUccGUUsAucAAcuuG | | |
| | | | | aaaaaguGgcaccgAgUCggugcuususu-3′ | | |
| mcPC | GA00 | CAGGTTC | 81 | 5′csasgGUUCCAUGGGAUGCUCUg | 2403 | SpCas |
| SK9 | 575 | CATGGG | | UUUUsAGagcuagaaauagcaaGUUsaA | | 9 |
| | | ATGCTCT | | aAuAaggCUaGUCcGUUsAucAAcuu | | |
| | | | | gaaaaaguGgcaccgAgUCggugcuususu- | | |
| | | | | 3 | | |
| mcPC | GA00 | CAGGTTC | 81 | 5′csasgGUUCCAUGGGAUGCUCUg | 2404 | SpCas |
| SK9 | 576 | CATGGG | | UUUUsAGagcuagaaauagcaaGUUsaA | | 9 |
| | | ATGCTCT | | aAuAaggCUaGUCcGUUsAucAAcuu | | |
| | | | | gaaaaaguGgcaccgAgUcggugcuususu- | | |
| | | | | 3′ | | |
| mcPC | GA00 | CAGGTTC | 81 | 5′csasgGUUCCAUGGGAUGCUCUg | 2402 | SpCas |
| SK9 | 577 | CATGGG | | UUUUsAGagcuagaaauagcaaGUUsaA | | 9 |
| | | ATGCTCT | | aAuAaggcuaGUccGUUsAucAAcuuG | | |
| | | | | aaaaaguGgcaccgAgUCggugcuususu-3′ | | |
| mcPC | GA00 | CAGGTTC | 81 | 5′csasgGUUCCAUGGGAUGCUCUg | 2405 | SpCas |
| SK9 | 578 | CATGGG | | UUUUsAGagcuaGaaauagcaaGUUsaA | | 9 |
| | | ATGCTCT | | aAuAaggCUaGUCcGUUsAucAAcuu | | |
| | | | | gaaaaaguGgcaccgAgUCggugcuususu- | | |
| | | | | 3′ | | |
| mcPC | GA00 | CAGGTTC | 81 | 5′csasgGUUCCAUGGGAUGCUCUg | 2406 | SpCas |
| SK9 | 579 | CATGGG | | UUUUsAGagcuaGaaauagcaaGUUsaA | | 9 |
| | | ATGCTCT | | aAuAaggCUaGUCcGUUsAucAAcuu | | |
| | | | | gaaaaaguGgcaccgAgUcggugcuususu- | | |
| | | | | 3′ | | |
| mcPC | GA00 | CAGGTTC | 81 | 5′csasgGUUCCAUGGGAUGCUCUg | 2407 | SpCas |
| SK9 | 580 | CATGGG | | UUUUsAGagcuaGaaauagcaaGUUsaA | | 9 |
| | | ATGCTCT | | aAuAaggcuaGUccGUUsAucAAcuuG | | |
| | | | | aaaaaguGgcaccgAgUCggugcuususu-3′ | | |
| mPCS | GA00 | CCCATAC | 69 | 5′cscscsAUACCUUGGAGCAACGGg | 2408 | ABE |
| K9 | 581 | CTTGGA | | UUUUAGagcuaGaaauagcaaGUUaAa | | |
| | | GCAACG | | AuAaggCUaGUCcGUUAucAAcuuGa | | |
| | | G | | aaaaguGgcaccgAgUCggugcusususuU | | |
| | | | | UU-3′ | | |
| mPCS | GA00 | CCCATAC | 69 | 5′cscscsAUACCUUGGAGCAACGGg | 2409 | ABE |
| K9 | 582 | CTTGGA | | UUUUAGagcuagaaauagcaaGUUaAaA | | |
| | | GCAACG | | uAaggcuaGUccGUUAucAAcuugaaaa | | |
| | | G | | agugGcaccgagucggugcusususuUUU-3′ | | |
| mPCS | GA00 | CCCATAC | 69 | 5′cscscsAUACCUUGGAGCAACGGg | 2410 | ABE |
| K9 | 583 | CTTGGA | | UUUUAGagcuaGaaauagcaaGUUaAa | | |
| | | GCAACG | | AuAaggcuaGUccGUUAucAAcuuGaa | | |
| | | G | | aaagugGcaccgagucggugcusususuUUU | | |
| | | | | -3′ | | |
| mAN | GA00 | GAGATA | 241 | 5′gsasgsAUACCUGAGUAACUUUC | 1699 | ABE |
| GPTL | 584 | CCTGAGT | | gUUUUAGagcuaGaaauagcaaGUUaAa | | |
| 3 | | AACTTTC | | AuAaggCUaGUCcGUUAucAAcuuGa | | |
| | | | | aaaaguGgcaccgAgUCggugcusususuU | | |
| | | | | UU-3′ | | |
| mAN | GA00 | GAGATA | 241 | 5′gsasgsAUACCUGAGUAACUUUC | 2411 | ABE |
| GPTL | 585 | CCTGAGT | | gUUUUAGagcuagaaauagcaaGUUaAa | | |
| 3 | | AACTTTC | | AuAaggcuaGUccGUUAucAAcuugaaa | | |
| | | | | aagugGcaccgagucggugcusususuUUU- | | |
| | | | | 3′ | | |
| mAN | GA00 | GAGATA | 241 | 5′gsasgsAUACCUGAGUAACUUUC | 2412 | ABE |
| GPTL | 586 | CCTGAGT | | gUUUUAGagcuaGaaauagcaaGUUaAa | | |
| 3 | | AACTTTC | | AuAaggcuaGUccGUUAucAAcuuGaa | | |
| | | | | aaagugGcaccgagucggugcusususuUUU | | |
| | | | | -3′ | | |
| mcPC | GA00 | CAGGTTC | 81 | 5′csasgsGUUCCAUGGGAUGCUCU | 1700 | SpCas |
| SK9 | 587 | CATGGG | | gUUUUAGagcuaGaaauagcaaGUUaAa | | 9 |
| | | ATGCTCT | | AuAaggcuaGUccGUUAucAAcuuGaa | | |
| | | | | aaagugGcaccgagucggugcusususuUUU | | |
| | | | | -3′ | | |
| mcPC | GA00 | CAGGTTC | 81 | 5′csasgsGUUCCAUGGGAUGCUCU | 2413 | SpCas |
| SK9 | 588 | CATGGG | | gUUUUAGagcuagaaauagcaaGUUaAa | | 9 |
| | | ATGCTCT | | AuAaggCUaGUCcGUUAucAAcuuGa | | |
| | | | | aaaaguGgcaccgAgUCggugcusususuU | | |
| | | | | UU-3′ | | |
| mcPC | GA00 | CAGGTTC | 81 | 5′csasgsGUUCCAUGGGAUGCUCU | 2414 | SpCas |
| SK9 | 589 | CATGGG | | gUUUUAGagcuagaaauagcaaGUUaAa | | 9 |
| | | ATGCTCT | | AuAaggcuaGUccGUUAucAAcuuGaa | | |
| | | | | aaaguGgcaccgAgUCggugcusususuUU | | |
| | | | | U-3′ | | |
| mcPC | GA00 | CAGGTTC | 81 | 5′csasgsGUUCCAUGGGAUGCUCU | 2415 | SpCas |
| SK9 | 590 | CATGGG | | gUUUUAGagcuagaaauagcaaGUUaAa | | 9 |
| | | ATGCTCT | | AuAaggCUaGUCcGUUAucAAcuuga | | |
| | | | | aaaaguGgcaccgAgUCggugcusususuU | | |
| | | | | UU-3′ | | |
| mcPC | GA00 | CAGGTTC | 81 | 5′csasgsGUUCCAUGGGAUGCUCU | 2416 | SpCas |
| SK9 | 591 | CATGGG | | gUUUUAGagcuagaaauagcaaGUUaAa | | 9 |
| | | ATGCTCT | | AuAaggCUaGUCcGUUAucAAcuuga | | |
| | | | | aaaaguGgcaccgAgUcggugcusususuUU | | |
| | | | | U-3′ | | |
| mcPC | GA00 | CAGGTTC | 81 | 5′csasgsGUUCCAUGGGAUGCUCU | 2414 | SpCas |
| SK9 | 592 | CATGGG | | gUUUUAGagcuagaaauagcaaGUUaAa | | 9 |
| | | ATGCTCT | | AuAaggcuaGUccGUUAucAAcuuGaa | | |
| | | | | aaaguGgcaccgAgUCggugcusususuUU | | |
| | | | | U-3′ | | |
| mcPC | GA00 | CAGGTTC | 81 | 5′csasgsGUUCCAUGGGAUGCUCU | 2417 | SpCas |
| SK9 | 593 | CATGGG | | gUUUUAGagcuaGaaauagcaaGUUaAa | | 9 |
| | | ATGCTCT | | AuAaggCUaGUCcGUUAucAAcuuga | | |
| | | | | aaaaguGgcaccgAgUCggugcusususuU | | |
| | | | | UU-3′ | | |
| mcPC | GA00 | CAGGTTC | 81 | 5′csasgsGUUCCAUGGGAUGCUCU | 2418 | SpCas |
| SK9 | 594 | CATGGG | | gUUUUAGagcuaGaaauagcaaGUUaAa | | 9 |
| | | ATGCTCT | | AuAaggCUaGUCcGUUAucAAcuuga | | |
| | | | | aaaaguGgcaccgAgUcggugcusususuUU | | |
| | | | | U-3′ | | |
| mcPC | GA00 | CAGGTTC | 81 | 5′csasgsGUUCCAUGGGAUGCUCU | 2419 | SpCas |
| SK9 | 595 | CATGGG | | gUUUUAGagcuaGaaauagcaaGUUaAa | | 9 |
| | | ATGCTCT | | AuAaggcuaGUccGUUAucAAcuuGaa | | |
| | | | | aaaguGgcaccgAgUCggugcusususuUU | | |
| | | | | U-3′ | | |
| mPCS | GA00 | CCCATAC | 69 | 5′cscscsAUACCUUGGAGCAACGGg | 1701 | ABE |
| K9 | 596 | CTTGGA | | UUUUAGagcuaGaaauagcaaGUUaAa | | |
| | | GCAACG | | AuAaggCUaGUCcGUUsAucAAcuuG | | |
| | | G | | aaaaaguGgcaccgAgUCggugcusususuU | | |
| | | | | UU-3′ | | |
| mPCS | GA00 | CCCATAC | 69 | 5′cscscsAUACCUUGGAGCAACGGg | 2420 | ABE |
| K9 | 597 | CTTGGA | | UUUUAGagcuagaaauagcaaGUUaAaA | | |
| | | GCAACG | | uAaggcuaGUccGUUsAucAAcuugaaaa | | |
| | | G | | agugGcaccgagucggugcusususuUUU-3′ | | |
| mPCS | GA00 | CCCATAC | 69 | 5′cscscsAUACCUUGGAGCAACGGg | 2421 | ABE |
| K9 | 598 | CTTGGA | | UUUUAGagcuaGaaauagcaaGUUaAa | | |
| | | GCAACG | | AuAaggcuaGUccGUUsAucAAcuuGa | | |
| | | G | | aaaagugGcaccgagucggugcusususuUU | | |
| | | | | U-3′ | | |
| mAN | GA00 | GAGATA | 241 | 5′gsasgsAUACCUGAGUAACUUUC | 1702 | ABE |
| GPTL | 599 | CCTGAGT | | gUUUUAGagcuaGaaauagcaaGUUaAa | | |
| 3 | | AACTTTC | | AuAaggCUaGUCcGUUsAucAAcuuG | | |
| | | | | aaaaaguGgcaccgAgUCggugcusususuU | | |
| | | | | UU-3′ | | |
| mAN | GA00 | GAGATA | 241 | 5′gsasgsAUACCUGAGUAACUUUC | 2422 | ABE |
| GPTL | 600 | CCTGAGT | | gUUUUAGagcuagaaauagcaaGUUaAa | | |
| 3 | | AACTTTC | | AuAaggcuaGUccGUUsAucAAcuugaa | | |
| | | | | aaagugGcaccgagucggugcusususuUUU | | |
| | | | | -3′ | | |
| mAN | GA00 | GAGATA | 241 | 5′gsasgsAUACCUGAGUAACUUUC | 2423 | ABE |
| GPTL | 601 | CCTGAGT | | gUUUUAGagcuaGaaauagcaaGUUaAa | | |
| 3 | | AACTTTC | | AuAaggcuaGUccGUUsAucAAcuuGa | | |
| | | | | aaaagugGcaccgagucggugcusususuUU | | |
| | | | | U-3′ | | |
| mcPC | GA00 | CAGGTTC | 81 | 5′csasgsGUUCCAUGGGAUGCUCU | 1703 | SpCas |
| SK9 | 602 | CATGGG | | gUUUUAGagcuaGaaauagcaaGUUaAa | | 9 |
| | | ATGCTCT | | AuAaggcuaGUccGUUsAucAAcuuGa | | |
| | | | | aaaagugGcaccgagucggugcusususuUU | | |
| | | | | U-3′ | | |
| mcPC | GA00 | CAGGTTC | 81 | 5′csasgsGUUCCAUGGGAUGCUCU | 2424 | SpCas |
| SK9 | 603 | CATGGG | | gUUUUAGagcuagaaauagcaaGUUaAa | | 9 |
| | | ATGCTCT | | AuAaggCUaGUCcGUUsAucAAcuuG | | |
| | | | | aaaaaguGgcaccgAgUCggugcusususuU | | |
| | | | | UU-3′ | | |
| mcPC | GA00 | CAGGTTC | 81 | 5′csasgsGUUCCAUGGGAUGCUCU | 2425 | SpCas |
| SK9 | 604 | CATGGG | | gUUUUAGagcuagaaauagcaaGUUaAa | | 9 |
| | | ATGCTCT | | AuAaggcuaGUccGUUsAucAAcuuGa | | |
| | | | | aaaaguGgcaccgAgUCggugcusususuU | | |
| | | | | UU-3′ | | |
| mcPC | GA00 | CAGGTTC | 81 | 5′csasgsGUUCCAUGGGAUGCUCU | 2426 | SpCas |
| SK9 | 605 | CATGGG | | gUUUUAGagcuagaaauagcaaGUUaAa | | 9 |
| | | ATGCTCT | | AuAaggCUaGUCcGUUsAucAAcuug | | |
| | | | | aaaaaguGgcaccgAgUCggugcusususuU | | |
| | | | | UU-3 | | |
| mcPC | GA00 | CAGGTTC | 81 | 5′csasgsGUUCCAUGGGAUGCUCU | 2427 | SpCas |
| SK9 | 606 | CATGGG | | gUUUUAGagcuagaaauagcaaGUUaAa | | 9 |
| | | ATGCTCT | | AuAaggCUaGUCcGUUsAucAAcuug | | |
| | | | | aaaaaguGgcaccgAgUcggugcusususuU | | |
| | | | | UU-3′ | | |
| mcPC | GA00 | CAGGTTC | 81 | 5′csasgsGUUCCAUGGGAUGCUCU | 2425 | SpCas |
| SK9 | 607 | CATGGG | | gUUUUAGagcuagaaauagcaaGUUaAa | | 9 |
| | | ATGCTCT | | AuAaggcuaGUccGUUsAucAAcuuGa | | |
| | | | | aaaaguGgcaccgAgUCggugcusususuU | | |
| | | | | UU-3′ | | |
| mcPC | GA00 | CAGGTTC | 81 | 5′csasgsGUUCCAUGGGAUGCUCU | 2428 | SpCas |
| SK9 | 608 | CATGGG | | gUUUUAGagcuaGaaauagcaaGUUaAa | | 9 |
| | | ATGCTCT | | AuAaggCUaGUCcGUUsAucAAcuug | | |
| | | | | aaaaaguGgcaccgAgUCggugcusususuU | | |
| | | | | UU-3′ | | |
| mcPC | GA00 | CAGGTTC | 81 | 5′csasgsGUUCCAUGGGAUGCUCU | 2429 | SpCas |
| SK9 | 609 | CATGGG | | gUUUUAGagcuaGaaauagcaaGUUaAa | | 9 |
| | | ATGCTCT | | AuAaggCUaGUCcGUUsAucAAcuug | | |
| | | | | aaaaaguGgcaccgAgUcggugcusususuU | | |
| | | | | UU-3′ | | |
| mcPC | GA00 | CAGGTTC | 81 | 5′csasgsGUUCCAUGGGAUGCUCU | 2430 | SpCas |
| SK9 | 610 | CATGGG | | gUUUUAGagcuaGaaauagcaaGUUaAa | | 9 |
| | | ATGCTCT | | AuAaggcuaGUccGUUsAucAAcuuGa | | |
| | | | | aaaaguGgcaccgAgUCggugcusususuU | | |
| | | | | UU-3′ | | |
| mPCS | GA00 | CCCATAC | 69 | 5′cscscsAUACCUUGGAGCAACGGg | 1704 | ABE |
| K9 | 611 | CTTGGA | | UUUUAGagcuaGaaauagcaaGUUsaAa | | |
| | | GCAACG | | AuAaggCUaGUCcGUUAucAAcuuGa | | |
| | | G | | aaaaguGgcaccgAgUCggugcusususuU | | |
| | | | | UU-3′ | | |
| mPCS | GA00 | CCCATAC | 69 | 5′cscscsAUACCUUGGAGCAACGGg | 2431 | ABE |
| K9 | 612 | CTTGGA | | UUUUAGagcuagaaauagcaaGUUsaAa | | |
| | | GCAACG | | AuAaggcuaGUccGUUAucAAcuugaaa | | |
| | | G | | aagugGcaccgagucggugcusususuUUU- | | |
| | | | | 3′ | | |
| mPCS | GA00 | CCCATAC | 69 | 5′cscscsAUACCUUGGAGCAACGGg | 2432 | ABE |
| K9 | 613 | CTTGGA | | UUUUAGagcuaGaaauagcaaGUUsaAa | | |
| | | GCAACG | | AuAaggcuaGUccGUUAucAAcuuGaa | | |
| | | G | | aaagugGcaccgagucggugcusususuUUU | | |
| | | | | -3′ | | |
| mAN | GA00 | GAGATA | 241 | 5′gsasgsAUACCUGAGUAACUUUC | 1705 | ABE |
| GPTL | 614 | CCTGAGT | | gUUUUAGagcuaGaaauagcaaGUUsaA | | |
| 3 | | AACTTTC | | aAuAaggCUaGUCcGUUAucAAcuuG | | |
| | | | | aaaaaguGgcaccgAgUCggugcusususuU | | |
| | | | | UU-3′ | | |
| mAN | GA00 | GAGATA | 241 | 5′gsasgsAUACCUGAGUAACUUUC | 2433 | ABE |
| GPTL | 615 | CCTGAGT | | gUUUUAGagcuagaaauagcaaGUUsaA | | |
| 3 | | AACTTTC | | aAuAaggcuaGUccGUUAucAAcuugaa | | |
| | | | | aaagugGcaccgagucggugcusususuUUU | | |
| | | | | -3′ | | |
| mAN | GA00 | GAGATA | 241 | 5′gsasgsAUACCUGAGUAACUUUC | 2434 | ABE |
| GPTL | 616 | CCTGAGT | | gUUUUAGagcuaGaaauagcaaGUUsaA | | |
| 3 | | AACTTTC | | aAuAaggcuaGUccGUUAucAAcuuGa | | |
| | | | | aaaagugGcaccgagucggugcusususuUU | | |
| | | | | U-3′ | | |
| mcPC | GA00 | CAGGTTC | 81 | 5′csasgsGUUCCAUGGGAUGCUCU | 1706 | SpCas |
| SK9 | 617 | CATGGG | | gUUUUAGagcuaGaaauagcaaGUUsaA | | 9 |
| | | ATGCTCT | | aAuAaggcuaGUccGUUAucAAcuuGa | | |
| | | | | aaaagugGcaccgagucggugcusususuUU | | |
| | | | | U-3′ | | |
| mcPC | GA00 | CAGGTTC | 81 | 5′csasgsGUUCCAUGGGAUGCUCU | 2435 | SpCas |
| SK9 | 618 | CATGGG | | gUUUUAGagcuagaaauagcaaGUUsaA | | 9 |
| | | ATGCTCT | | aAuAaggCUaGUCcGUUAucAAcuuG | | |
| | | | | aaaaaguGgcaccgAgUCggugcusususuU | | |
| | | | | UU-3′ | | |
| mcPC | GA00 | CAGGTTC | 81 | 5′csasgsGUUCCAUGGGAUGCUCU | 2436 | SpCas |
| SK9 | 619 | CATGGG | | gUUUUAGagcuagaaauagcaaGUUsaA | | 9 |
| | | ATGCTCT | | aAuAaggcuaGUccGUUAucAAcuuGa | | |
| | | | | aaaaguGgcaccgAgUCggugcusususuU | | |
| | | | | UU-3′ | | |
| mcPC | GA00 | CAGGTTC | 81 | 5′csasgsGUUCCAUGGGAUGCUCU | 2437 | SpCas |
| SK9 | 620 | CATGGG | | gUUUUAGagcuagaaauagcaaGUUsaA | | 9 |
| | | ATGCTCT | | aAuAaggCUaGUCcGUUAucAAcuug | | |
| | | | | aaaaaguGgcaccgAgUCggugcusususuU | | |
| | | | | UU-3′ | | |
| mcPC | GA00 | CAGGTTC | 81 | 5′csasgsGUUCCAUGGGAUGCUCU | 2438 | SpCas |
| SK9 | 621 | CATGGG | | gUUUUAGagcuagaaauagcaaGUUsaA | | 9 |
| | | ATGCTCT | | aAuAaggCUaGUCcGUUAucAAcuug | | |
| | | | | aaaaaguGgcaccgAgUcggugcusususuU | | |
| | | | | UU-3′ | | |
| mcPC | GA00 | CAGGTTC | 81 | 5′csasgsGUUCCAUGGGAUGCUCU | 2436 | SpCas |
| SK9 | 622 | CATGGG | | gUUUUAGagcuagaaauagcaaGUUsaA | | 9 |
| | | ATGCTCT | | aAuAaggcuaGUccGUUAucAAcuuGa | | |
| | | | | aaaaguGgcaccgAgUCggugcusususuU | | |
| | | | | UU-3′ | | |
| mcPC | GA00 | CAGGTTC | 81 | 5′csasgsGUUCCAUGGGAUGCUCU | 2439 | SpCas |
| SK9 | 623 | CATGGG | | gUUUUAGagcuaGaaauagcaaGUUsaA | | 9 |
| | | ATGCTCT | | aAuAaggCUaGUCcGUUAucAAcuug | | |
| | | | | aaaaaguGgcaccgAgUCggugcusususuU | | |
| | | | | UU-3′ | | |
| mcPC | GA00 | CAGGTTC | 81 | 5′csasgsGUUCCAUGGGAUGCUCU | 2440 | SpCas |
| SK9 | 624 | CATGGG | | gUUUUAGagcuaGaaauagcaaGUUsaA | | 9 |
| | | ATGCTCT | | aAuAaggCUaGUCcGUUAucAAcuug | | |
| | | | | aaaaaguGgcaccgAgUcggugcusususuU | | |
| | | | | UU-3′ | | |
| mcPC | GA00 | CAGGTTC | 81 | 5′csasgsGUUCCAUGGGAUGCUCU | 2441 | SpCas |
| SK9 | 625 | CATGGG | | gUUUUAGagcuaGaaauagcaaGUUsaA | | 9 |
| | | ATGCTCT | | aAuAaggcuaGUccGUUAucAAcuuGa | | |
| | | | | aaaaguGgcaccgAgUCggugcusususuU | | |
| | | | | UU-3′ | | |
| mPCS | GA00 | CCCATAC | 69 | 5′cscscsAUACCUUGGAGCAACGGg | 1707 | ABE |
| K9 | 626 | CTTGGA | | UUUUsAGagcuaGaaauagcaaGUUaAa | | |
| | | GCAACG | | AuAaggCUaGUCcGUUAucAAcuuGa | | |
| | | G | | aaaaguGgcaccgAgUCggugcusususuU | | |
| | | | | UU-3′ | | |
| mPCS | GA00 | CCCATAC | 69 | 5′cscscsAUACCUUGGAGCAACGGg | 2442 | ABE |
| K9 | 627 | CTTGGA | | UUUUsAGagcuagaaauagcaaGUUaAa | | |
| | | GCAACG | | AuAaggcuaGUccGUUAucAAcuugaaa | | |
| | | G | | aagugGcaccgagucggugcusususuUUU- | | |
| | | | | 3′ | | |
| mPCS | GA00 | CCCATAC | 69 | 5′cscscsAUACCUUGGAGCAACGGg | 2443 | ABE |
| K9 | 628 | CTTGGA | | UUUUsAGagcuaGaaauagcaaGUUaAa | | |
| | | GCAACG | | AuAaggcuaGUccGUUAucAAcuuGaa | | |
| | | G | | aaagugGcaccgagucggugcusususuUUU | | |
| | | | | -3′ | | |
| mAN | GA00 | GAGATA | 241 | 5′gsasgsAUACCUGAGUAACUUUC | 1708 | ABE |
| GPTL | 629 | CCTGAGT | | gUUUUsAGagcuaGaaauagcaaGUUaA | | |
| 3 | | AACTTTC | | aAuAaggCUaGUCcGUUAucAAcuuG | | |
| | | | | aaaaaguGgcaccgAgUCggugcusususuU | | |
| | | | | UU-3′ | | |
| mAN | GA00 | GAGATA | 241 | 5′gsasgsAUACCUGAGUAACUUUC | 2444 | ABE |
| GPTL | 630 | CCTGAGT | | gUUUUsAGagcuagaaauagcaaGUUaA | | |
| 3 | | AACTTTC | | aAuAaggcuaGUccGUUAucAAcuugaa | | |
| | | | | aaagugGcaccgagucggugcusususuUUU | | |
| | | | | -3′ | | |
| mAN | GA00 | GAGATA | 241 | 5′gsasgsAUACCUGAGUAACUUUC | 2445 | ABE |
| GPTL | 631 | CCTGAGT | | gUUUUsAGagcuaGaaauagcaaGUUaA | | |
| 3 | | AACTTTC | | aAuAaggcuaGUccGUUAucAAcuuGa | | |
| | | | | aaaagugGcaccgagucggugcusususuUU | | |
| | | | | U-3′ | | |
| mcPC | GA00 | CAGGTTC | 81 | 5′csasgsGUUCCAUGGGAUGCUCU | 1709 | SpCas |
| SK9 | 632 | CATGGG | | gUUUUsAGagcuaGaaauagcaaGUUaA | | 9 |
| | | ATGCTCT | | aAuAaggcuaGUccGUUAucAAcuuGa | | |
| | | | | aaaagugGcaccgagucggugcusususuUU | | |
| | | | | U-3′ | | |
| mcPC | GA00 | CAGGTTC | 81 | 5′csasgsGUUCCAUGGGAUGCUCU | 2446 | SpCas |
| SK9 | 633 | CATGGG | | gUUUUsAGagcuagaaauagcaaGUUaA | | 9 |
| | | ATGCTCT | | aAuAaggCUaGUCcGUUAucAAcuuG | | |
| | | | | aaaaaguGgcaccgAgUCggugcusususuU | | |
| | | | | UU-3′ | | |
| mcPC | GA00 | CAGGTTC | 81 | 5′csasgsGUUCCAUGGGAUGCUCU | 2447 | SpCas |
| SK9 | 634 | CATGGG | | gUUUUsAGagcuagaaauagcaaGUUaA | | 9 |
| | | ATGCTCT | | aAuAaggcuaGUccGUUAucAAcuuGa | | |
| | | | | aaaaguGgcaccgAgUCggugcusususuU | | |
| | | | | UU-3′ | | |
| mcPC | GA00 | CAGGTTC | 81 | 5′csasgsGUUCCAUGGGAUGCUCU | 2448 | SpCas |
| SK9 | 635 | CATGGG | | gUUUUsAGagcuagaaauagcaaGUUaA | | 9 |
| | | ATGCTCT | | aAuAaggCUaGUCcGUUAucAAcuug | | |
| | | | | aaaaaguGgcaccgAgUCggugcusususuU | | |
| | | | | UU-3′ | | |
| mcPC | GA00 | CAGGTTC | 81 | 5′csasgsGUUCCAUGGGAUGCUCU | 2449 | SpCas |
| SK9 | 636 | CATGGG | | gUUUUsAGagcuagaaauagcaaGUUaA | | 9 |
| | | ATGCTCT | | aAuAaggCUaGUCcGUUAucAAcuug | | |
| | | | | aaaaaguGgcaccgAgUcggugcusususuU | | |
| | | | | UU-3′ | | |
| mcPC | GA00 | CAGGTTC | 81 | 5′csasgsGUUCCAUGGGAUGCUCU | 2447 | SpCas |
| SK9 | 637 | CATGGG | | gUUUUsAGagcuagaaauagcaaGUUaA | | 9 |
| | | ATGCTCT | | aAuAaggcuaGUccGUUAucAAcuuGa | | |
| | | | | aaaaguGgcaccgAgUCggugcusususuU | | |
| | | | | UU-3′ | | |
| mcPC | GA00 | CAGGTTC | 81 | 5′csasgsGUUCCAUGGGAUGCUCU | 2450 | SpCas |
| SK9 | 638 | CATGGG | | gUUUUsAGagcuaGaaauagcaaGUUaA | | 9 |
| | | ATGCTCT | | aAuAaggCUaGUCcGUUAucAAcuug | | |
| | | | | aaaaaguGgcaccgAgUCggugcusususuU | | |
| | | | | UU-3′ | | |
| mcPC | GA00 | CAGGTTC | 81 | 5′csasgsGUUCCAUGGGAUGCUCU | 2451 | SpCas |
| SK9 | 639 | CATGGG | | gUUUUsAGagcuaGaaauagcaaGUUaA | | 9 |
| | | ATGCTCT | | aAuAaggCUaGUCcGUUAucAAcuug | | |
| | | | | aaaaaguGgcaccgAgUcggugcusususuU | | |
| | | | | UU-3′ | | |
| mcPC | GA00 | CAGGTTC | 81 | 5′csasgsGUUCCAUGGGAUGCUCU | 2452 | SpCas |
| SK9 | 640 | CATGGG | | gUUUUsAGagcuaGaaauagcaaGUUaA | | 9 |
| | | ATGCTCT | | aAuAaggcuaGUccGUUAucAAcuuGa | | |
| | | | | aaaaguGgcaccgAgUCggugcusususuU | | |
| | | | | UU-3′ | | |
| mPCS | GA00 | CCCATAC | 69 | 5′cscscsAUACCUUGGAGCAACGGg | 1710 | ABE |
| K9 | 641 | CTTGGA | | UUUUAGagcuaGaaauagcaaGUUsaAa | | |
| | | GCAACG | | AuAaggCUaGUCcGUUsAucAAcuuG | | |
| | | G | | aaaaaguGgcaccgAgUCggugcusususuU | | |
| | | | | UU-3′ | | |
| mPCS | GA00 | CCCATAC | 69 | 5′cscscsAUACCUUGGAGCAACGGg | 2453 | ABE |
| K9 | 642 | CTTGGA | | UUUUAGagcuagaaauagcaaGUUsaAa | | |
| | | GCAACG | | AuAaggcuaGUccGUUsAucAAcuugaa | | |
| | | G | | aaagugGcaccgagucggugcusususuUUU | | |
| | | | | -3′ | | |
| mPCS | GA00 | CCCATAC | 69 | 5′cscscsAUACCUUGGAGCAACGGg | 2454 | ABE |
| K9 | 643 | CTTGGA | | UUUUAGagcuaGaaauagcaaGUUsaAa | | |
| | | GCAACG | | AuAaggcuaGUccGUUsAucAAcuuGa | | |
| | | G | | aaaagugGcaccgagucggugcusususuUU | | |
| | | | | U-3′ | | |
| mAN | GA00 | GAGATA | 241 | 5′gsasgsAUACCUGAGUAACUUUC | 1711 | ABE |
| GPTL | 644 | CCTGAGT | | gUUUUAGagcuaGaaauagcaaGUUsaA | | |
| 3 | | AACTTTC | | aAuAaggCUaGUCcGUUsAucAAcuu | | |
| | | | | GaaaaaguGgcaccgAgUCggugcusususu | | |
| | | | | UUU-3′ | | |
| mAN | GA00 | GAGATA | 241 | 5′gsasgsAUACCUGAGUAACUUUC | 2455 | ABE |
| GPTL | 645 | CCTGAGT | | gUUUUAGagcuagaaauagcaaGUUsaA | | |
| 3 | | AACTTTC | | aAuAaggcuaGUccGUUsAucAAcuuga | | |
| | | | | aaaagugGcaccgagucggugcusususuUU | | |
| | | | | U-3′ | | |
| mAN | GA00 | GAGATA | 241 | 5′gsasgsAUACCUGAGUAACUUUC | 2456 | ABE |
| GPTL | 646 | CCTGAGT | | gUUUUAGagcuaGaaauagcaaGUUsaA | | |
| 3 | | AACTTTC | | aAuAaggcuaGUccGUUsAucAAcuuG | | |
| | | | | aaaaagugGcaccgagucggugcusususuUU | | |
| | | | | U-3′ | | |
| mcPC | GA00 | CAGGTTC | 81 | 5′csasgsGUUCCAUGGGAUGCUCU | 1712 | SpCas |
| SK9 | 647 | CATGGG | | gUUUUAGagcuaGaaauagcaaGUUsaA | | 9 |
| | | ATGCTCT | | aAuAaggcuaGUccGUUsAucAAcuuG | | |
| | | | | aaaaagugGcaccgagucggugcusususuUU | | |
| | | | | U-3′ | | |
| mcPC | GA00 | CAGGTTC | 81 | 5′csasgsGUUCCAUGGGAUGCUCU | 2457 | SpCas |
| SK9 | 648 | CATGGG | | gUUUUAGagcuagaaauagcaaGUUsaA | | 9 |
| | | ATGCTCT | | aAuAaggCUaGUCcGUUsAucAAcuu | | |
| | | | | GaaaaaguGgcaccgAgUCggugcusususu | | |
| | | | | UUU-3′ | | |
| mcPC | GA00 | CAGGTTC | 81 | 5′csasgsGUUCCAUGGGAUGCUCU | 2458 | SpCas |
| SK9 | 649 | CATGGG | | gUUUUAGagcuagaaauagcaaGUUsaA | | 9 |
| | | ATGCTCT | | aAuAaggcuaGUccGUUsAucAAcuuG | | |
| | | | | aaaaaguGgcaccgAgUCggugcusususuU | | |
| | | | | UU-3′ | | |
| mcPC | GA00 | CAGGTTC | 81 | 5′csasgsGUUCCAUGGGAUGCUCU | 2459 | SpCas |
| SK9 | 650 | CATGGG | | gUUUUAGagcuagaaauagcaaGUUsaA | | 9 |
| | | ATGCTCT | | aAuAaggCUaGUCcGUUsAucAAcuu | | |
| | | | | gaaaaaguGgcaccgAgUCggugcusususu | | |
| | | | | UUU-3′ | | |
| mcPC | GA00 | CAGGTTC | 81 | 5′csasgsGUUCCAUGGGAUGCUCU | 2460 | SpCas |
| SK9 | 651 | CATGGG | | gUUUUAGagcuagaaauagcaaGUUsaA | | 9 |
| | | ATGCTCT | | aAuAaggCUaGUCcGUUsAucAAcuu | | |
| | | | | gaaaaaguGgcaccgAgUcggugcusususu | | |
| | | | | UUU-3′ | | |
| mcPC | GA00 | CAGGTTC | 81 | 5′csasgsGUUCCAUGGGAUGCUCU | 2458 | SpCas |
| SK9 | 652 | CATGGG | | gUUUUAGagcuagaaauagcaaGUUsaA | | 9 |
| | | ATGCTCT | | aAuAaggcuaGUccGUUsAucAAcuuG | | |
| | | | | aaaaaguGgcaccgAgUCggugcusususuU | | |
| | | | | UU-3′ | | |
| mcPC | GA00 | CAGGTTC | 81 | 5′csasgsGUUCCAUGGGAUGCUCU | 2461 | SpCas |
| SK9 | 653 | CATGGG | | gUUUUAGagcuaGaaauagcaaGUUsaA | | 9 |
| | | ATGCTCT | | aAuAaggCUaGUCcGUUsAucAAcuu | | |
| | | | | gaaaaaguGgcaccgAgUCggugcusususu | | |
| | | | | UUU-3′ | | |
| mcPC | GA00 | CAGGTTC | 81 | 5′csasgsGUUCCAUGGGAUGCUCU | 2462 | SpCas |
| SK9 | 654 | CATGGG | | gUUUUAGagcuaGaaauagcaaGUUsaA | | 9 |
| | | ATGCTCT | | aAuAaggCUaGUCcGUUsAucAAcuu | | |
| | | | | gaaaaaguGgcaccgAgUcggugcusususu | | |
| | | | | UUU-3′ | | |
| mcPC | GA00 | CAGGTTC | 81 | 5′csasgsGUUCCAUGGGAUGCUCU | 2463 | SpCas |
| SK9 | 655 | CATGGG | | gUUUUAGagcuaGaaauagcaaGUUsaA | | 9 |
| | | ATGCTCT | | aAuAaggcuaGUccGUUsAucAAcuuG | | |
| | | | | aaaaaguGgcaccgAgUCggugcusususuU | | |
| | | | | UU-3′ | | |
| mPCS | GA00 | CCCATAC | 69 | 5′cscscsAUACCUUGGAGCAACGGg | 1713 | ABE |
| K9 | 656 | CTTGGA | | UUUUsAGagcuaGaaauagcaaGUUsaA | | |
| | | GCAACG | | aAuAaggCUaGUCcGUUAucAAcuuG | | |
| | | G | | aaaaaguGgcaccgAgUCggugcusususuU | | |
| | | | | UU-3′ | | |
| mPCS | GA00 | CCCATAC | 69 | 5′cscscsAUACCUUGGAGCAACGGg | 2464 | ABE |
| K9 | 657 | CTTGGA | | UUUUsAGagcuagaaauagcaaGUUsaA | | |
| | | GCAACG | | aAuAaggcuaGUccGUUAucAAcuugaa | | |
| | | G | | aaagugGcaccgagucggugcusususuUUU | | |
| | | | | -3′ | | |
| mPCS | GA00 | CCCATAC | 69 | 5′cscscsAUACCUUGGAGCAACGGg | 2465 | ABE |
| K9 | 658 | CTTGGA | | UUUUsAGagcuaGaaauagcaaGUUsaA | | |
| | | GCAACG | | aAuAaggcuaGUccGUUAucAAcuuGa | | |
| | | G | | aaaagugGcaccgagucggugcusususuUU | | |
| | | | | U-3′ | | |
| mAN | GA00 | GAGATA | 241 | 5′gsasgsAUACCUGAGUAACUUUC | 1714 | ABE |
| GPTL | 659 | CCTGAGT | | gUUUUsAGagcuaGaaauagcaaGUUsa | | |
| 3 | | AACTTTC | | AaAuAaggCUaGUCcGUUAucAAcuu | | |
| | | | | GaaaaaguGgcaccgAgUCggugcusususu | | |
| | | | | UUU-3′ | | |
| mAN | GA00 | GAGATA | 24] | 5′gsasgsAUACCUGAGUAACUUUC | 2466 | ABE |
| GPTL | 660 | CCTGAGT | | gUUUUsAGagcuagaaauagcaaGUUsa | | |
| 3 | | AACTTTC | | AaAuAaggcuaGUccGUUAucAAcuug | | |
| | | | | aaaaagugGcaccgagucggugcusususuUU | | |
| | | | | U-3′ | | |
| mAN | GA00 | GAGATA | 241 | 5′gsasgsAUACCUGAGUAACUUUC | 2467 | ABE |
| GPTL | 661 | CCTGAGT | | gUUUUsAGagcuaGaaauagcaaGUUsa | | |
| 3 | | AACTTTC | | AaAuAaggcuaGUccGUUAucAAcuuG | | |
| | | | | aaaaagugGcaccgagucggugcusususuUU | | |
| | | | | U-3′ | | |
| mcPC | GA00 | CAGGTTC | 81 | 5′csasgsGUUCCAUGGGAUGCUCU | 1715 | SpCas |
| SK9 | 662 | CATGGG | | gUUUUsAGagcuaGaaauagcaaGUUsa | | 9 |
| | | ATGCTCT | | AaAuAaggcuaGUccGUUAucAAcuuG | | |
| | | | | aaaaagugGcaccgagucggugcusususuUU | | |
| | | | | U-3′ | | |
| mcPC | GA00 | CAGGTTC | 81 | 5′csasgsGUUCCAUGGGAUGCUCU | 2468 | SpCas |
| SK9 | 663 | CATGGG | | gUUUUsAGagcuagaaauagcaaGUUsa | | 9 |
| | | ATGCTCT | | AaAuAaggCUaGUCcGUUAucAAcuu | | |
| | | | | GaaaaaguGgcaccgAgUCggugcusususu | | |
| | | | | UUU-3′ | | |
| mcPC | GA00 | CAGGTTC | 81 | 5′csasgsGUUCCAUGGGAUGCUCU | 2469 | SpCas |
| SK9 | 664 | CATGGG | | gUUUUsAGagcuagaaauagcaaGUUsa | | 9 |
| | | ATGCTCT | | AaAuAaggcuaGUccGUUAucAAcuuG | | |
| | | | | aaaaaguGgcaccgAgUCggugcusususuU | | |
| | | | | UU-3′ | | |
| mcPC | GA00 | CAGGTTC | 81 | 5′csasgsGUUCCAUGGGAUGCUCU | 2470 | SpCas |
| SK9 | 665 | CATGGG | | gUUUUsAGagcuagaaauagcaaGUUsa | | 9 |
| | | ATGCTCT | | AaAuAaggCUaGUCcGUUAucAAcuu | | |
| | | | | gaaaaaguGgcaccgAgUCggugcusususu | | |
| | | | | UUU-3′ | | |
| mcPC | GA00 | CAGGTTC | 81 | 5′csasgsGUUCCAUGGGAUGCUCU | 2471 | SpCas |
| SK9 | 666 | CATGGG | | gUUUUsAGagcuagaaauagcaaGUUsa | | 9 |
| | | ATGCTCT | | AaAuAaggCUaGUCcGUUAucAAcuu | | |
| | | | | gaaaaaguGgcaccgAgUcggugcusususu | | |
| | | | | UUU-3′ | | |
| mcPC | GA00 | CAGGTTC | 81 | 5′csasgsGUUCCAUGGGAUGCUCU | 2469 | SpCas |
| SK9 | 667 | CATGGG | | gUUUUsAGagcuagaaauagcaaGUUsa | | 9 |
| | | ATGCTCT | | AaAuAaggcuaGUccGUUAucAAcuuG | | |
| | | | | aaaaaguGgcaccgAgUCggugcusususuU | | |
| | | | | UU-3′ | | |
| mcPC | GA00 | CAGGTTC | 81 | 5′csasgsGUUCCAUGGGAUGCUCU | 2472 | SpCas |
| SK9 | 668 | CATGGG | | gUUUUsAGagcuaGaaauagcaaGUUsa | | 9 |
| | | ATGCTCT | | AaAuAaggCUaGUCcGUUAucAAcuu | | |
| | | | | gaaaaaguGgcaccgAgUCggugcusususu | | |
| | | | | UUU-3′ | | |
| mcPC | GA00 | CAGGTTC | 81 | 5′csasgsGUUCCAUGGGAUGCUCU | 2473 | SpCas |
| SK9 | 669 | CATGGG | | gUUUUsAGagcuaGaaauagcaaGUUsa | | 9 |
| | | ATGCTCT | | AaAuAaggCUaGUCcGUUAucAAcuu | | |
| | | | | gaaaaaguGgcaccgAgUcggugcusususu | | |
| | | | | UUU-3′ | | |
| mcPC | GA00 | CAGGTTC | 81 | 5′csasgsGUUCCAUGGGAUGCUCU | 2474 | SpCas |
| SK9 | 670 | CATGGG | | gUUUUsAGagcuaGaaauagcaaGUUsa | | 9 |
| | | ATGCTCT | | AaAuAaggcuaGUccGUUAucAAcuuG | | |
| | | | | aaaaaguGgcaccgAgUCggugcusususuU | | |
| | | | | UU-3′ | | |
| mPCS | GA00 | CCCATAC | 69 | 5′cscscsAUACCUUGGAGCAACGGg | 1716 | ABE |
| K9 | 671 | CTTGGA | | UUUUsAGagcuaGaaauagcaaGUUaAa | | |
| | | GCAACG | | AuAaggCUaGUCcGUUsAucAAcuuG | | |
| | | G | | aaaaaguGgcaccgAgUCggugcusususuU | | |
| | | | | UU-3′ | | |
| mPCS | GA00 | CCCATAC | 69 | 5′cscscsAUACCUUGGAGCAACGGg | 2475 | ABE |
| K9 | 672 | CTTGGA | | UUUUsAGagcuagaaauagcaaGUUaAa | | |
| | | GCAACG | | AuAaggcuaGUccGUUsAucAAcuugaa | | |
| | | G | | aaagugGcaccgagucggugcusususuUUU | | |
| | | | | -3′ | | |
| mPCS | GA00 | CCCATAC | 69 | 5′cscscsAUACCUUGGAGCAACGGg | 2476 | ABE |
| K9 | 673 | CTTGGA | | UUUUsAGagcuaGaaauagcaaGUUaAa | | |
| | | GCAACG | | AuAaggcuaGUccGUUsAucAAcuuGa | | |
| | | G | | aaaagugGcaccgagucggugcusususuUU | | |
| | | | | U-3′ | | |
| mAN | GA00 | GAGATA | 241 | 5′gsasgsAUACCUGAGUAACUUUC | 1717 | ABE |
| GPTL | 674 | CCTGAGT | | gUUUUsAGagcuaGaaauagcaaGUUaA | | |
| 3 | | AACTTTC | | aAuAaggCUaGUCcGUUsAucAAcuu | | |
| | | | | GaaaaaguGgcaccgAgUCggugcusususu | | |
| | | | | UUU-3′ | | |
| mAN | GA00 | GAGATA | 241 | 5′gsasgsAUACCUGAGUAACUUUC | 2477 | ABE |
| GPTL | 675 | CCTGAGT | | gUUUUsAGagcuagaaauagcaaGUUaA | | |
| 3 | | AACTTTC | | aAuAaggcuaGUccGUUsAucAAcuuga | | |
| | | | | aaaagugGcaccgagucggugcusususuUU | | |
| | | | | U-3′ | | |
| mAN | GA00 | GAGATA | 241 | 5′gsasgsAUACCUGAGUAACUUUC | 2478 | ABE |
| GPTL | 676 | CCTGAGT | | gUUUUsAGagcuaGaaauagcaaGUUaA | | |
| 3 | | AACTTTC | | aAuAaggcuaGUccGUUsAucAAcuuG | | |
| | | | | aaaaagugGcaccgagucggugcusususuUU | | |
| | | | | U-3′ | | |
| mcPC | GA00 | CAGGTTC | 81 | 5′csasgsGUUCCAUGGGAUGCUCU | 1718 | SpCas |
| SK9 | 677 | CATGGG | | gUUUUsAGagcuaGaaauagcaaGUUaA | | 9 |
| | | ATGCTCT | | aAuAaggcuaGUccGUUsAucAAcuuG | | |
| | | | | aaaaagugGcaccgagucggugcusususuUU | | |
| | | | | U-3′ | | |
| mcPC | GA00 | CAGGTTC | 81 | 5′csasgsGUUCCAUGGGAUGCUCU | 2479 | SpCas |
| SK9 | 678 | CATGGG | | gUUUUsAGagcuagaaauagcaaGUUaA | | 9 |
| | | ATGCTCT | | aAuAaggCUaGUCcGUUsAucAAcuu | | |
| | | | | GaaaaaguGgcaccgAgUCggugcusususu | | |
| | | | | UUU-3′ | | |
| mcPC | GA00 | CAGGTTC | 81 | 5′csasgsGUUCCAUGGGAUGCUCU | 2480 | SpCas |
| SK9 | 679 | CATGGG | | gUUUUsAGagcuagaaauagcaaGUUaA | | 9 |
| | | ATGCTCT | | aAuAaggcuaGUccGUUsAucAAcuuG | | |
| | | | | aaaaaguGgcaccgAgUCggugcusususuU | | |
| | | | | UU-3′ | | |
| mcPC | GA00 | CAGGTTC | 81 | 5′csasgsGUUCCAUGGGAUGCUCU | 2481 | SpCas |
| SK9 | 680 | CATGGG | | gUUUUsAGagcuagaaauagcaaGUUaA | | 9 |
| | | ATGCTCT | | aAuAaggCUaGUCcGUUsAucAAcuu | | |
| | | | | gaaaaaguGgcaccgAgUCggugcusususu | | |
| | | | | UUU-3′ | | |
| mcPC | GA00 | CAGGTTC | 81 | 5′csasgsGUUCCAUGGGAUGCUCU | 2482 | SpCas |
| SK9 | 681 | CATGGG | | gUUUUsAGagcuagaaauagcaaGUUaA | | 9 |
| | | ATGCTCT | | aAuAaggCUaGUCcGUUsAucAAcuu | | |
| | | | | gaaaaaguGgcaccgAgUcggugcusususu | | |
| | | | | UUU-3′ | | |
| mcPC | GA00 | CAGGTTC | 81 | 5′csasgsGUUCCAUGGGAUGCUCU | 2480 | SpCas |
| SK9 | 682 | CATGGG | | gUUUUsAGagcuagaaauagcaaGUUaA | | 9 |
| | | ATGCTCT | | aAuAaggcuaGUccGUUsAucAAcuuG | | |
| | | | | aaaaaguGgcaccgAgUCggugcusususuU | | |
| | | | | UU-3′ | | |
| mcPC | GA00 | CAGGTTC | 81 | 5′csasgsGUUCCAUGGGAUGCUCU | 2483 | SpCas |
| SK9 | 683 | CATGGG | | gUUUUsAGagcuaGaaauagcaaGUUaA | | 9 |
| | | ATGCTCT | | aAuAaggCUaGUCcGUUsAucAAcuu | | |
| | | | | gaaaaaguGgcaccgAgUCggugcusususu | | |
| | | | | UUU-3′ | | |
| mcPC | GA00 | CAGGTTC | 81 | 5′csasgsGUUCCAUGGGAUGCUCU | 2484 | SpCas |
| SK9 | 684 | CATGGG | | gUUUUsAGagcuaGaaauagcaaGUUaA | | 9 |
| | | ATGCTCT | | aAuAaggCUaGUCcGUUsAucAAcuu | | |
| | | | | gaaaaaguGgcaccgAgUcggugcusususu | | |
| | | | | UUU-3′ | | |
| mcPC | GA00 | CAGGTTC | 81 | 5′csasgsGUUCCAUGGGAUGCUCU | 2485 | SpCas |
| SK9 | 685 | CATGGG | | gUUUUsAGagcuaGaaauagcaaGUUaA | | 9 |
| | | ATGCTCT | | aAuAaggcuaGUccGUUsAucAAcuuG | | |
| | | | | aaaaaguGgcaccgAgUCggugcusususuU | | |
| | | | | UU-3′ | | |
| mPCS | GA00 | CCCATAC | 69 | 5′cscscsAUACCUUGGAGCAACGGg | 1719 | ABE |
| K9 | 686 | CTTGGA | | UUUUsAGagcuaGaaauagcaaGUUsaA | | |
| | | GCAACG | | aAuAaggCUaGUCcGUUsAucAAcuu | | |
| | | G | | GaaaaaguGgcaccgAgUCggugcusususu | | |
| | | | | UUU-3′ | | |
| mPCS | GA00 | CCCATAC | 69 | 5′cscscsAUACCUUGGAGCAACGGg | 2486 | ABE |
| K9 | 687 | CTTGGA | | UUUUsAGagcuagaaauagcaaGUUsaA | | |
| | | GCAACG | | aAuAaggcuaGUccGUUsAucAAcuuga | | |
| | | G | | aaaagugGcaccgagucggugcusususuUU | | |
| | | | | U-3′ | | |
| mPCS | GA00 | CCCATAC | 69 | 5′cscscsAUACCUUGGAGCAACGGg | 2487 | ABE |
| K9 | 688 | CTTGGA | | UUUUsAGagcuaGaaauagcaaGUUsaA | | |
| | | GCAACG | | aAuAaggcuaGUccGUUsAucAAcuuG | | |
| | | G | | aaaaagugGcaccgagucggugcusususuUU | | |
| | | | | U-3′ | | |
| mAN | GA00 | GAGATA | 241 | 5′gsasgsAUACCUGAGUAACUUUC | 1720 | ABE |
| GPTL | 689 | CCTGAGT | | gUUUUsAGagcuaGaaauagcaaGUUsa | | |
| 3 | | AACTTTC | | AaAuAaggCUaGUCcGUUsAucAAcu | | |
| | | | | uGaaaaaguGgcaccgAgUCggugcususus | | |
| | | | | UUUU-3′ | | |
| mAN | GA00 | GAGATA | 241 | 5′gsasgsAUACCUGAGUAACUUUC | 2488 | ABE |
| GPTL | 690 | CCTGAGT | | gUUUUsAGagcuagaaauagcaaGUUsa | | |
| 3 | | AACTTTC | | AaAuAaggcuaGUccGUUsAucAAcuu | | |
| | | | | gaaaaagugGcaccgagucggugcusususuU | | |
| | | | | UU-3′ | | |
| mAN | GA00 | GAGATA | 241 | 5′gsasgsAUACCUGAGUAACUUUC | 2489 | ABE |
| GPTL | 691 | CCTGAGT | | gUUUUsAGagcuaGaaauagcaaGUUsa | | |
| 3 | | AACTTTC | | AaAuAaggcuaGUccGUUsAucAAcuu | | |
| | | | | GaaaaagugGcaccgagucggugcusususuU | | |
| | | | | UU-3′ | | |
| mcPC | GA00 | CAGGTTC | 81 | 5′csasgsGUUCCAUGGGAUGCUCU | 1721 | SpCas |
| SK9 | 692 | CATGGG | | gUUUUsAGagcuaGaaauagcaaGUUsa | | 9 |
| | | ATGCTCT | | AaAuAaggcuaGUccGUUsAucAAcuu | | |
| | | | | GaaaaagugGcaccgagucggugcusususuU | | |
| | | | | UU-3′ | | |
| mcPC | GA00 | CAGGTTC | 81 | 5′csasgsGUUCCAUGGGAUGCUCU | 2490 | SpCas |
| SK9 | 693 | CATGGG | | gUUUUsAGagcuagaaauagcaaGUUsa | | 9 |
| | | ATGCTCT | | AaAuAaggCUaGUCcGUUsAucAAcu | | |
| | | | | uGaaaaaguGgcaccgAgUCggugcususus | | |
| | | | | UUUU-3′ | | |
| mcPC | GA00 | CAGGTTC | 81 | 5′csasgsGUUCCAUGGGAUGCUCU | 2491 | SpCas |
| SK9 | 694 | CATGGG | | gUUUUsAGagcuagaaauagcaaGUUsa | | 9 |
| | | ATGCTCT | | AaAuAaggcuaGUccGUUsAucAAcuu | | |
| | | | | GaaaaaguGgcaccgAgUCggugcusususu | | |
| | | | | UUU-3′ | | |
| mcPC | GA00 | CAGGTTC | 81 | 5′csasgsGUUCCAUGGGAUGCUCU | 2492 | SpCas |
| SK9 | 695 | CATGGG | | gUUUUsAGagcuagaaauagcaaGUUsa | | 9 |
| | | ATGCTCT | | AaAuAaggCUaGUCcGUUsAucAAcu | | |
| | | | | ugaaaaaguGgcaccgAgUCggugcususus | | |
| | | | | uUUU-3′ | | |
| mcPC | GA00 | CAGGTTC | 81 | 5′csasgsGUUCCAUGGGAUGCUCU | 2493 | SpCas |
| SK9 | 696 | CATGGG | | gUUUUsAGagcuagaaauagcaaGUUsa | | 9 |
| | | ATGCTCT | | AaAuAaggCUaGUCcGUUsAucAAcu | | |
| | | | | ugaaaaaguGgcaccgAgUcggugcusususu | | |
| | | | | UUU-3′ | | |
| mcPC | GA00 | CAGGTTC | 81 | 5′csasgsGUUCCAUGGGAUGCUCU | 2491 | SpCas |
| SK9 | 697 | CATGGG | | gUUUUsAGagcuagaaauagcaaGUUsa | | 9 |
| | | ATGCTCT | | AaAuAaggcuaGUccGUUsAucAAcuu | | |
| | | | | GaaaaaguGgcaccgAgUCggugcusususu | | |
| | | | | UUU-3′ | | |
| mcPC | GA00 | CAGGTTC | 81 | 5′csasgsGUUCCAUGGGAUGCUCU | 2494 | SpCas |
| SK9 | 698 | CATGGG | | gUUUUsAGagcuaGaaauagcaaGUUsa | | 9 |
| | | ATGCTCT | | AaAuAaggCUaGUCcGUUsAucAAcu | | |
| | | | | ugaaaaaguGgcaccgAgUCggugcususus | | |
| | | | | UUUU-3′ | | |
| mcPC | GA00 | CAGGTTC | 81 | 5′csasgsGUUCCAUGGGAUGCUCU | 2495 | SpCas |
| SK9 | 699 | CATGGG | | gUUUUsAGagcuaGaaauagcaaGUUsa | | 9 |
| | | ATGCTCT | | AaAuAaggCUaGUCcGUUsAucAAcu | | |
| | | | | ugaaaaaguGgcaccgAgUcggugcusususu | | |
| | | | | UUU-3′ | | |
| mcPC | GA00 | CAGGTTC | 81 | 5′csasgsGUUCCAUGGGAUGCUCU | 2496 | SpCas |
| SK9 | 700 | CATGGG | | gUUUUsAGagcuaGaaauagcaaGUUsa | | 9 |
| | | ATGCTCT | | AaAuAaggcuaGUccGUUsAucAAcuu | | |
| | | | | GaaaaaguGgcaccgAgUCggugcusususu | | |
| | | | | UUU-3′ | | |
| mcPC | GA00 | CAGGTTC | 81 | 5′csasgGUUCCAUGGGAUGCUCUg | 1722 | SpCas |
| SK9 | 701 | CATGGG | | UUUUAGagcuaGaaauagcaaGUUaAa | | 9 |
| | | ATGCTCT | | AuAaggCUaGUCcGUUAucAAcuuGa | | |
| | | | | aaaaguGgcaccgAgUCggugcusususuU | | |
| | | | | UU-3′ | | |
| mcPC | GA00 | CAGGTTC | 81 | 5′csasgGUUCCAUGGGAUGCUCUg | 2497 | SpCas |
| SK9 | 702 | CATGGG | | UUUUAGagcuagaaauagcaaGUUaAaA | | 9 |
| | | ATGCTCT | | uAaggcuaGUccGUUAucAAcuugaaaa | | |
| | | | | agugGcaccgagucggugcusususuUUU-3′ | | |
| mPCS | GA00 | CCCATAC | 69 | 5′cscscAUACCUUGGAGCAACGGg | 1723 | ABE |
| K9 | 703 | CTTGGA | | UUUUAGagcuaGaaauagcaaGUUaAa | | |
| | | GCAACG | | AuAaggCUaGUCcGUUAucAAcuuGa | | |
| | | G | | aaaaguGgcaccgAgUCggugcusususuU | | |
| | | | | UU-3′ | | |
| mPCS | GA00 | CCCATAC | 69 | 5′cscscAUACCUUGGAGCAACGGg | 2498 | ABE |
| K9 | 704 | CTTGGA | | UUUUAGagcuagaaauagcaaGUUaAaA | | |
| | | GCAACG | | uAaggcuaGUccGUUAucAAcuugaaaa | | |
| | | G | | agugGcaccgagucggugcusususuUUU-3′ | | |
| mPCS | GA00 | CCCATAC | 69 | 5′cscscAUACCUUGGAGCAACGGg | 2499 | ABE |
| K9 | 705 | CTTGGA | | UUUUAGagcuaGaaauagcaaGUUaAa | | |
| | | GCAACG | | AuAaggcuaGUccGUUAucAAcuuGaa | | |
| | | G | | aaagugGcaccgagucggugcusususuUUU | | |
| | | | | -3′ | | |
| mAN | GA00 | GAGATA | 241 | 5′gsasgAUACCUGAGUAACUUUCg | 1724 | ABE |
| GPTL | 706 | CCTGAGT | | UUUUAGagcuaGaaauagcaaGUUaAa | | |
| 3 | | AACTTTC | | AuAaggCUaGUCcGUUAucAAcuuGa | | |
| | | | | aaaaguGgcaccgAgUCggugcusususuU | | |
| | | | | UU-3 | | |
| mAN | GA00 | GAGATA | 241 | 5′gsasgAUACCUGAGUAACUUUCg | 2500 | ABE |
| GPTL | 707 | CCTGAGT | | UUUUAGagcuagaaauagcaaGUUaAaA | | |
| 3 | | AACTTTC | | uAaggcuaGUccGUUAucAAcuugaaaa | | |
| | | | | agugGcaccgagucggugcusususuUUU-3′ | | |
| mAN | GA00 | GAGATA | 241 | 5′gsasgAUACCUGAGUAACUUUCg | 2501 | ABE |
| GPTL | 708 | CCTGAGT | | UUUUAGagcuaGaaauagcaaGUUaAa | | |
| 3 | | AACTTTC | | AuAaggcuaGUccGUUAucAAcuuGaa | | |
| | | | | aaagugGcaccgagucggugcusususuUUU | | |
| | | | | -3′ | | |
| mcPC | GA00 | CAGGTTC | 81 | 5′csasgGUUCCAUGGGAUGCUCUg | 2502 | SpCas |
| SK9 | 709 | CATGGG | | UUUUAGagcuaGaaauagcaaGUUaAa | | 9 |
| | | ATGCTCT | | AuAaggcuaGUccGUUAucAAcuuGaa | | |
| | | | | aaagugGcaccgagucggugcusususuUUU | | |
| | | | | -3′ | | |
| mcPC | GA00 | CAGGTTC | 81 | 5′csasgGUUCCAUGGGAUGCUCUg | 2503 | SpCas |
| SK9 | 710 | CATGGG | | UUUUAGagcuagaaauagcaaGUUaAaA | | 9 |
| | | ATGCTCT | | uAaggCUaGUCcGUUAucAAcuuGaa | | |
| | | | | aaaguGgcaccgAgUCggugcusususuUU | | |
| | | | | U-3′ | | |
| mcPC | GA00 | CAGGTTC | 81 | 5′csasgGUUCCAUGGGAUGCUCUg | 2504 | SpCas |
| SK9 | 711 | CATGGG | | UUUUAGagcuagaaauagcaaGUUaAaA | | 9 |
| | | ATGCTCT | | uAaggcuaGUccGUUAucAAcuuGaaaa | | |
| | | | | aguGgcaccgAgUCggugcusususuUUU- | | |
| | | | | 3′ | | |
| mcPC | GA00 | CAGGTTC | 81 | 5′csasgGUUCCAUGGGAUGCUCUg | 2505 | SpCas |
| SK9 | 712 | CATGGG | | UUUUAGagcuagaaauagcaaGUUaAaA | | 9 |
| | | ATGCTCT | | uAaggCUaGUCcGUUAucAAcuugaaa | | |
| | | | | aaguGgcaccgAgUCggugcusususuUUU | | |
| | | | | -3′ | | |
| mcPC | GA00 | CAGGTTC | 81 | 5csasgGUUCCAUGGGAUGCUCUg | 1725 | SpCas |
| SK9 | 713 | CATGGG | | UUUUAGagcuagaaauagcaaGUUaAaA | | 9 |
| | | ATGCTCT | | uAaggCUaGUCcGUUAucAAcuugaaa | | |
| | | | | aaguGgcaccgAgUcggugcusususuUUU | | |
| | | | | -3′ | | |
| mcPC | GA00 | CAGGTTC | 81 | 5′csasgGUUCCAUGGGAUGCUCUg | 2504 | SpCas |
| SK9 | 714 | CATGGG | | UUUUAGagcuagaaauagcaaGUUaAaA | | 9 |
| | | ATGCTCT | | uAaggcuaGUccGUUAucAAcuuGaaaa | | |
| | | | | aguGgcaccgAgUCggugcusususuUUU- | | |
| | | | | 3′ | | |
| mcPC | GA00 | CAGGTTC | 81 | 5′csasgGUUCCAUGGGAUGCUCUg | 2506 | SpCas |
| SK9 | 715 | CATGGG | | UUUUAGagcuaGaaauagcaaGUUaAa | | 9 |
| | | ATGCTCT | | AuAaggCUaGUCcGUUAucAAcuuga | | |
| | | | | aaaaguGgcaccgAgUCggugcusususuU | | |
| | | | | UU-3′ | | |
| mcPC | GA00 | CAGGTTC | 81 | 5′csasgGUUCCAUGGGAUGCUCUg | 2507 | SpCas |
| SK9 | 716 | CATGGG | | UUUUAGagcuaGaaauagcaaGUUaAa | | 9 |
| | | ATGCTCT | | AuAaggCUaGUCcGUUAucAAcuuga | | |
| | | | | aaaaguGgcaccgAgUcggugcusususuUU | | |
| | | | | U-3′ | | |
| mcPC | GA00 | CAGGTTC | 81 | 5′csasgGUUCCAUGGGAUGCUCUg | 2508 | SpCas |
| SK9 | 717 | CATGGG | | UUUUAGagcuaGaaauagcaaGUUaAa | | 9 |
| | | ATGCTCT | | AuAaggcuaGUccGUUAucAAcuuGaa | | |
| | | | | aaaguGgcaccgAgUCggugcusususuUU | | |
| | | | | U-3′ | | |
| mPCS | GA00 | CCCATAC | 69 | 5′cscscAUACCUUGGAGCAACGGg | 1726 | ABE |
| K9 | 718 | CTTGGA | | UUUUAGagcuaGaaauagcaaGUUaAa | | |
| | | GCAACG | | AuAaggCUaGUCcGUUsAucAAcuuG | | |
| | | G | | aaaaaguGgcaccgAgUCggugcusususuU | | |
| | | | | UU-3′ | | |
| mPCS | GA00 | CCCATAC | 69 | 5′cscscAUACCUUGGAGCAACGGg | 2509 | ABE |
| K9 | 719 | CTTGGA | | UUUUAGagcuagaaauagcaaGUUaAaA | | |
| | | GCAACG | | uAaggcuaGUccGUUsAucAAcuugaaaa | | |
| | | G | | agugGcaccgagucggugcusususuUUU-3′ | | |
| mPCS | GA00 | CCCATAC | 69 | 5′cscscAUACCUUGGAGCAACGGg | 2510 | ABE |
| K9 | 720 | CTTGGA | | UUUUAGagcuaGaaauagcaaGUUaAa | | |
| | | GCAACG | | AuAaggcuaGUccGUUsAucAAcuuGa | | |
| | | G | | aaaagugGcaccgagucggugcusususuUU | | |
| | | | | U-3′ | | |
| mAN | GA00 | GAGATA | 241 | 5′gsasgAUACCUGAGUAACUUUCg | 1727 | ABE |
| GPTL | 721 | CCTGAGT | | UUUUAGagcuaGaaauagcaaGUUaAa | | |
| 3 | | AACTTTC | | AuAaggCUaGUCcGUUsAucAAcuuG | | |
| | | | | aaaaaguGgcaccgAgUCggugcusususuU | | |
| | | | | UU-3′ | | |
| mAN | GA00 | GAGATA | 241 | 5′gsasgAUACCUGAGUAACUUUCg | 2511 | ABE |
| GPTL | 722 | CCTGAGT | | UUUUAGagcuagaaauagcaaGUUaAaA | | |
| 3 | | AACTTTC | | uAaggcuaGUccGUUsAucAAcuugaaaa | | |
| | | | | agugGcaccgagucggugcusususuUUU-3′ | | |
| mAN | GA00 | GAGATA | 241 | 5′gsasgAUACCUGAGUAACUUUCg | 2512 | ABE |
| GPTL | 723 | CCTGAGT | | UUUUAGagcuaGaaauagcaaGUUaAa | | |
| 3 | | AACTTTC | | AuAaggcuaGUccGUUsAucAAcuuGa | | |
| | | | | aaaagugGcaccgagucggugcusususuUU | | |
| | | | | U-3′ | | |
| mcPC | GA00 | CAGGTTC | 81 | 5′csasgGUUCCAUGGGAUGCUCUg | 1728 | SpCas |
| SK9 | 724 | CATGGG | | UUUUAGagcuaGaaauagcaaGUUaAa | | 9 |
| | | ATGCTCT | | AuAaggcuaGUccGUUsAucAAcuuGa | | |
| | | | | aaaagugGcaccgagucggugcusususuUU | | |
| | | | | U-3′ | | |
| mcPC | GA00 | CAGGTTC | 81 | 5′csasgGUUCCAUGGGAUGCUCUg | 2513 | SpCas |
| SK9 | 725 | CATGGG | | UUUUAGagcuagaaauagcaaGUUaAaA | | 9 |
| | | ATGCTCT | | uAaggCUaGUCcGUUsAucAAcuuGaa | | |
| | | | | aaaguGgcaccgAgUCggugcusususuUU | | |
| | | | | U-3′ | | |
| mcPC | GA00 | CAGGTTC | 81 | 5′csasgGUUCCAUGGGAUGCUCUg | 2514 | SpCas |
| SK9 | 726 | CATGGG | | UUUUAGagcuagaaauagcaaGUUaAaA | | 9 |
| | | ATGCTCT | | uAaggcuaGUccGUUsAucAAcuuGaaa | | |
| | | | | aaguGgcaccgAgUCggugcusususuUUU | | |
| | | | | -3′ | | |
| mcPC | GA00 | CAGGTTC | 81 | 5′csasgGUUCCAUGGGAUGCUCUg | 2515 | SpCas |
| SK9 | 727 | CATGGG | | UUUUAGagcuagaaauagcaaGUUaAaA | | 9 |
| | | ATGCTCT | | uAaggCUaGUCcGUUsAucAAcuugaa | | |
| | | | | aaaguGgcaccgAgUCggugcusususuUU | | |
| | | | | U-3′ | | |
| mcPC | GA00 | CAGGTTC | 81 | 5′csasgGUUCCAUGGGAUGCUCUg | 2516 | SpCas |
| SK9 | 728 | CATGGG | | UUUUAGagcuagaaauagcaaGUUaAaA | | 9 |
| | | ATGCTCT | | uAaggCUaGUCcGUUsAucAAcuugaa | | |
| | | | | aaaguGgcaccgAgUcggugcusususuUU | | |
| | | | | U-3′ | | |
| mcPC | GA00 | CAGGTTC | 81 | 5′csasgGUUCCAUGGGAUGCUCUg | 2514 | SpCas |
| SK9 | 729 | CATGGG | | UUUUAGagcuagaaauagcaaGUUaAaA | | 9 |
| | | ATGCTCT | | uAaggcuaGUccGUUsAucAAcuuGaaa | | |
| | | | | aaguGgcaccgAgUCggugcusususuUUU | | |
| | | | | -3′ | | |
| mcPC | GA00 | CAGGTTC | 81 | 5′csasgGUUCCAUGGGAUGCUCUg | 2517 | SpCas |
| SK9 | 730 | CATGGG | | UUUUAGagcuaGaaauagcaaGUUaAa | | 9 |
| | | ATGCTCT | | AuAaggCUaGUCcGUUsAucAAcuug | | |
| | | | | aaaaaguGgcaccgAgUCggugcusususuU | | |
| | | | | UU-3′ | | |
| mcPC | GA00 | CAGGTTC | 81 | 5′csasgGUUCCAUGGGAUGCUCUg | 2518 | SpCas |
| SK9 | 731 | CATGGG | | UUUUAGagcuaGaaauagcaaGUUaAa | | 9 |
| | | ATGCTCT | | AuAaggCUaGUCcGUUsAucAAcuug | | |
| | | | | aaaaaguGgcaccgAgUcggugcusususuU | | |
| | | | | UU-3′ | | |
| mcPC | GA00 | CAGGTTC | 81 | 5′csasgGUUCCAUGGGAUGCUCUg | 2519 | SpCas |
| SK9 | 732 | CATGGG | | UUUUAGagcuaGaaauagcaaGUUaAa | | 9 |
| | | ATGCTCT | | AuAaggcuaGUccGUUsAucAAcuuGa | | |
| | | | | aaaaguGgcaccgAgUCggugcusususuU | | |
| | | | | UU-3′ | | |
| mPCS | GA00 | CCCATAC | 69 | 5′cscscAUACCUUGGAGCAACGGg | 1729 | ABE |
| K9 | 733 | CTTGGA | | UUUUAGagcuaGaaauagcaaGUUsaAa | | |
| | | GCAACG | | AuAaggCUaGUCcGUUAucAAcuuGa | | |
| | | G | | aaaaguGgcaccgAgUCggugcusususuU | | |
| | | | | UU-3′ | | |
| mPCS | GA00 | CCCATAC | 69 | 5′cscscAUACCUUGGAGCAACGGg | 2520 | ABE |
| K9 | 734 | CTTGGA | | UUUUAGagcuagaaauagcaaGUUsaAa | | |
| | | GCAACG | | AuAaggcuaGUccGUUAucAAcuugaaa | | |
| | | G | | aagugGcaccgagucggugcusususuUUU- | | |
| | | | | 3′ | | |
| mPCS | GA00 | CCCATAC | 69 | 5′cscscAUACCUUGGAGCAACGGg | 2521 | ABE |
| K9 | 735 | CTTGGA | | UUUUAGagcuaGaaauagcaaGUUsaAa | | |
| | | GCAACG | | AuAaggcuaGUccGUUAucAAcuuGaa | | |
| | | G | | aaagugGcaccgagucggugcusususuUUU | | |
| | | | | -3′ | | |
| mAN | GA00 | GAGATA | 241 | 5′gsasgAUACCUGAGUAACUUUCg | 1730 | ABE |
| GPTL | 736 | CCTGAGT | | UUUUAGagcuaGaaauagcaaGUUsaAa | | |
| 3 | | AACTTTC | | AuAaggCUaGUCcGUUAucAAcuuGa | | |
| | | | | aaaaguGgcaccgAgUCggugcusususuU | | |
| | | | | UU-3′ | | |
| mAN | GA00 | GAGATA | 241 | 5′gsasgAUACCUGAGUAACUUUCg | 2522 | ABE |
| GPTL | 737 | CCTGAGT | | UUUUAGagcuagaaauagcaaGUUsaAa | | |
| 3 | | AACTTTC | | AuAaggcuaGUccGUUAucAAcuugaaa | | |
| | | | | aagugGcaccgagucggugcusususuUUU- | | |
| | | | | 3′ | | |
| mAN | GA00 | GAGATA | 241 | 5′gsasgAUACCUGAGUAACUUUCg | 2523 | ABE |
| GPTL | 738 | CCTGAGT | | UUUUAGagcuaGaaauagcaaGUUsaAa | | |
| 3 | | AACTTTC | | AuAaggcuaGUccGUUAucAAcuuGaa | | |
| | | | | aaagugGcaccgagucggugcusususuUUU | | |
| | | | | -3′ | | |
| mcPC | GA00 | CAGGTTC | 81 | 5′csasgGUUCCAUGGGAUGCUCUg | 1731 | SpCas |
| SK9 | 739 | CATGGG | | UUUUAGagcuaGaaauagcaaGUUsaAa | | 9 |
| | | ATGCTCT | | AuAaggcuaGUccGUUAucAAcuuGaa | | |
| | | | | aaagugGcaccgagucggugcusususuUUU | | |
| | | | | -3′ | | |
| mcPC | GA00 | CAGGTTC | 81 | 5′csasgGUUCCAUGGGAUGCUCUg | 2524 | SpCas |
| SK9 | 740 | CATGGG | | UUUUAGagcuagaaauagcaaGUUsaAa | | 9 |
| | | ATGCTCT | | AuAaggCUaGUCcGUUAucAAcuuGa | | |
| | | | | aaaaguGgcaccgAgUCggugcusususuU | | |
| | | | | UU-3′ | | |
| mcPC | GA00 | CAGGTTC | 81 | 5′csasgGUUCCAUGGGAUGCUCUg | 2525 | SpCas |
| SK9 | 741 | CATGGG | | UUUUAGagcuagaaauagcaaGUUsaAa | | 9 |
| | | ATGCTCT | | AuAaggcuaGUccGUUAucAAcuuGaa | | |
| | | | | aaaguGgcaccgAgUCggugcusususuUU | | |
| | | | | U-3′ | | |
| mcPC | GA00 | CAGGTTC | 81 | 5′csasgGUUCCAUGGGAUGCUCUg | 2526 | SpCas |
| SK9 | 742 | CATGGG | | UUUUAGagcuagaaauagcaaGUUsaAa | | 9 |
| | | ATGCTCT | | AuAaggCUaGUCcGUUAucAAcuuga | | |
| | | | | aaaaguGgcaccgAgUCggugcusususuU | | |
| | | | | UU-3′ | | |
| mcPC | GA00 | CAGGTTC | 81 | 5′csasgGUUCCAUGGGAUGCUCUg | 2527 | SpCas |
| SK9 | 743 | CATGGG | | UUUUAGagcuagaaauagcaaGUUsaAa | | 9 |
| | | ATGCTCT | | AuAaggCUaGUCcGUUAucAAcuuga | | |
| | | | | aaaaguGgcaccgAgUcggugcusususuUU | | |
| | | | | U-3′ | | |
| mcPC | GA00 | CAGGTTC | 81 | 5′csasgGUUCCAUGGGAUGCUCUg | 2525 | SpCas |
| SK9 | 744 | CATGGG | | UUUUAGagcuagaaauagcaaGUUsaAa | | 9 |
| | | ATGCTCT | | AuAaggcuaGUccGUUAucAAcuuGaa | | |
| | | | | aaaguGgcaccgAgUCggugcusususuUU | | |
| | | | | U-3′ | | |
| mcPC | GA00 | CAGGTTC | 81 | 5′csasgGUUCCAUGGGAUGCUCUg | 2528 | SpCas |
| SK9 | 745 | CATGGG | | UUUUAGagcuaGaaauagcaaGUUsaAa | | 9 |
| | | ATGCTCT | | AuAaggCUaGUCcGUUAucAAcuuga | | |
| | | | | aaaaguGgcaccgAgUCggugcusususuU | | |
| | | | | UU-3′ | | |
| mcPC | GA00 | CAGGTTC | 81 | 5′csasgGUUCCAUGGGAUGCUCUg | 2529 | SpCas |
| SK9 | 746 | CATGGG | | UUUUAGagcuaGaaauagcaaGUUsaAa | | 9 |
| | | ATGCTCT | | AuAaggCUaGUCcGUUAucAAcuuga | | |
| | | | | aaaaguGgcaccgAgUcggugcusususuUU | | |
| | | | | U-3′ | | |
| mcPC | GA00 | CAGGTTC | 81 | 5′csasgGUUCCAUGGGAUGCUCUg | 2530 | SpCas |
| SK9 | 747 | CATGGG | | UUUUAGagcuaGaaauagcaaGUUsaAa | | 9 |
| | | ATGCTCT | | AuAaggcuaGUccGUUAucAAcuuGaa | | |
| | | | | aaaguGgcaccgAgUCggugcusususuUU | | |
| | | | | U-3′ | | |
| mPCS | GA00 | CCCATAC | 69 | 5′cscscAUACCUUGGAGCAACGGg | 1732 | ABE |
| K9 | 748 | CTTGGA | | UUUUsAGagcuaGaaauagcaaGUUaAa | | |
| | | GCAACG | | AuAaggCUaGUCcGUUAucAAcuuGa | | |
| | | G | | aaaaguGgcaccgAgUCggugcusususuU | | |
| | | | | UU-3′ | | |
| mPCS | GA00 | CCCATAC | 69 | 5′cscscAUACCUUGGAGCAACGGg | 2531 | ABE |
| K9 | 749 | CTTGGA | | UUUUsAGagcuagaaauagcaaGUUaAa | | |
| | | GCAACG | | AuAaggcuaGUccGUUAucAAcuugaaa | | |
| | | G | | aagugGcaccgagucggugcusususuUUU- | | |
| | | | | 3′ | | |
| mPCS | GA00 | CCCATAC | 69 | 5′cscscAUACCUUGGAGCAACGGg | 2532 | ABE |
| K9 | 750 | CTTGGA | | UUUUsAGagcuaGaaauagcaaGUUaAa | | |
| | | GCAACG | | AuAaggcuaGUccGUUAucAAcuuGaa | | |
| | | G | | aaagugGcaccgagucggugcusususuUUU | | |
| | | | | -3′ | | |
| mAN | GA00 | GAGATA | 241 | 5′gsasgAUACCUGAGUAACUUUCg | 1733 | ABE |
| GPTL | 751 | CCTGAGT | | UUUUsAGagcuaGaaauagcaaGUUaAa | | |
| 3 | | AACTTTC | | AuAaggCUaGUCcGUUAucAAcuuGa | | |
| | | | | aaaaguGgcaccgAgUCggugcusususuU | | |
| | | | | UU-3′ | | |
| mAN | GA00 | GAGATA | 241 | 5′gsasgAUACCUGAGUAACUUUCg | 2533 | ABE |
| GPTL | 752 | CCTGAGT | | UUUUsAGagcuagaaauagcaaGUUaAa | | |
| 3 | | AACTTTC | | AuAaggcuaGUccGUUAucAAcuugaaa | | |
| | | | | aagugGcaccgagucggugcusususuUUU- | | |
| | | | | 3′ | | |
| mAN | GA00 | GAGATA | 241 | 5′gsasgAUACCUGAGUAACUUUCg | 2534 | ABE |
| GPTL | 753 | CCTGAGT | | UUUUsAGagcuaGaaauagcaaGUUaAa | | |
| 3 | | AACTTTC | | AuAaggcuaGUccGUUAucAAcuuGaa | | |
| | | | | aaagugGcaccgagucggugcusususuUUU | | |
| | | | | -3′ | | |
| mcPC | GA00 | CAGGTTC | 81 | 5′csasgGUUCCAUGGGAUGCUCUg | 1734 | SpCas |
| SK9 | 754 | CATGGG | | UUUUsAGagcuaGaaauagcaaGUUaAa | | 9 |
| | | ATGCTCT | | AuAaggcuaGUccGUUAucAAcuuGaa | | |
| | | | | aaagugGcaccgagucggugcusususuUUU | | |
| | | | | -3′ | | |
| mcPC | GA00 | CAGGTTC | 81 | 5′csasgGUUCCAUGGGAUGCUCUg | 2535 | SpCas |
| SK9 | 755 | CATGGG | | UUUUsAGagcuagaaauagcaaGUUaAa | | 9 |
| | | ATGCTCT | | AuAaggCUaGUCcGUUAucAAcuuGa | | |
| | | | | aaaaguGgcaccgAgUCggugcusususuU | | |
| | | | | UU-3′ | | |
| mcPC | GA00 | CAGGTTC | 81 | 5′csasgGUUCCAUGGGAUGCUCUg | 2536 | SpCas |
| SK9 | 756 | CATGGG | | UUUUsAGagcuagaaauagcaaGUUaAa | | 9 |
| | | ATGCTCT | | AuAaggcuaGUccGUUAucAAcuuGaa | | |
| | | | | aaaguGgcaccgAgUCggugcusususuUU | | |
| | | | | U-3′ | | |
| mcPC | GA00 | CAGGTTC | 81 | 5′csasgGUUCCAUGGGAUGCUCUg | 2537 | SpCas |
| SK9 | 757 | CATGGG | | UUUUsAGagcuagaaauagcaaGUUaAa | | 9 |
| | | ATGCTCT | | AuAaggCUaGUCcGUUAucAAcuuga | | |
| | | | | aaaaguGgcaccgAgUCggugcusususuU | | |
| | | | | UU-3′ | | |
| mcPC | GA00 | CAGGTTC | 81 | 5′csasgGUUCCAUGGGAUGCUCUg | 2538 | SpCas |
| SK9 | 758 | CATGGG | | UUUUsAGagcuagaaauagcaaGUUaAa | | 9 |
| | | ATGCTCT | | AuAaggCUaGUCcGUUAucAAcuuga | | |
| | | | | aaaaguGgcaccgAgUcggugcusususuUU | | |
| | | | | U-3′ | | |
| mcPC | GA00 | CAGGTTC | 81 | 5′csasgGUUCCAUGGGAUGCUCUg | 2536 | SpCas |
| SK9 | 759 | CATGGG | | UUUUsAGagcuagaaauagcaaGUUaAa | | 9 |
| | | ATGCTCT | | AuAaggcuaGUccGUUAucAAcuuGaa | | |
| | | | | aaaguGgcaccgAgUCggugcusususuUU | | |
| | | | | U-3′ | | |
| mcPC | GA00 | CAGGTTC | 81 | 5′csasgGUUCCAUGGGAUGCUCUg | 2539 | SpCas |
| SK9 | 760 | CATGGG | | UUUUsAGagcuaGaaauagcaaGUUaAa | | 9 |
| | | ATGCTCT | | AuAaggCUaGUCcGUUAucAAcuuga | | |
| | | | | aaaaguGgcaccgAgUCggugcusususuU | | |
| | | | | UU-3′ | | |
| mcPC | GA00 | CAGGTTC | 81 | 5′csasgGUUCCAUGGGAUGCUCUg | 2540 | SpCas |
| SK9 | 761 | CATGGG | | UUUUsAGagcuaGaaauagcaaGUUaAa | | 9 |
| | | ATGCTCT | | AuAaggCUaGUCcGUUAucAAcuuga | | |
| | | | | aaaaguGgcaccgAgUcggugcusususuUU | | |
| | | | | U-3 | | |
| mcPC | GA00 | CAGGTTC | 81 | 5′csasgGUUCCAUGGGAUGCUCUg | 2541 | SpCas |
| SK9 | 762 | CATGGG | | UUUUsAGagcuaGaaauagcaaGUUaAa | | 9 |
| | | ATGCTCT | | AuAaggcuaGUccGUUAucAAcuuGaa | | |
| | | | | aaaguGgcaccgAgUCggugcusususuUU | | |
| | | | | U-3′ | | |
| mPCS | GA00 | CCCATAC | 69 | 5′cscscAUACCUUGGAGCAACGGg | 1735 | ABE |
| K9 | 763 | CTTGGA | | UUUUAGagcuaGaaauagcaaGUUsaAa | | |
| | | GCAACG | | AuAaggCUaGUCcGUUsAucAAcuuG | | |
| | | G | | aaaaaguGgcaccgAgUCggugcusususuU | | |
| | | | | UU-3′ | | |
| mPCS | GA00 | CCCATAC | 69 | 5′cscscAUACCUUGGAGCAACGGg | 2542 | ABE |
| K9 | 764 | CTTGGA | | UUUUAGagcuagaaauagcaaGUUsaAa | | |
| | | GCAACG | | AuAaggcuaGUccGUUsAucAAcuugaa | | |
| | | G | | aaagugGcaccgagucggugcusususuUUU | | |
| | | | | -3′ | | |
| mPCS | GA00 | CCCATAC | 69 | 5′cscscAUACCUUGGAGCAACGGg | 2543 | ABE |
| K9 | 765 | CTTGGA | | UUUUAGagcuaGaaauagcaaGUUsaAa | | |
| | | GCAACG | | AuAaggcuaGUccGUUsAucAAcuuGa | | |
| | | G | | aaaagugGcaccgagucggugcusususuUU | | |
| | | | | U-3′ | | |
| mAN | GA00 | GAGATA | 241 | 5′gsasgAUACCUGAGUAACUUUCg | 1736 | ABE |
| GPTL | 766 | CCTGAGT | | UUUUAGagcuaGaaauagcaaGUUsaAa | | |
| 3 | | AACTTTC | | AuAaggCUaGUCcGUUsAucAAcuuG | | |
| | | | | aaaaaguGgcaccgAgUCggugcusususuU | | |
| | | | | UU-3 | | |
| mAN | GA00 | GAGATA | 241 | 5′gsasgAUACCUGAGUAACUUUCg | 2544 | ABE |
| GPTL | 767 | CCTGAGT | | UUUUAGagcuagaaauagcaaGUUsaAa | | |
| 3 | | AACTTTC | | AuAaggcuaGUccGUUsAucAAcuugaa | | |
| | | | | aaagugGcaccgagucggugcusususuUUU | | |
| | | | | -3′ | | |
| mAN | GA00 | GAGATA | 241 | 5′gsasgAUACCUGAGUAACUUUCg | 2545 | ABE |
| GPTL | 768 | CCTGAGT | | UUUUAGagcuaGaaauagcaaGUUsaAa | | |
| 3 | | AACTTTC | | AuAaggcuaGUccGUUsAucAAcuuGa | | |
| | | | | aaaagugGcaccgagucggugcusususuUU | | |
| | | | | U-3 | | |
| mcPC | GA00 | CAGGTTC | 81 | 5′csasgGUUCCAUGGGAUGCUCUg | 1737 | SpCas |
| SK9 | 769 | CATGGG | | UUUUAGagcuaGaaauagcaaGUUsaAa | | 9 |
| | | ATGCTCT | | AuAaggcuaGUccGUUsAucAAcuuGa | | |
| | | | | aaaagugGcaccgagucggugcusususuUU | | |
| | | | | U-3′ | | |
| mcPC | GA00 | CAGGTTC | 81 | 5′csasgGUUCCAUGGGAUGCUCUg | 2546 | SpCas |
| SK9 | 770 | CATGGG | | UUUUAGagcuagaaauagcaaGUUsaAa | | 9 |
| | | ATGCTCT | | AuAaggCUaGUCcGUUsAucAAcuuG | | |
| | | | | aaaaaguGgcaccgAgUCggugcusususuU | | |
| | | | | UU-3′ | | |
| mcPC | GA00 | CAGGTTC | 81 | 5′csasgGUUCCAUGGGAUGCUCUg | 2547 | SpCas |
| SK9 | 771 | CATGGG | | UUUUAGagcuagaaauagcaaGUUsaAa | | 9 |
| | | ATGCTCT | | AuAaggcuaGUccGUUsAucAAcuuGa | | |
| | | | | aaaaguGgcaccgAgUCggugcusususuU | | |
| | | | | UU-3′ | | |
| mcPC | GA00 | CAGGTTC | 81 | 5′csasgGUUCCAUGGGAUGCUCUg | 2548 | SpCas |
| SK9 | 772 | CATGGG | | UUUUAGagcuagaaauagcaaGUUsaAa | | 9 |
| | | ATGCTCT | | AuAaggCUaGUCcGUUsAucAAcuug | | |
| | | | | aaaaaguGgcaccgAgUCggugcusususuU | | |
| | | | | UU-3′ | | |
| mcPC | GA00 | CAGGTTC | 81 | 5′csasgGUUCCAUGGGAUGCUCUg | 2549 | SpCas |
| SK9 | 773 | CATGGG | | UUUUAGagcuagaaauagcaaGUUsaAa | | 9 |
| | | ATGCTCT | | AuAaggCUaGUCcGUUsAucAAcuug | | |
| | | | | aaaaaguGgcaccgAgUcggugcusususuU | | |
| | | | | UU-3′ | | |
| mcPC | GA00 | CAGGTTC | 81 | 5′csasgGUUCCAUGGGAUGCUCUg | 2547 | SpCas |
| SK9 | 774 | CATGGG | | UUUUAGagcuagaaauagcaaGUUsaAa | | 9 |
| | | ATGCTCT | | AuAaggcuaGUccGUUsAucAAcuuGa | | |
| | | | | aaaaguGgcaccgAgUCggugcusususuU | | |
| | | | | UU-3′ | | |
| mcPC | GA00 | CAGGTTC | 81 | 5′csasgGUUCCAUGGGAUGCUCUg | 2550 | SpCas |
| SK9 | 775 | CATGGG | | UUUUAGagcuaGaaauagcaaGUUsaAa | | 9 |
| | | ATGCTCT | | AuAaggCUaGUCcGUUsAucAAcuug | | |
| | | | | aaaaaguGgcaccgAgUCggugcusususuU | | |
| | | | | UU-3′ | | |
| mcPC | GA00 | CAGGTTC | 81 | 5′csasgGUUCCAUGGGAUGCUCUg | 2551 | SpCas |
| SK9 | 776 | CATGGG | | UUUUAGagcuaGaaauagcaaGUUsaAa | | 9 |
| | | ATGCTCT | | AuAaggCUaGUCcGUUsAucAAcuug | | |
| | | | | aaaaaguGgcaccgAgUcggugcusususuU | | |
| | | | | UU-3′ | | |
| mcPC | GA00 | CAGGTTC | 81 | 5′csasgGUUCCAUGGGAUGCUCUg | 2552 | SpCas |
| SK9 | 777 | CATGGG | | UUUUAGagcuaGaaauagcaaGUUsaAa | | 9 |
| | | ATGCTCT | | AuAaggcuaGUccGUUsAucAAcuuGa | | |
| | | | | aaaaguGgcaccgAgUCggugcusususuU | | |
| | | | | UU-3′ | | |
| mPCS | GA00 | CCCATAC | 69 | 5′cscscAUACCUUGGAGCAACGGg | 1738 | ABE |
| K9 | 778 | CTTGGA | | UUUUsAGagcuaGaaauagcaaGUUsaA | | |
| | | GCAACG | | aAuAaggCUaGUCcGUUAucAAcuuG | | |
| | | G | | aaaaaguGgcaccgAgUCggugcusususuU | | |
| | | | | UU-3′ | | |
| mPCS | GA00 | CCCATAC | 69 | 5′cscscAUACCUUGGAGCAACGGg | 2553 | ABE |
| K9 | 779 | CTTGGA | | UUUUsAGagcuagaaauagcaaGUUsaA | | |
| | | GCAACG | | aAuAaggcuaGUccGUUAucAAcuugaa | | |
| | | G | | aaagugGcaccgagucggugcusususuUUU | | |
| | | | | -3′ | | |
| mPCS | GA00 | CCCATAC | 69 | 5′cscscAUACCUUGGAGCAACGGg | 2554 | ABE |
| K9 | 780 | CTTGGA | | UUUUsAGagcuaGaaauagcaaGUUsaA | | |
| | | GCAACG | | aAuAaggcuaGUccGUUAucAAcuuGa | | |
| | | G | | aaaagugGcaccgagucggugcusususuUU | | |
| | | | | U-3′ | | |
| mAN | GA00 | GAGATA | 241 | 5′gsasgAUACCUGAGUAACUUUCg | 1739 | ABE |
| GPTL | 781 | CCTGAGT | | UUUUsAGagcuaGaaauagcaaGUUsaA | | |
| 3 | | AACTTTC | | aAuAaggCUaGUCcGUUAucAAcuuG | | |
| | | | | aaaaaguGgcaccgAgUCggugcusususuU | | |
| | | | | UU-3′ | | |
| mAN | GA00 | GAGATA | 241 | 5′gsasgAUACCUGAGUAACUUUCg | 2555 | ABE |
| GPTL | 782 | CCTGAGT | | UUUUsAGagcuagaaauagcaaGUUsaA | | |
| 3 | | AACTTTC | | aAuAaggcuaGUccGUUAucAAcuugaa | | |
| | | | | aaagugGcaccgagucggugcusususuUUU | | |
| | | | | -3′ | | |
| mAN | GA00 | GAGATA | 241 | 5′gsasgAUACCUGAGUAACUUUCg | 2556 | ABE |
| GPTL | 783 | CCTGAGT | | UUUUsAGagcuaGaaauagcaaGUUsaA | | |
| 3 | | AACTTTC | | aAuAaggcuaGUccGUUAucAAcuuGa | | |
| | | | | aaaagugGcaccgagucggugcusususuUU | | |
| | | | | U-3′ | | |
| mcPC | GA00 | CAGGTTC | 81 | 5′csasgGUUCCAUGGGAUGCUCUg | 1740 | SpCas |
| SK9 | 784 | CATGGG | | UUUUsAGagcuaGaaauagcaaGUUsaA | | 9 |
| | | ATGCTCT | | aAuAaggcuaGUccGUUAucAAcuuGa | | |
| | | | | aaaagugGcaccgagucggugcusususuUU | | |
| | | | | U-3′ | | |
| mcPC | GA00 | CAGGTTC | 81 | 5′csasgGUUCCAUGGGAUGCUCUg | 2557 | SpCas |
| SK9 | 785 | CATGGG | | UUUUsAGagcuagaaauagcaaGUUsaA | | 9 |
| | | ATGCTCT | | aAuAaggCUaGUCcGUUAucAAcuuG | | |
| | | | | aaaaaguGgcaccgAgUCggugcusususuU | | |
| | | | | UU-3′ | | |
| mcPC | GA00 | CAGGTTC | 81 | 5′csasgGUUCCAUGGGAUGCUCUg | 2558 | SpCas |
| SK9 | 786 | CATGGG | | UUUUsAGagcuagaaauagcaaGUUsaA | | 9 |
| | | ATGCTCT | | aAuAaggcuaGUccGUUAucAAcuuGa | | |
| | | | | aaaaguGgcaccgAgUCggugcusususuU | | |
| | | | | UU-3′ | | |
| mcPC | GA00 | CAGGTTC | 81 | 5′csasgGUUCCAUGGGAUGCUCUg | 2559 | SpCas |
| SK9 | 787 | CATGGG | | UUUUsAGagcuagaaauagcaaGUUsaA | | 9 |
| | | ATGCTCT | | aAuAaggCUaGUCcGUUAucAAcuug | | |
| | | | | aaaaaguGgcaccgAgUCggugcusususuU | | |
| | | | | UU-3′ | | |
| mcPC | GA00 | CAGGTTC | 81 | 5′csasgGUUCCAUGGGAUGCUCUg | 2560 | SpCas |
| SK9 | 788 | CATGGG | | UUUUsAGagcuagaaauagcaaGUUsaA | | 9 |
| | | ATGCTCT | | aAuAaggCUaGUCcGUUAucAAcuug | | |
| | | | | aaaaaguGgcaccgAgUcggugcusususuU | | |
| | | | | UU-3′ | | |
| mcPC | GA00 | CAGGTTC | 81 | 5′csasgGUUCCAUGGGAUGCUCUg | 2558 | SpCas |
| SK9 | 789 | CATGGG | | UUUUsAGagcuagaaauagcaaGUUsaA | | 9 |
| | | ATGCTCT | | aAuAaggcuaGUccGUUAucAAcuuGa | | |
| | | | | aaaaguGgcaccgAgUCggugcusususuU | | |
| | | | | UU-3′ | | |
| mcPC | GA00 | CAGGTTC | 81 | 5′csasgGUUCCAUGGGAUGCUCUg | 2561 | SpCas |
| SK9 | 790 | CATGGG | | UUUUsAGagcuaGaaauagcaaGUUsaA | | 9 |
| | | ATGCTCT | | aAuAaggCUaGUCcGUUAucAAcuug | | |
| | | | | aaaaaguGgcaccgAgUCggugcusususuU | | |
| | | | | UU-3′ | | |
| mcPC | GA00 | CAGGTTC | 81 | 5′csasgGUUCCAUGGGAUGCUCUg | 2562 | SpCas |
| SK9 | 791 | CATGGG | | UUUUsAGagcuaGaaauagcaaGUUsaA | | 9 |
| | | ATGCTCT | | aAuAaggCUaGUCcGUUAucAAcuug | | |
| | | | | aaaaaguGgcaccgAgUcggugcusususuU | | |
| | | | | UU-3′ | | |
| mcPC | GA00 | CAGGTTC | 81 | 5′csasgGUUCCAUGGGAUGCUCUg | 2563 | SpCas |
| SK9 | 792 | CATGGG | | UUUUsAGagcuaGaaauagcaaGUUsaA | | 9 |
| | | ATGCTCT | | aAuAaggcuaGUccGUUAucAAcuuGa | | |
| | | | | aaaaguGgcaccgAgUCggugcusususuU | | |
| | | | | UU-3′ | | |
| mPCS | GA00 | CCCATAC | 69 | 5′cscscAUACCUUGGAGCAACGGg | 1741 | ABE |
| K9 | 793 | CTTGGA | | UUUUsAGagcuaGaaauagcaaGUUaAa | | |
| | | GCAACG | | AuAaggCUaGUCcGUUsAucAAcuuG | | |
| | | G | | aaaaaguGgcaccgAgUCggugcusususuU | | |
| | | | | UU-3′ | | |
| mPCS | GA00 | CCCATAC | 69 | 5′cscscAUACCUUGGAGCAACGGg | 2564 | ABE |
| K9 | 794 | CTTGGA | | UUUUsAGagcuagaaauagcaaGUUaAa | | |
| | | GCAACG | | AuAaggcuaGUccGUUsAucAAcuugaa | | |
| | | G | | aaagugGcaccgagucggugcusususuUUU | | |
| | | | | -3′ | | |
| mPCS | GA00 | CCCATAC | 69 | 5′cscscAUACCUUGGAGCAACGGg | 2565 | ABE |
| K9 | 795 | CTTGGA | | UUUUsAGagcuaGaaauagcaaGUUaAa | | |
| | | GCAACG | | AuAaggcuaGUccGUUsAucAAcuuGa | | |
| | | G | | aaaagugGcaccgagucggugcusususuUU | | |
| | | | | U-3′ | | |
| mAN | GA00 | GAGATA | 241 | 5′gsasgAUACCUGAGUAACUUUCg | 1742 | ABE |
| GPTL | 796 | CCTGAGT | | UUUUsAGagcuaGaaauagcaaGUUaAa | | |
| 3 | | AACTTTC | | AuAaggCUaGUCcGUUsAucAAcuuG | | |
| | | | | aaaaaguGgcaccgAgUCggugcusususuU | | |
| | | | | UU-3′ | | |
| mAN | GA00 | GAGATA | 241 | 5′gsasgAUACCUGAGUAACUUUCg | 2566 | ABE |
| GPTL | 797 | CCTGAGT | | UUUUsAGagcuagaaauagcaaGUUaAa | | |
| 3 | | AACTTTC | | AuAaggcuaGUccGUUsAucAAcuugaa | | |
| | | | | aaagugGcaccgagucggugcusususuUUU | | |
| | | | | -3′ | | |
| mAN | GA00 | GAGATA | 241 | 5′gsasgAUACCUGAGUAACUUUCg | 2567 | ABE |
| GPTL | 798 | CCTGAGT | | UUUUsAGagcuaGaaauagcaaGUUaAa | | |
| 3 | | AACTTTC | | AuAaggcuaGUccGUUsAucAAcuuGa | | |
| | | | | aaaagugGcaccgagucggugcusususuUU | | |
| | | | | U-3′ | | |
| mcPC | GA00 | CAGGTTC | 81 | 5′csasgGUUCCAUGGGAUGCUCUg | 1743 | SpCas |
| SK9 | 799 | CATGGG | | UUUUsAGagcuaGaaauagcaaGUUaAa | | 9 |
| | | ATGCTCT | | AuAaggcuaGUccGUUsAucAAcuuGa | | |
| | | | | aaaagugGcaccgagucggugcusususuUU | | |
| | | | | U-3′ | | |
| mcPC | GA00 | CAGGTTC | 81 | 5′csasgGUUCCAUGGGAUGCUCUg | 2568 | SpCas |
| SK9 | 800 | CATGGG | | UUUUsAGagcuagaaauagcaaGUUaAa | | 9 |
| | | ATGCTCT | | AuAaggCUaGUCcGUUsAucAAcuuG | | |
| | | | | aaaaaguGgcaccgAgUCggugcusususuU | | |
| | | | | UU-3 | | |
| mcPC | GA00 | CAGGTTC | 81 | 5′csasgGUUCCAUGGGAUGCUCUg | 2569 | SpCas |
| SK9 | 801 | CATGGG | | UUUUsAGagcuagaaauagcaaGUUaAa | | 9 |
| | | ATGCTCT | | AuAaggcuaGUccGUUsAucAAcuuGa | | |
| | | | | aaaaguGgcaccgAgUCggugcusususuU | | |
| | | | | UU-3′ | | |
| mcPC | GA00 | CAGGTTC | 81 | 5′csasgGUUCCAUGGGAUGCUCUg | 2570 | SpCas |
| SK9 | 802 | CATGGG | | UUUUsAGagcuagaaauagcaaGUUaAa | | 9 |
| | | ATGCTCT | | AuAaggCUaGUCcGUUsAucAAcuug | | |
| | | | | aaaaaguGgcaccgAgUCggugcusususuU | | |
| | | | | UU-3′ | | |
| mcPC | GA00 | CAGGTTC | 81 | 5′csasgGUUCCAUGGGAUGCUCUg | 2571 | SpCas |
| SK9 | 803 | CATGGG | | UUUUsAGagcuagaaauagcaaGUUaAa | | 9 |
| | | ATGCTCT | | AuAaggCUaGUCcGUUsAucAAcuug | | |
| | | | | aaaaaguGgcaccgAgUcggugcusususuU | | |
| | | | | UU-3′ | | |
| mcPC | GA00 | CAGGTTC | 81 | 5′csasgGUUCCAUGGGAUGCUCUg | 2569 | SpCas |
| SK9 | 804 | CATGGG | | UUUUsAGagcuagaaauagcaaGUUaAa | | 9 |
| | | ATGCTCT | | AuAaggcuaGUccGUUsAucAAcuuGa | | |
| | | | | aaaaguGgcaccgAgUCggugcusususuU | | |
| | | | | UU-3′ | | |
| mcPC | GA00 | CAGGTTC | 81 | 5′csasgGUUCCAUGGGAUGCUCUg | 2572 | SpCas |
| SK9 | 805 | CATGGG | | UUUUsAGagcuaGaaauagcaaGUUaAa | | 9 |
| | | ATGCTCT | | AuAaggCUaGUCcGUUsAucAAcuug | | |
| | | | | aaaaaguGgcaccgAgUCggugcusususuU | | |
| | | | | UU-3′ | | |
| mcPC | GA00 | CAGGTTC | 81 | 5′csasgGUUCCAUGGGAUGCUCUg | 2573 | SpCas |
| SK9 | 806 | CATGGG | | UUUUsAGagcuaGaaauagcaaGUUaAa | | 9 |
| | | ATGCTCT | | AuAaggCUaGUCcGUUsAucAAcuug | | |
| | | | | aaaaaguGgcaccgAgUcggugcusususuU | | |
| | | | | UU-3′ | | |
| mcPC | GA00 | CAGGTTC | 81 | 5′csasgGUUCCAUGGGAUGCUCUg | 2574 | SpCas |
| SK9 | 807 | CATGGG | | UUUUsAGagcuaGaaauagcaaGUUaAa | | 9 |
| | | ATGCTCT | | AuAaggcuaGUccGUUsAucAAcuuGa | | |
| | | | | aaaaguGgcaccgAgUCggugcusususuU | | |
| | | | | UU-3′ | | |
| mPCS | GA00 | CCCATAC | 69 | 5′cscscAUACCUUGGAGCAACGGg | 1744 | ABE |
| K9 | 808 | CTTGGA | | UUUUsAGagcuaGaaauagcaaGUUsaA | | |
| | | GCAACG | | aAuAaggCUaGUCcGUUsAucAAcuu | | |
| | | G | | GaaaaaguGgcaccgAgUCggugcusususu | | |
| | | | | UUU-3′ | | |
| mPCS | GA00 | CCCATAC | 69 | 5′cscscAUACCUUGGAGCAACGGg | 2575 | ABE |
| K9 | 809 | CTTGGA | | UUUUsAGagcuagaaauagcaaGUUsaA | | |
| | | GCAACG | | aAuAaggcuaGUccGUUsAucAAcuuga | | |
| | | G | | aaaagugGcaccgagucggugcusususuUU | | |
| | | | | U-3′ | | |
| mPCS | GA00 | CCCATAC | 69 | 5′cscscAUACCUUGGAGCAACGGg | 2576 | ABE |
| K9 | 810 | CTTGGA | | UUUUsAGagcuaGaaauagcaaGUUsaA | | |
| | | GCAACG | | aAuAaggcuaGUccGUUsAucAAcuuG | | |
| | | G | | aaaaagugGcaccgagucggugcusususuUU | | |
| | | | | U-3′ | | |
| mAN | GA00 | GAGATA | 241 | 5′gsasgAUACCUGAGUAACUUUCg | 1745 | ABE |
| GPTL | 811 | CCTGAGT | | UUUUsAGagcuaGaaauagcaaGUUsaA | | |
| 3 | | AACTTTC | | aAuAaggCUaGUCcGUUsAucAAcuu | | |
| | | | | GaaaaaguGgcaccgAgUCggugcusususu | | |
| | | | | UUU-3′ | | |
| mAN | GA00 | GAGATA | 241 | 5′gsasAUACCUGAGUAACUUUCgU | 1746 | ABE |
| GPTL | 812 | CCTGAGT | | UUUsAGagcuagaaauagcaaGUUsaAa | | |
| 3 | | AACTTTC | | AuAaggcuaGUccGUUsAucAAcuugaa | | |
| | | | | aaagugGcaccgagucggugcusususuUUU | | |
| | | | | -3′ | | |
| mAN | GA00 | GAGATA | 241 | 5′gsasgAUACCUGAGUAACUUUCg | 2577 | ABE |
| GPTL | 813 | CCTGAGT | | UUUUsAGagcuaGaaauagcaaGUUsaA | | |
| 3 | | AACTTTC | | aAuAaggcuaGUccGUUsAucAAcuuG | | |
| | | | | aaaaagugGcaccgagucggugcusususuUU | | |
| | | | | U-3′ | | |
| mcPC | GA00 | CAGGTTC | 81 | 5′csasgGUUCCAUGGGAUGCUCUg | 1747 | SpCas |
| SK9 | 814 | CATGGG | | UUUUsAGagcuaGaaauagcaaGUUsaA | | 9 |
| | | ATGCTCT | | aAuAaggcuaGUccGUUsAucAAcuuG | | |
| | | | | aaaaagugGcaccgagucggugcusususuUU | | |
| | | | | U-3′ | | |
| mcPC | GA00 | CAGGTTC | 81 | 5′csasgGUUCCAUGGGAUGCUCUg | 2578 | SpCas |
| SK9 | 815 | CATGGG | | UUUUsAGagcuagaaauagcaaGUUsaA | | 9 |
| | | ATGCTCT | | aAuAaggCUaGUCcGUUsAucAAcuu | | |
| | | | | GaaaaaguGgcaccgAgUCggugcusususu | | |
| | | | | UUU-3′ | | |
| mcPC | GA00 | CAGGTTC | 81 | 5′csasgGUUCCAUGGGAUGCUCUg | 2579 | SpCas |
| SK9 | 816 | CATGGG | | UUUUsAGagcuagaaauagcaaGUUsaA | | 9 |
| | | ATGCTCT | | aAuAaggcuaGUccGUUsAucAAcuuG | | |
| | | | | aaaaaguGgcaccgAgUCggugcusususuU | | |
| | | | | UU-3′ | | |
| mcPC | GA00 | CAGGTTC | 81 | 5′csasgGUUCCAUGGGAUGCUCUg | 2580 | SpCas |
| SK9 | 817 | CATGGG | | UUUUsAGagcuagaaauagcaaGUUsaA | | 9 |
| | | ATGCTCT | | aAuAaggCUaGUCcGUUsAucAAcuu | | |
| | | | | gaaaaaguGgcaccgAgUCggugcusususu | | |
| | | | | UUU-3′ | | |
| mcPC | GA00 | CAGGTTC | 81 | 5′csasgGUUCCAUGGGAUGCUCUg | 2581 | SpCas |
| SK9 | 818 | CATGGG | | UUUUsAGagcuagaaauagcaaGUUsaA | | 9 |
| | | ATGCTCT | | aAuAaggCUaGUCcGUUsAucAAcuu | | |
| | | | | gaaaaaguGgcaccgAgUcggugcusususu | | |
| | | | | UUU-3′ | | |
| mcPC | GA00 | CAGGTTC | 81 | 5′csasgGUUCCAUGGGAUGCUCUg | 2579 | SpCas |
| SK9 | 819 | CATGGG | | UUUUsAGagcuagaaauagcaaGUUsaA | | 9 |
| | | ATGCTCT | | aAuAaggcuaGUccGUUsAucAAcuuG | | |
| | | | | aaaaaguGgcaccgAgUCggugcusususuU | | |
| | | | | UU-3′ | | |
| mcPC | GA00 | CAGGTTC | 81 | 5′csasgGUUCCAUGGGAUGCUCUg | 2582 | SpCas |
| SK9 | 820 | CATGGG | | UUUUsAGagcuaGaaauagcaaGUUsaA | | 9 |
| | | ATGCTCT | | aAuAaggCUaGUCcGUUsAucAAcuu | | |
| | | | | gaaaaaguGgcaccgAgUCggugcusususu | | |
| | | | | UUU-3′ | | |
| mcPC | GA00 | CAGGTTC | 81 | 5′csasgGUUCCAUGGGAUGCUCUg | 2583 | SpCas |
| SK9 | 821 | CATGGG | | UUUUsAGagcuaGaaauagcaaGUUsaA | | 9 |
| | | ATGCTCT | | aAuAaggCUaGUCcGUUsAucAAcuu | | |
| | | | | gaaaaaguGgcaccgAgUcggugcusususu | | |
| | | | | UUU-3′ | | |
| mcPC | GA00 | CAGGTTC | 81 | 5′csasgGUUCCAUGGGAUGCUCUg | 2584 | SpCas |
| SK9 | 822 | CATGGG | | UUUUsAGagcuaGaaauagcaaGUUsaA | | 9 |
| | | ATGCTCT | | aAuAaggcuaGUccGUUsAucAAcuuG | | |
| | | | | aaaaaguGgcaccgAgUCggugcusususuU | | |
| | | | | UU-3′ | | |
| mcPC | GA00 | CAGGTTC | 81 | 5′csasgsGUUCCAUGGGAUGCUCU | 1748 | SpCas |
| SK9 | 823 | CATGGG | | gUUUUAGagcuaGaaauagcaaGUUaAa | | 9 |
| | | ATGCTCT | | AuAaggCUaGUCcGUUAucAAcuuGa | | |
| | | | | aaaaguGgcaccgAgUCggugcuususuUU | | |
| | | | | U-3 | | |
| mcPC | GA00 | CAGGTTC | 81 | 5′csasgsGUUCCAUGGGAUGCUCU | 1749 | SpCas |
| SK9 | 824 | CATGGG | | gUUUUAGagcuagaaauagcaaGUUaAa | | 9 |
| | | ATGCTCT | | AuAaggcuaGUccGUUAucAAcuugaaa | | |
| | | | | aagugGcaccgagucggugcuususuUUU-3′ | | |
| mPCS | GA00 | CCCATAC | 69 | 5′cscscsAUACCUUGGAGCAACGGg | 2585 | ABE |
| K9 | 825 | CTTGGA | | UUUUAGagcuaGaaauagcaaGUUaAa | | |
| | | GCAACG | | AuAaggCUaGUCcGUUAucAAcuuGa | | |
| | | G | | aaaaguGgcaccgAgUCggugcuususuUU | | |
| | | | | U-3′ | | |
| mPCS | GA00 | CCCATAC | 69 | 5′cscscsAUACCUUGGAGCAACGGg | 2586 | ABE |
| K9 | 826 | CTTGGA | | UUUUAGagcuagaaauagcaaGUUaAaA | | |
| | | GCAACG | | uAaggcuaGUccGUUAucAAcuugaaaa | | |
| | | G | | agugGcaccgagucggugcuususuUUU-3′ | | |
| mPCS | GA00 | CCCATAC | 69 | 5′cscscsAUACCUUGGAGCAACGGg | 2587 | ABE |
| K9 | 827 | CTTGGA | | UUUUAGagcuaGaaauagcaaGUUaAa | | |
| | | GCAACG | | AuAaggcuaGUccGUUAucAAcuuGaa | | |
| | | G | | aaagugGcaccgagucggugcuususuUUU- | | |
| | | | | 3′ | | |
| mAN | GA00 | GAGATA | 241 | 5′gsasgsAUACCUGAGUAACUUUC | 1750 | ABE |
| GPTL | 828 | CCTGAGT | | gUUUUAGagcuaGaaauagcaaGUUaAa | | |
| 3 | | AACTTTC | | AuAaggCUaGUCcGUUAucAAcuuGa | | |
| | | | | aaaaguGgcaccgAgUCggugcuususuUU | | |
| | | | | U-3′ | | |
| mAN | GA00 | GAGATA | 241 | 5′gsasgsAUACCUGAGUAACUUUC | 2588 | ABE |
| GPTL | 829 | CCTGAGT | | gUUUUAGagcuagaaauagcaaGUUaAa | | |
| 3 | | AACTTTC | | AuAaggcuaGUccGUUAucAAcuugaaa | | |
| | | | | aagugGcaccgagucggugcuususuUUU-3′ | | |
| mAN | GA00 | GAGATA | 241 | 5′gsasgsAUACCUGAGUAACUUUC | 2589 | ABE |
| GPTL | 830 | CCTGAGT | | gUUUUAGagcuaGaaauagcaaGUUaAa | | |
| 3 | | AACTTTC | | AuAaggcuaGUccGUUAucAAcuuGaa | | |
| | | | | aaagugGcaccgagucggugcuususuUUU- | | |
| | | | | 3′ | | |
| mcPC | GA00 | CAGGTTC | 81 | 5′csasgsGUUCCAUGGGAUGCUCU | 2590 | SpCas |
| SK9 | 831 | CATGGG | | gUUUUAGagcuaGaaauagcaaGUUaAa | | 9 |
| | | ATGCTCT | | AuAaggcuaGUccGUUAucAAcuuGaa | | |
| | | | | aaagugGcaccgagucggugcuususuUUU- | | |
| | | | | 3′ | | |
| mcPC | GA00 | CAGGTTC | 81 | 5′csasgsGUUCCAUGGGAUGCUCU | 2591 | SpCas |
| SK9 | 832 | CATGGG | | gUUUUAGagcuagaaauagcaaGUUaAa | | 9 |
| | | ATGCTCT | | AuAaggCUaGUCcGUUAucAAcuuGa | | |
| | | | | aaaaguGgcaccgAgUCggugcuususuUU | | |
| | | | | U-3′ | | |
| mcPC | GA00 | CAGGTTC | 81 | 5′csasgsGUUCCAUGGGAUGCUCU | 2592 | SpCas |
| SK9 | 833 | CATGGG | | gUUUUAGagcuagaaauagcaaGUUaAa | | 9 |
| | | ATGCTCT | | AuAaggcuaGUccGUUAucAAcuuGaa | | |
| | | | | aaaguGgcaccgAgUCggugcuususuUU | | |
| | | | | U-3′ | | |
| mcPC | GA00 | CAGGTTC | 81 | 5′csasgsGUUCCAUGGGAUGCUCU | 2593 | SpCas |
| SK9 | 834 | CATGGG | | gUUUUAGagcuagaaauagcaaGUUaAa | | 9 |
| | | ATGCTCT | | AuAaggCUaGUCcGUUAucAAcuuga | | |
| | | | | aaaaguGgcaccgAgUCggugcuususuUU | | |
| | | | | U-3′ | | |
| mcPC | GA00 | CAGGTTC | 81 | 5′csasgsGUUCCAUGGGAUGCUCU | 2594 | SpCas |
| SK9 | 835 | CATGGG | | gUUUUAGagcuagaaauagcaaGUUaAa | | 9 |
| | | ATGCTCT | | AuAaggCUaGUCcGUUAucAAcuuga | | |
| | | | | aaaaguGgcaccgAgUcggugcuususuUU | | |
| | | | | U-3′ | | |
| mcPC | GA00 | CAGGTTC | 81 | 5′csasgsGUUCCAUGGGAUGCUCU | 2592 | SpCas |
| SK9 | 836 | CATGGG | | gUUUUAGagcuagaaauagcaaGUUaAa | | 9 |
| | | ATGCTCT | | AuAaggcuaGUccGUUAucAAcuuGaa | | |
| | | | | aaaguGgcaccgAgUCggugcuususuUU | | |
| | | | | U-3′ | | |
| mcPC | GA00 | CAGGTTC | 81 | 5′csasgsGUUCCAUGGGAUGCUCU | 2595 | SpCas |
| SK9 | 837 | CATGGG | | gUUUUAGagcuaGaaauagcaaGUUaAa | | 9 |
| | | ATGCTCT | | AuAaggCUaGUCcGUUAucAAcuuga | | |
| | | | | aaaaguGgcaccgAgUCggugcuususuUU | | |
| | | | | U-3′ | | |
| mcPC | GA00 | CAGGTTC | 81 | 5′csasgsGUUCCAUGGGAUGCUCU | 2596 | SpCas |
| SK9 | 838 | CATGGG | | gUUUUAGagcuaGaaauagcaaGUUaAa | | 9 |
| | | ATGCTCT | | AuAaggCUaGUCcGUUAucAAcuuga | | |
| | | | | aaaaguGgcaccgAgUcggugcuususuUU | | |
| | | | | U-3′ | | |
| mcPC | GA00 | CAGGTTC | 81 | 5′csasgsGUUCCAUGGGAUGCUCU | 2597 | SpCas |
| SK9 | 839 | CATGGG | | gUUUUAGagcuaGaaauagcaaGUUaAa | | 9 |
| | | ATGCTCT | | AuAaggcuaGUccGUUAucAAcuuGaa | | |
| | | | | aaaguGgcaccgAgUCggugcuususuUU | | |
| | | | | U-3′ | | |
| mPCS | GA00 | CCCATAC | 69 | 5′cscscsAUACCUUGGAGCAACGGg | 2598 | ABE |
| K9 | 840 | CTTGGA | | UUUUAGagcuaGaaauagcaaGUUaAa | | |
| | | GCAACG | | AuAaggCUaGUCcGUUsAucAAcuuG | | |
| | | G | | aaaaaguGgcaccgAgUCggugcuususuU | | |
| | | | | UU-3′ | | |
| mPCS | GA00 | CCCATAC | 69 | 5′cscscsAUACCUUGGAGCAACGGg | 2599 | ABE |
| K9 | 841 | CTTGGA | | UUUUAGagcuagaaauagcaaGUUaAaA | | |
| | | GCAACG | | uAaggcuaGUccGUUsAucAAcuugaaaa | | |
| | | G | | agugGcaccgagucggugcuususuUUU-3′ | | |
| mPCS | GA00 | CCCATAC | 69 | 5′cscscsAUACCUUGGAGCAACGGg | 2600 | ABE |
| K9 | 842 | CTTGGA | | UUUUAGagcuaGaaauagcaaGUUaAa | | |
| | | GCAACG | | AuAaggcuaGUccGUUsAucAAcuuGa | | |
| | | G | | aaaagugGcaccgagucggugcuususuUUU | | |
| | | | | -3′ | | |
| mAN | GA00 | GAGATA | 241 | 5′gsasgsAUACCUGAGUAACUUUC | 1751 | ABE |
| GPTL | 843 | CCTGAGT | | gUUUUAGagcuaGaaauagcaaGUUaAa | | |
| 3 | | AACTTTC | | AuAaggCUaGUCcGUUsAucAAcuuG | | |
| | | | | aaaaaguGgcaccgAgUCggugcuususuU | | |
| | | | | UU-3′ | | |
| mAN | GA00 | GAGATA | 241 | 5′gsasgsAUACCUGAGUAACUUUC | 2601 | ABE |
| GPTL | 844 | CCTGAGT | | gUUUUAGagcuagaaauagcaaGUUaAa | | |
| 3 | | AACTTTC | | AuAaggcuaGUccGUUsAucAAcuugaa | | |
| | | | | aaagugGcaccgagucggugcuususuUUU- | | |
| | | | | 3′ | | |
| mAN | GA00 | GAGATA | 241 | 5′gsasgsAUACCUGAGUAACUUUC | 2602 | ABE |
| GPTL | 845 | CCTGAGT | | gUUUUAGagcuaGaaauagcaaGUUaAa | | |
| 3 | | AACTTTC | | AuAaggcuaGUccGUUsAucAAcuuGa | | |
| | | | | aaaagugGcaccgagucggugcuususuUUU | | |
| | | | | -3′ | | |
| mcPC | GA00 | CAGGTTC | 81 | 5′csasgsGUUCCAUGGGAUGCUCU | 1752 | SpCas |
| SK9 | 846 | CATGGG | | gUUUUAGagcuaGaaauagcaaGUUaAa | | 9 |
| | | ATGCTCT | | AuAaggcuaGUccGUUsAucAAcuuGa | | |
| | | | | aaaagugGcaccgagucggugcuususuUUU | | |
| | | | | -3′ | | |
| mcPC | GA00 | CAGGTTC | 81 | 5′csasgsGUUCCAUGGGAUGCUCU | 2603 | SpCas |
| SK9 | 847 | CATGGG | | gUUUUAGagcuagaaauagcaaGUUaAa | | 9 |
| | | ATGCTCT | | AuAaggCUaGUCcGUUsAucAAcuuG | | |
| | | | | aaaaaguGgcaccgAgUCggugcuususuU | | |
| | | | | UU-3′ | | |
| mcPC | GA00 | CAGGTTC | 81 | 5′csasgsGUUCCAUGGGAUGCUCU | 2604 | SpCas |
| SK9 | 848 | CATGGG | | gUUUUAGagcuagaaauagcaaGUUaAa | | 9 |
| | | ATGCTCT | | AuAaggcuaGUccGUUsAucAAcuuGa | | |
| | | | | aaaaguGgcaccgAgUCggugcuususuUU | | |
| | | | | U-3′ | | |
| mcPC | GA00 | CAGGTTC | 81 | 5′csasgsGUUCCAUGGGAUGCUCU | 2605 | SpCas |
| SK9 | 849 | CATGGG | | gUUUUAGagcuagaaauagcaaGUUaAa | | 9 |
| | | ATGCTCT | | AuAaggCUaGUCcGUUsAucAAcuug | | |
| | | | | aaaaaguGgcaccgAgUCggugcuususuU | | |
| | | | | UU-3′ | | |
| mcPC | GA00 | CAGGTTC | 81 | 5′csasgsGUUCCAUGGGAUGCUCU | 2606 | SpCas |
| SK9 | 850 | CATGGG | | gUUUUAGagcuagaaauagcaaGUUaAa | | 9 |
| | | ATGCTCT | | AuAaggCUaGUCcGUUsAucAAcuug | | |
| | | | | aaaaaguGgcaccgAgUcggugcuususuUU | | |
| | | | | U-3′ | | |
| mcPC | GA00 | CAGGTTC | 81 | 5′csasgsGUUCCAUGGGAUGCUCU | 2604 | SpCas |
| SK9 | 851 | CATGGG | | gUUUUAGagcuagaaauagcaaGUUaAa | | 9 |
| | | ATGCTCT | | AuAaggcuaGUccGUUsAucAAcuuGa | | |
| | | | | aaaaguGgcaccgAgUCggugcuususuUU | | |
| | | | | U-3′ | | |
| mcPC | GA00 | CAGGTTC | 81 | 5′csasgsGUUCCAUGGGAUGCUCU | 2607 | SpCas |
| SK9 | 852 | CATGGG | | gUUUUAGagcuaGaaauagcaaGUUaAa | | 9 |
| | | ATGCTCT | | AuAaggCUaGUCcGUUsAucAAcuug | | |
| | | | | aaaaaguGgcaccgAgUCggugcuususuU | | |
| | | | | UU-3′ | | |
| mcPC | GA00 | CAGGTTC | 81 | 5′csasgsGUUCCAUGGGAUGCUCU | 2608 | SpCas |
| SK9 | 853 | CATGGG | | gUUUUAGagcuaGaaauagcaaGUUaAa | | 9 |
| | | ATGCTCT | | AuAaggCUaGUCcGUUsAucAAcuug | | |
| | | | | aaaaaguGgcaccgAgUcggugcuususuUU | | |
| | | | | U-3′ | | |
| mcPC | GA00 | CAGGTTC | 81 | 5′csasgsGUUCCAUGGGAUGCUCU | 2609 | SpCas |
| SK9 | 854 | CATGGG | | gUUUUAGagcuaGaaauagcaaGUUaAa | | 9 |
| | | ATGCTCT | | AuAaggcuaGUccGUUsAucAAcuuGa | | |
| | | | | aaaaguGgcaccgAgUCggugcuususuUU | | |
| | | | | U-3′ | | |
| mPCS | GA00 | CCCATAC | 69 | 5′cscscsAUACCUUGGAGCAACGGg | 2610 | ABE |
| K9 | 855 | CTTGGA | | UUUUAGagcuaGaaauagcaaGUUsaAa | | |
| | | GCAACG | | AuAaggCUaGUCcGUUAucAAcuuGa | | |
| | | G | | aaaaguGgcaccgAgUCggugcuususuUU | | |
| | | | | U-3′ | | |
| mPCS | GA00 | CCCATAC | 69 | 5′cscscsAUACCUUGGAGCAACGGg | 2611 | ABE |
| K9 | 856 | CTTGGA | | UUUUAGagcuagaaauagcaaGUUsaAa | | |
| | | GCAACG | | AuAaggcuaGUccGUUAucAAcuugaaa | | |
| | | G | | aagugGcaccgagucggugcuususuUUU-3′ | | |
| mPCS | GA00 | CCCATAC | 69 | 5′cscscsAUACCUUGGAGCAACGGg | 2612 | ABE |
| K9 | 857 | CTTGGA | | UUUUAGagcuaGaaauagcaaGUUsaAa | | |
| | | GCAACG | | AuAaggcuaGUccGUUAucAAcuuGaa | | |
| | | G | | aaagugGcaccgagucggugcuususuUUU- | | |
| | | | | 3′ | | |
| mAN | GA00 | GAGATA | 241 | 5′gsasgsAUACCUGAGUAACUUUC | 1753 | ABE |
| GPTL | 858 | CCTGAGT | | gUUUUAGagcuaGaaauagcaaGUUsaA | | |
| 3 | | AACTTTC | | aAuAaggCUaGUCcGUUAucAAcuuG | | |
| | | | | aaaaaguGgcaccgAgUCggugcuususuU | | |
| | | | | UU-3′ | | |
| mAN | GA00 | GAGATA | 241 | 5′gsasgsAUACCUGAGUAACUUUC | 2613 | ABE |
| GPTL | 859 | CCTGAGT | | gUUUUAGagcuagaaauagcaaGUUsaA | | |
| 3 | | AACTTTC | | aAuAaggcuaGUccGUUAucAAcuugaa | | |
| | | | | aaagugGcaccgagucggugcuususuUUU- | | |
| | | | | 3′ | | |
| mAN | GA00 | GAGATA | 241 | 5′gsasgsAUACCUGAGUAACUUUC | 2614 | ABE |
| GPTL | 860 | CCTGAGT | | gUUUUAGagcuaGaaauagcaaGUUsaA | | |
| 3 | | AACTTTC | | aAuAaggcuaGUccGUUAucAAcuuGa | | |
| | | | | aaaagugGcaccgagucggugcuususuUUU | | |
| | | | | -3′ | | |
| mcPC | GA00 | CAGGTTC | 81 | 5′csasgsGUUCCAUGGGAUGCUCU | 1754 | SpCas |
| SK9 | 861 | CATGGG | | gUUUUAGagcuaGaaauagcaaGUUsaA | | 9 |
| | | ATGCTCT | | aAuAaggcuaGUccGUUAucAAcuuGa | | |
| | | | | aaaagugGcaccgagucggugcuususuUUU | | |
| | | | | -3′ | | |
| mcPC | GA00 | CAGGTTC | 81 | 5′csasgsGUUCCAUGGGAUGCUCU | 2615 | SpCas |
| SK9 | 862 | CATGGG | | gUUUUAGagcuagaaauagcaaGUUsaA | | 9 |
| | | ATGCTCT | | aAuAaggCUaGUCcGUUAucAAcuuG | | |
| | | | | aaaaaguGgcaccgAgUCggugcuususuU | | |
| | | | | UU-3′ | | |
| mcPC | GA00 | CAGGTTC | 81 | 5′csasgsGUUCCAUGGGAUGCUCU | 2616 | SpCas |
| SK9 | 863 | CATGGG | | gUUUUAGagcuagaaauagcaaGUUsaA | | 9 |
| | | ATGCTCT | | aAuAaggcuaGUccGUUAucAAcuuGa | | |
| | | | | aaaaguGgcaccgAgUCggugcuususuUU | | |
| | | | | U-3′ | | |
| mcPC | GA00 | CAGGTTC | 81 | 5′csasgsGUUCCAUGGGAUGCUCU | 2437 | SpCas |
| SK9 | 864 | CATGGG | | gUUUUAGagcuagaaauagcaaGUUsaA | | 9 |
| | | ATGCTCT | | aAuAaggCUaGUCcGUUAucAAcuug | | |
| | | | | aaaaaguGgcaccgAgUCggugcusususuU | | |
| | | | | UU-3′ | | |
| mcPC | GA00 | CAGGTTC | 81 | 5′csasgsGUUCCAUGGGAUGCUCU | 2617 | SpCas |
| SK9 | 865 | CATGGG | | gUUUUAGagcuagaaauagcaaGUUsaA | | 9 |
| | | ATGCTCT | | aAuAaggCUaGUCcGUUAucAAcuug | | |
| | | | | aaaaaguGgcaccgAgUcggugcuususuUU | | |
| | | | | U-3′ | | |
| mcPC | GA00 | CAGGTTC | 81 | 5′csasgsGUUCCAUGGGAUGCUCU | 2616 | SpCas |
| SK9 | 866 | CATGGG | | gUUUUAGagcuagaaauagcaaGUUsaA | | 9 |
| | | ATGCTCT | | aAuAaggcuaGUccGUUAucAAcuuGa | | |
| | | | | aaaaguGgcaccgAgUCggugcuususuUU | | |
| | | | | U-3′ | | |
| mcPC | GA00 | CAGGTTC | 81 | 5′csasgsGUUCCAUGGGAUGCUCU | 2618 | SpCas |
| SK9 | 867 | CATGGG | | gUUUUAGagcuaGaaauagcaaGUUsaA | | 9 |
| | | ATGCTCT | | aAuAaggCUaGUCcGUUAucAAcuug | | |
| | | | | aaaaaguGgcaccgAgUCggugcuususuU | | |
| | | | | UU-3′ | | |
| mcPC | GA00 | CAGGTTC | 81 | 5′csasgsGUUCCAUGGGAUGCUCU | 2619 | SpCas |
| SK9 | 868 | CATGGG | | gUUUUAGagcuaGaaauagcaaGUUsaA | | 9 |
| | | ATGCTCT | | aAuAaggCUaGUCcGUUAucAAcuug | | |
| | | | | aaaaaguGgcaccgAgUcggugcuususuUU | | |
| | | | | U-3′ | | |
| mcPC | GA00 | CAGGTTC | 81 | 5′csasgsGUUCCAUGGGAUGCUCU | 2620 | SpCas |
| SK9 | 869 | CATGGG | | gUUUUAGagcuaGaaauagcaaGUUsaA | | 9 |
| | | ATGCTCT | | aAuAaggcuaGUccGUUAucAAcuuGa | | |
| | | | | aaaaguGgcaccgAgUCggugcuususuUU | | |
| | | | | U-3′ | | |
| mPCS | GA00 | CCCATAC | 69 | 5′cscscsAUACCUUGGAGCAACGGg | 1755 | ABE |
| K9 | 870 | CTTGGA | | UUUUsAGagcuaGaaauagcaaGUUaAa | | |
| | | GCAACG | | AuAaggCUaGUCcGUUAucAAcuuGa | | |
| | | G | | aaaaguGgcaccgAgUCggugcuususuUU | | |
| | | | | U-3′ | | |
| mPCS | GA00 | CCCATAC | 69 | 5′cscscsAUACCUUGGAGCAACGGg | 2621 | ABE |
| K9 | 871 | CTTGGA | | UUUUsAGagcuagaaauagcaaGUUaAa | | |
| | | GCAACG | | AuAaggcuaGUccGUUAucAAcuugaaa | | |
| | | G | | aagugGcaccgagucggugcuususuUUU-3′ | | |
| mPCS | GA00 | CCCATAC | 69 | 5′cscscsAUACCUUGGAGCAACGGg | 2622 | ABE |
| K9 | 872 | CTTGGA | | UUUUsAGagcuaGaaauagcaaGUUaAa | | |
| | | GCAACG | | AuAaggcuaGUccGUUAucAAcuuGaa | | |
| | | G | | aaagugGcaccgagucggugcuususuUUU- | | |
| | | | | 3′ | | |
| mAN | GA00 | GAGATA | 241 | 5′gsasgsAUACCUGAGUAACUUUC | 1756 | ABE |
| GPTL | 873 | CCTGAGT | | gUUUUsAGagcuaGaaauagcaaGUUaA | | |
| 3 | | AACTTTC | | aAuAaggCUaGUCcGUUAucAAcuuG | | |
| | | | | aaaaaguGgcaccgAgUCggugcuususuU | | |
| | | | | UU-3′ | | |
| mAN | GA00 | GAGATA | 241 | 5′gsasgsAUACCUGAGUAACUUUC | 2623 | ABE |
| GPTL | 874 | CCTGAGT | | gUUUUsAGagcuagaaauagcaaGUUaA | | |
| 3 | | AACTTTC | | aAuAaggcuaGUccGUUAucAAcuugaa | | |
| | | | | aaagugGcaccgagucggugcuususuUUU- | | |
| | | | | 3′ | | |
| mAN | GA00 | GAGATA | 241 | 5′gsasgsAUACCUGAGUAACUUUC | 2624 | ABE |
| GPTL | 875 | CCTGAGT | | gUUUUsAGagcuaGaaauagcaaGUUaA | | |
| 3 | | AACTTTC | | aAuAaggcuaGUccGUUAucAAcuuGa | | |
| | | | | aaaagugGcaccgagucggugcuususuUUU | | |
| | | | | -3′ | | |
| mcPC | GA00 | CAGGTTC | 81 | 5′csasgsGUUCCAUGGGAUGCUCU | 1757 | SpCas |
| SK9 | 876 | CATGGG | | gUUUUsAGagcuaGaaauagcaaGUUaA | | 9 |
| | | ATGCTCT | | aAuAaggcuaGUccGUUAucAAcuuGa | | |
| | | | | aaaagugGcaccgagucggugcuususuUUU | | |
| | | | | -3′ | | |
| mcPC | GA00 | CAGGTTC | 81 | 5′csasgsGUUCCAUGGGAUGCUCU | 2625 | SpCas |
| SK9 | 877 | CATGGG | | gUUUUsAGagcuagaaauagcaaGUUaA | | 9 |
| | | ATGCTCT | | aAuAaggCUaGUCcGUUAucAAcuuG | | |
| | | | | aaaaaguGgcaccgAgUCggugcuususuU | | |
| | | | | UU-3′ | | |
| mcPC | GA00 | CAGGTTC | 81 | 5′csasgsGUUCCAUGGGAUGCUCU | 2626 | SpCas |
| SK9 | 878 | CATGGG | | gUUUUsAGagcuagaaauagcaaGUUaA | | 9 |
| | | ATGCTCT | | aAuAaggcuaGUccGUUAucAAcuuGa | | |
| | | | | aaaaguGgcaccgAgUCggugcuususuUU | | |
| | | | | U-3′ | | |
| mcPC | GA00 | CAGGTTC | 81 | 5′csasgsGUUCCAUGGGAUGCUCU | 2627 | SpCas |
| SK9 | 879 | CATGGG | | gUUUUsAGagcuagaaauagcaaGUUaA | | 9 |
| | | ATGCTCT | | aAuAaggCUaGUCcGUUAucAAcuug | | |
| | | | | aaaaaguGgcaccgAgUCggugcuususuU | | |
| | | | | UU-3′ | | |
| mcPC | GA00 | CAGGTTC | 81 | 5′csasgsGUUCCAUGGGAUGCUCU | 2628 | SpCas |
| SK9 | 88 | CATGGG | | gUUUUsAGagcuagaaauagcaaGUUaA | | 9 |
| | | ATGCTCT | | aAuAaggCUaGUCcGUUAucAAcuug | | |
| | | | | aaaaaguGgcaccgAgUcggugcuususuUU | | |
| | | | | U-3′ | | |
| mcPC | GA00 | CAGGTTC | 81 | 5′csasgsGUUCCAUGGGAUGCUCU | 2626 | SpCas |
| SK9 | 881 | CATGGG | | gUUUUsAGagcuagaaauagcaaGUUaA | | 9 |
| | | ATGCTCT | | aAuAaggcuaGUccGUUAucAAcuuGa | | |
| | | | | aaaaguGgcaccgAgUCggugcuususuUU | | |
| | | | | U-3′ | | |
| mcPC | GA00 | CAGGTTC | 81 | 5′csasgsGUUCCAUGGGAUGCUCU | 2450 | SpCas |
| SK9 | 882 | CATGGG | | gUUUUsAGagcuaGaaauagcaaGUUaA | | 9 |
| | | ATGCTCT | | aAuAaggCUaGUCcGUUAucAAcuug | | |
| | | | | aaaaaguGgcaccgAgUCggugcusususuU | | |
| | | | | UU-3′ | | |
| mcPC | GA00 | CAGGTTC | 81 | 5′csasgsGUUCCAUGGGAUGCUCU | 2629 | SpCas |
| SK9 | 883 | CATGGG | | gUUUUsAGagcuaGaaauagcaaGUUaA | | 9 |
| | | ATGCTCT | | aAuAaggCUaGUCcGUUAucAAcuug | | |
| | | | | aaaaaguGgcaccgAgUcggugcuususuUU | | |
| | | | | U-3′ | | |
| mcPC | GA00 | CAGGTTC | 81 | 5′csasgsGUUCCAUGGGAUGCUCU | 2630 | SpCas |
| SK9 | 884 | CATGGG | | gUUUUsAGagcuaGaaauagcaaGUUaA | | 9 |
| | | ATGCTCT | | aAuAaggcuaGUccGUUAucAAcuuGa | | |
| | | | | aaaaguGgcaccgAgUCggugcuususuUU | | |
| | | | | U-3′ | | |
| mPCS | GA00 | CCCATAC | 69 | 5′cscscsAUACCUUGGAGCAACGGg | 2631 | ABE |
| K9 | 885 | CTTGGA | | UUUUAGagcuaGaaauagcaaGUUsaAa | | |
| | | GCAACG | | AuAaggCUaGUCcGUUsAucAAcuuG | | |
| | | G | | aaaaaguGgcaccgAgUCggugcuususuU | | |
| | | | | UU-3′ | | |
| mPCS | GA00 | CCCATAC | 69 | 5′cscscsAUACCUUGGAGCAACGGg | 2632 | ABE |
| K9 | 886 | CTTGGA | | UUUUAGagcuagaaauagcaaGUUsaAa | | |
| | | GCAACG | | AuAaggcuaGUccGUUsAucAAcuugaa | | |
| | | G | | aaagugGcaccgagucggugcuususuUUU- | | |
| | | | | 3′ | | |
| mPCS | GA00 | CCCATAC | 69 | 5′cscscsAUACCUUGGAGCAACGGg | 2633 | ABE |
| K9 | 887 | CTTGGA | | UUUUAGagcuaGaaauagcaaGUUsaAa | | |
| | | GCAACG | | AuAaggcuaGUccGUUsAucAAcuuGa | | |
| | | G | | aaaagugGcaccgagucggugcuususuUUU | | |
| | | | | -3′ | | |
| mAN | GA00 | GAGATA | 241 | 5′gsasgsAUACCUGAGUAACUUUC | 1758 | ABE |
| GPTL | 888 | CCTGAGT | | gUUUUAGagcuaGaaauagcaaGUUsaA | | |
| 3 | | AACTTTC | | aAuAaggCUaGUCcGUUsAucAAcuu | | |
| | | | | GaaaaaguGgcaccgAgUCggugcuususu | | |
| | | | | UUU-3′ | | |
| mAN | GA00 | GAGATA | 241 | 5′gsasgsAUACCUGAGUAACUUUC | 2634 | ABE |
| GPTL | 889 | CCTGAGT | | gUUUUAGagcuagaaauagcaaGUUsaA | | |
| 3 | | AACTTTC | | aAuAaggcuaGUccGUUsAucAAcuuga | | |
| | | | | aaaagugGcaccgagucggugcuususuUUU | | |
| | | | | -3′ | | |
| mAN | GA00 | GAGATA | 241 | 5′gsasgsAUACCUGAGUAACUUUC | 2635 | ABE |
| GPTL | 890 | CCTGAGT | | gUUUUAGagcuaGaaauagcaaGUUsaA | | |
| 3 | | AACTTTC | | aAuAaggcuaGUccGUUsAucAAcuuG | | |
| | | | | aaaaagugGcaccgagucggugcuususuUU | | |
| | | | | U-3′ | | |
| mcPC | GA00 | CAGGTTC | 81 | 5′csasgsGUUCCAUGGGAUGCUCU | 1759 | SpCas |
| SK9 | 891 | CATGGG | | gUUUUAGagcuaGaaauagcaaGUUsaA | | 9 |
| | | ATGCTCT | | aAuAaggcuaGUccGUUsAucAAcuuG | | |
| | | | | aaaaagugGcaccgagucggugcuususuUU | | |
| | | | | U-3′ | | |
| mcPC | GA00 | CAGGTTC | 81 | 5′csasgsGUUCCAUGGGAUGCUCU | 2636 | SpCas |
| SK9 | 892 | CATGGG | | gUUUUAGagcuagaaauagcaaGUUsaA | | 9 |
| | | ATGCTCT | | aAuAaggCUaGUCcGUUsAucAAcuu | | |
| | | | | GaaaaaguGgcaccgAgUCggugcuususu | | |
| | | | | UUU-3′ | | |
| mcPC | GA00 | CAGGTTC | 81 | 5′csasgsGUUCCAUGGGAUGCUCU | 2637 | SpCas |
| SK9 | 893 | CATGGG | | gUUUUAGagcuagaaauagcaaGUUsaA | | 9 |
| | | ATGCTCT | | aAuAaggcuaGUccGUUsAucAAcuuG | | |
| | | | | aaaaaguGgcaccgAgUCggugcuususuU | | |
| | | | | UU-3′ | | |
| mcPC | GA00 | CAGGTTC | 81 | 5′csasgsGUUCCAUGGGAUGCUCU | 2638 | SpCas |
| SK9 | 894 | CATGGG | | gUUUUAGagcuagaaauagcaaGUUsaA | | 9 |
| | | ATGCTCT | | aAuAaggCUaGUCcGUUsAucAAcuu | | |
| | | | | gaaaaaguGgcaccgAgUCggugcuususuU | | |
| | | | | UU-3′ | | |
| mcPC | GA00 | CAGGTTC | 81 | 5′csasgsGUUCCAUGGGAUGCUCU | 2460 | SpCas |
| SK9 | 895 | CATGGG | | gUUUUAGagcuagaaauagcaaGUUsaA | | 9 |
| | | ATGCTCT | | aAuAaggCUaGUCcGUUsAucAAcuu | | |
| | | | | gaaaaaguGgcaccgAgUcggugcusususu | | |
| | | | | UUU-3′ | | |
| mcPC | GA00 | CAGGTTC | 81 | 5′csasgsGUUCCAUGGGAUGCUCU | 2637 | SpCas |
| SK9 | 896 | CATGGG | | gUUUUAGagcuagaaauagcaaGUUsaA | | 9 |
| | | ATGCTCT | | aAuAaggcuaGUccGUUsAucAAcuuG | | |
| | | | | aaaaaguGgcaccgAgUCggugcuususuU | | |
| | | | | UU-3′ | | |
| mcPC | GA00 | CAGGTTC | 81 | 5csasgsGUUCCAUGGGAUGCUCUg | 1760 | SpCas |
| SK9 | 897 | CATGGG | | UUUUAGagcuaGaaauagcaaGUUsaAa | | 9 |
| | | ATGCTCT | | AuAaggCUaGUCcGUUsAucAAcuug | | |
| | | | | aaaaaguGgcaccgAgUCggugcuususuU | | |
| | | | | UU-3′ | | |
| mcPC | GA00 | CAGGTTC | 81 | 5′csasgsGUUCCAUGGGAUGCUCU | 2639 | SpCas |
| SK9 | 898 | CATGGG | | gUUUUAGagcuaGaaauagcaaGUUsaA | | 9 |
| | | ATGCTCT | | aAuAaggCUaGUCcGUUsAucAAcuu | | |
| | | | | gaaaaaguGgcaccgAgUcggugcuususuU | | |
| | | | | UU-3′ | | |
| mcPC | GA00 | CAGGTTC | 81 | 5′csasgsGUUCCAUGGGAUGCUCU | 2640 | SpCas |
| SK9 | 899 | CATGGG | | gUUUUAGagcuaGaaauagcaaGUUsaA | | 9 |
| | | ATGCTCT | | aAuAaggcuaGUccGUUsAucAAcuuG | | |
| | | | | aaaaaguGgcaccgAgUCggugcuususuU | | |
| | | | | UU-3′ | | |
| mPCS | GA00 | CCCATAC | 69 | 5′cscscsAUACCUUGGAGCAACGGg | 1761 | ABE |
| K9 | 900 | CTTGGA | | UUUUsAGagcuaGaaauagcaaGUUsaA | | |
| | | GCAACG | | aAuAaggCUaGUCcGUUAucAAcuuG | | |
| | | G | | aaaaaguGgcaccgAgUCggugcuususuU | | |
| | | | | UU-3′ | | |
| mPCS | GA00 | CCCATAC | 69 | 5′cscscsAUACCUUGGAGCAACGGg | 2641 | ABE |
| K9 | 901 | CTTGGA | | UUUUsAGagcuagaaauagcaaGUUsaA | | |
| | | GCAACG | | aAuAaggcuaGUccGUUAucAAcuugaa | | |
| | | G | | aaagugGcaccgagucggugcuususuUUU- | | |
| | | | | 3′ | | |
| mPCS | GA00 | CCCATAC | 69 | 5′cscscsAUACCUUGGAGCAACGGg | 2642 | ABE |
| K9 | 902 | CTTGGA | | UUUUsAGagcuaGaaauagcaaGUUsaA | | |
| | | GCAACG | | aAuAaggcuaGUccGUUAucAAcuuGa | | |
| | | G | | aaaagugGcaccgagucggugcuususuUUU | | |
| | | | | -3′ | | |
| mAN | GA00 | GAGATA | 241 | 5′gsasgsAUACCUGAGUAACUUUC | 1762 | ABE |
| GPTL | 903 | CCTGAGT | | gUUUUsAGagcuaGaaauagcaaGUUsa | | |
| 3 | | AACTTTC | | AaAuAaggCUaGUCcGUUAucAAcuu | | |
| | | | | GaaaaaguGgcaccgAgUCggugcuususu | | |
| | | | | UUU-3′ | | |
| mAN | GA00 | GAGATA | 241 | 5′gsasgsAUACCUGAGUAACUUUC | 2643 | ABE |
| GPTL | 904 | CCTGAGT | | gUUUUsAGagcuagaaauagcaaGUUsa | | |
| 3 | | AACTTTC | | AaAuAaggcuaGUccGUUAucAAcuug | | |
| | | | | aaaaagugGcaccgagucggugcuususuUU | | |
| | | | | U-3′ | | |
| mAN | GA00 | GAGATA | 241 | 5′gsasgsAUACCUGAGUAACUUUC | 2644 | ABE |
| GPTL | 905 | CCTGAGT | | gUUUUsAGagcuaGaaauagcaaGUUsa | | |
| 3 | | AACTTTC | | AaAuAaggcuaGUccGUUAucAAcuuG | | |
| | | | | aaaaagugGcaccgagucggugcuususuUU | | |
| | | | | U-3′ | | |
| mcPC | GA00 | CAGGTTC | 81 | 5′csasgsGUUCCAUGGGAUGCUCU | 1763 | SpCas |
| SK9 | 906 | CATGGG | | gUUUUsAGagcuaGaaauagcaaGUUsa | | 9 |
| | | ATGCTCT | | AaAuAaggcuaGUccGUUAucAAcuuG | | |
| | | | | aaaaagugGcaccgagucggugcuususuUU | | |
| | | | | U-3′ | | |
| mcPC | GA00 | CAGGTTC | 81 | 5′csasgsGUUCCAUGGGAUGCUCU | 2645 | SpCas |
| SK9 | 907 | CATGGG | | gUUUUsAGagcuagaaauagcaaGUUsa | | 9 |
| | | ATGCTCT | | AaAuAaggCUaGUCcGUUAucAAcuu | | |
| | | | | GaaaaaguGgcaccgAgUCggugcuususu | | |
| | | | | UUU-3′ | | |
| mcPC | GA00 | CAGGTTC | 81 | 5′csasgsGUUCCAUGGGAUGCUCU | 2646 | SpCas |
| SK9 | 908 | CATGGG | | gUUUUsAGagcuagaaauagcaaGUUsa | | 9 |
| | | ATGCTCT | | AaAuAaggcuaGUccGUUAucAAcuuG | | |
| | | | | aaaaaguGgcaccgAgUCggugcuususuU | | |
| | | | | UU-3′ | | |
| mcPC | GA00 | CAGGTTC | 81 | 5′csasgsGUUCCAUGGGAUGCUCU | 2647 | SpCas |
| SK9 | 909 | CATGGG | | gUUUUsAGagcuagaaauagcaaGUUsa | | 9 |
| | | ATGCTCT | | AaAuAaggCUaGUCcGUUAucAAcuu | | |
| | | | | gaaaaaguGgcaccgAgUCggugcuususuU | | |
| | | | | UU-3′ | | |
| mcPC | GA00 | CAGGTTC | 81 | 5′csasgsGUUCCAUGGGAUGCUCU | 2648 | SpCas |
| SK9 | 910 | CATGGG | | gUUUUsAGagcuagaaauagcaaGUUsa | | 9 |
| | | ATGCTCT | | AaAuAaggCUaGUCcGUUAucAAcuu | | |
| | | | | gaaaaaguGgcaccgAgUcggugcuususuU | | |
| | | | | UU-3′ | | |
| mcPC | GA00 | CAGGTTC | 81 | 5′csasgsGUUCCAUGGGAUGCUCU | 2469 | SpCas |
| SK9 | 911 | CATGGG | | gUUUUsAGagcuagaaauagcaaGUUsa | | 9 |
| | | ATGCTCT | | AaAuAaggcuaGUccGUUAucAAcuuG | | |
| | | | | aaaaaguGgcaccgAgUCggugcusususuU | | |
| | | | | UU-3′ | | |
| mcPC | GA00 | CAGGTTC | 81 | 5′csasgsGUUCCAUGGGAUGCUCU | 2649 | SpCas |
| SK9 | 912 | CATGGG | | gUUUUsAGagcuaGaaauagcaaGUUsa | | 9 |
| | | ATGCTCT | | AaAuAaggCUaGUCcGUUAucAAcuu | | |
| | | | | gaaaaaguGgcaccgAgUCggugcuususuU | | |
| | | | | UU-3′ | | |
| mcPC | GA00 | CAGGTTC | 81 | 5′csasgsGUUCCAUGGGAUGCUCU | 2650 | SpCas |
| SK9 | 913 | CATGGG | | gUUUUsAGagcuaGaaauagcaaGUUsa | | 9 |
| | | ATGCTCT | | AaAuAaggCUaGUCcGUUAucAAcuu | | |
| | | | | gaaaaaguGgcaccgAgUcggugcuususuU | | |
| | | | | UU-3′ | | |
| mcPC | GA00 | CAGGTTC | 81 | 5′csasgsGUUCCAUGGGAUGCUCU | 2651 | SpCas |
| SK9 | 914 | CATGGG | | gUUUUsAGagcuaGaaauagcaaGUUsa | | 9 |
| | | ATGCTCT | | AaAuAaggcuaGUccGUUAucAAcuuG | | |
| | | | | aaaaaguGgcaccgAgUCggugcuususuU | | |
| | | | | UU-3′ | | |
| mPCS | GA00 | CCCATAC | 69 | 5′cscscsAUACCUUGGAGCAACGGg | 1764 | ABE |
| K9 | 915 | CTTGGA | | UUUUsAGagcuaGaaauagcaaGUUaAa | | |
| | | GCAACG | | AuAaggCUaGUCcGUUsAucAAcuuG | | |
| | | G | | aaaaaguGgcaccgAgUCggugcuususuU | | |
| | | | | UU-3′ | | |
| mPCS | GA00 | CCCATAC | 69 | 5′cscscsAUACCUUGGAGCAACGGg | 2652 | ABE |
| K9 | 916 | CTTGGA | | UUUUsAGagcuagaaauagcaaGUUaAa | | |
| | | GCAACG | | AuAaggcuaGUccGUUsAucAAcuugaa | | |
| | | G | | aaagugGcaccgagucggugcuususuUUU- | | |
| | | | | 3′ | | |
| mPCS | GA00 | CCCATAC | 69 | 5′cscscsAUACCUUGGAGCAACGGg | 2653 | ABE |
| K9 | 917 | CTTGGA | | UUUUsAGagcuaGaaauagcaaGUUaAa | | |
| | | GCAACG | | AuAaggcuaGUccGUUsAucAAcuuGa | | |
| | | G | | aaaagugGcaccgagucggugcuususuUUU | | |
| | | | | -3′ | | |
| mAN | GA00 | GAGATA | 241 | 5′gsasgsAUACCUGAGUAACUUUC | 1765 | ABE |
| GPTL | 918 | CCTGAGT | | gUUUUsAGagcuaGaaauagcaaGUUaA | | |
| 3 | | AACTTTC | | aAuAaggCUaGUCcGUUsAucAAcuu | | |
| | | | | GaaaaaguGgcaccgAgUCggugcuususu | | |
| | | | | UUU-3′ | | |
| mAN | GA00 | GAGATA | 241 | 5′gsasgsAUACCUGAGUAACUUUC | 2654 | ABE |
| GPTL | 919 | CCTGAGT | | gUUUUsAGagcuagaaauagcaaGUUaA | | |
| 3 | | AACTTTC | | aAuAaggcuaGUccGUUsAucAAcuuga | | |
| | | | | aaaagugGcaccgagucggugcuususuUUU | | |
| | | | | -3′ | | |
| mAN | GA00 | GAGATA | 241 | 5′gsasgsAUACCUGAGUAACUUUC | 2655 | ABE |
| GPTL | 920 | CCTGAGT | | gUUUUsAGagcuaGaaauagcaaGUUaA | | |
| 3 | | AACTTTC | | aAuAaggcuaGUccGUUsAucAAcuuG | | |
| | | | | aaaaagugGcaccgagucggugcuususuUU | | |
| | | | | U-3′ | | |
| mcPC | GA00 | CAGGTTC | 81 | 5′csasgsGUUCCAUGGGAUGCUCU | 1766 | SpCas |
| SK9 | 921 | CATGGG | | gUUUUsAGagcuaGaaauagcaaGUUaA | | 9 |
| | | ATGCTCT | | aAuAaggcuaGUccGUUsAucAAcuuG | | |
| | | | | aaaaagugGcaccgagucggugcuususuUU | | |
| | | | | U-3′ | | |
| mcPC | GA00 | CAGGTTC | 81 | 5′csasgsGUUCCAUGGGAUGCUCU | 2656 | SpCas |
| SK9 | 922 | CATGGG | | gUUUUsAGagcuagaaauagcaaGUUaA | | 9 |
| | | ATGCTCT | | aAuAaggCUaGUCcGUUsAucAAcuu | | |
| | | | | GaaaaaguGgcaccgAgUCggugcuususu | | |
| | | | | UUU-3′ | | |
| mcPC | GA00 | CAGGTTC | 81 | 5′csasgsGUUCCAUGGGAUGCUCU | 2657 | SpCas |
| SK9 | 923 | CATGGG | | gUUUUsAGagcuagaaauagcaaGUUaA | | 9 |
| | | ATGCTCT | | aAuAaggcuaGUccGUUsAucAAcuuG | | |
| | | | | aaaaaguGgcaccgAgUCggugcuususuU | | |
| | | | | UU-3′ | | |
| mcPC | GA00 | CAGGTTC | 81 | 5′csasgsGUUCCAUGGGAUGCUCU | 2658 | SpCas |
| SK9 | 924 | CATGGG | | gUUUUsAGagcuagaaauagcaaGUUaA | | 9 |
| | | ATGCTCT | | aAuAaggCUaGUCcGUUsAucAAcuu | | |
| | | | | gaaaaaguGgcaccgAgUCggugcuususuU | | |
| | | | | UU-3′ | | |
| mcPC | GA00 | CAGGTTC | 81 | 5′csasgsGUUCCAUGGGAUGCUCU | 2659 | SpCas |
| SK9 | 925 | CATGGG | | gUUUUsAGagcuagaaauagcaaGUUaA | | 9 |
| | | ATGCTCT | | aAuAaggCUaGUCcGUUsAucAAcuu | | |
| | | | | gaaaaaguGgcaccgAgUcggugcuususuU | | |
| | | | | UU-3′ | | |
| mcPC | GA00 | CAGGTTC | 81 | 5′csasgsGUUCCAUGGGAUGCUCU | 2657 | SpCas |
| SK9 | 926 | CATGGG | | gUUUUsAGagcuagaaauagcaaGUUaA | | 9 |
| | | ATGCTCT | | aAuAaggcuaGUccGUUsAucAAcuuG | | |
| | | | | aaaaaguGgcaccgAgUCggugcuususuU | | |
| | | | | UU-3′ | | |
| mcPC | GA00 | CAGGTTC | 81 | 5′csasgsGUUCCAUGGGAUGCUCU | 2660 | SpCas |
| SK9 | 927 | CATGGG | | gUUUUsAGagcuaGaaauagcaaGUUaA | | 9 |
| | | ATGCTCT | | aAuAaggCUaGUCcGUUsAucAAcuu | | |
| | | | | gaaaaaguGgcaccgAgUCggugcuususuU | | |
| | | | | UU-3′ | | |
| mcPC | GA00 | CAGGTTC | 81 | 5′csasgsGUUCCAUGGGAUGCUCU | 2661 | SpCas |
| SK9 | 928 | CATGGG | | gUUUUsAGagcuaGaaauagcaaGUUaA | | 9 |
| | | ATGCTCT | | aAuAaggCUaGUCcGUUsAucAAcuu | | |
| | | | | gaaaaaguGgcaccgAgUcggugcuususuU | | |
| | | | | UU-3′ | | |
| mcPC | GA00 | CAGGTTC | 81 | 5′csasgsGUUCCAUGGGAUGCUCU | 2662 | SpCas |
| SK9 | 929 | CATGGG | | gUUUUsAGagcuaGaaauagcaaGUUaA | | 9 |
| | | ATGCTCT | | aAuAaggcuaGUccGUUsAucAAcuuG | | |
| | | | | aaaaaguGgcaccgAgUCggugcuususuU | | |
| | | | | UU-3′ | | |
| mPCS | GA00 | CCCATAC | 69 | 5′cscscsAUACCUUGGAGCAACGGg | 1767 | ABE |
| K9 | 930 | CTTGGA | | UUUUsAGagcuaGaaauagcaaGUUsaA | | |
| | | GCAACG | | aAuAaggCUaGUCcGUUsAucAAcuu | | |
| | | G | | GaaaaaguGgcaccgAgUCggugcuususu | | |
| | | | | UUU-3′ | | |
| mPCS | GA00 | CCCATAC | 69 | 5′cscscsAUACCUUGGAGCAACGGg | 2663 | ABE |
| K9 | 931 | CTTGGA | | UUUUsAGagcuagaaauagcaaGUUsaA | | |
| | | GCAACG | | aAuAaggcuaGUccGUUsAucAAcuuga | | |
| | | G | | aaaagugGcaccgagucggugcuususuUUU | | |
| | | | | -3′ | | |
| mPCS | GA00 | CCCATAC | 69 | 5′cscscsAUACCUUGGAGCAACGGg | 2664 | ABE |
| K9 | 932 | CTTGGA | | UUUUsAGagcuaGaaauagcaaGUUsaA | | |
| | | GCAACG | | aAuAaggcuaGUccGUUsAucAAcuuG | | |
| | | G | | aaaaagugGcaccgagucggugcuususuUU | | |
| | | | | U-3′ | | |
| mAN | GA00 | GAGATA | 241 | 5′gsasgsAUACCUGAGUAACUUUC | 1768 | ABE |
| GPTL | 933 | CCTGAGT | | gUUUUsAGagcuaGaaauagcaaGUUsa | | |
| 3 | | AACTTTC | | AaAuAaggCUaGUCcGUUsAucAAcu | | |
| | | | | uGaaaaaguGgcaccgAgUCggugcuususu | | |
| | | | | UUU-3′ | | |
| mAN | GA00 | GAGATA | 241 | 5′gsasgsAUACCUGAGUAACUUUC | 2665 | ABE |
| GPTL | 934 | CCTGAGT | | gUUUUsAGagcuagaaauagcaaGUUsa | | |
| 3 | | AACTTTC | | AaAuAaggcuaGUccGUUsAucAAcuu | | |
| | | | | gaaaaagugGcaccgagucggugcuususuUU | | |
| | | | | U-3′ | | |
| mAN | GA00 | GAGATA | 241 | 5′gsasgsAUACCUGAGUAACUUUC | 2666 | ABE |
| GPTL | 935 | CCTGAGT | | gUUUUsAGagcuaGaaauagcaaGUUsa | | |
| 3 | | AACTTTC | | AaAuAaggcuaGUccGUUsAucAAcuu | | |
| | | | | GaaaaagugGcaccgagucggugcuususuU | | |
| | | | | UU-3′ | | |
| mcPC | GA00 | CAGGTTC | 81 | 5′csasgsGUUCCAUGGGAUGCUCU | 1769 | SpCas |
| SK9 | 936 | CATGGG | | gUUUUsAGagcuaGaaauagcaaGUUsa | | 9 |
| | | ATGCTCT | | AaAuAaggcuaGUccGUUsAucAAcuu | | |
| | | | | GaaaaagugGcaccgagucggugcuususuU | | |
| | | | | UU-3′ | | |
| mcPC | GA00 | CAGGTTC | 81 | 5′csasgsGUUCCAUGGGAUGCUCU | 2667 | SpCas |
| SK9 | 937 | CATGGG | | gUUUUsAGagcuagaaauagcaaGUUsa | | 9 |
| | | ATGCTCT | | AaAuAaggCUaGUCcGUUsAucAAcu | | |
| | | | | uGaaaaaguGgcaccgAgUCggugcuususu | | |
| | | | | UUU-3′ | | |
| mcPC | GA00 | CAGGTTC | 81 | 5′csasgsGUUCCAUGGGAUGCUCU | 2668 | SpCas |
| SK9 | 938 | CATGGG | | gUUUUsAGagcuagaaauagcaaGUUsa | | 9 |
| | | ATGCTCT | | AaAuAaggcuaGUccGUUsAucAAcuu | | |
| | | | | GaaaaaguGgcaccgAgUCggugcuususu | | |
| | | | | UUU-3′ | | |
| mcPC | GA00 | CAGGTTC | 81 | 5′csasgsGUUCCAUGGGAUGCUCU | 2669 | SpCas |
| SK9 | 939 | CATGGG | | gUUUUsAGagcuagaaauagcaaGUUsa | | 9 |
| | | ATGCTCT | | AaAuAaggCUaGUCcGUUsAucAAcu | | |
| | | | | ugaaaaaguGgcaccgAgUCggugcuususu | | |
| | | | | UUU-3′ | | |
| mcPC | GA00 | CAGGTTC | 81 | 5′csasgsGUUCCAUGGGAUGCUCU | 2670 | SpCas |
| SK9 | 940 | CATGGG | | gUUUUsAGagcuagaaauagcaaGUUsa | | 9 |
| | | ATGCTCT | | AaAuAaggCUaGUCcGUUsAucAAcu | | |
| | | | | ugaaaaaguGgcaccgAgUcggugcuususu | | |
| | | | | UUU-3′ | | |
| mcPC | GA00 | CAGGTTC | 81 | 5′csasgsGUUCCAUGGGAUGCUCU | 2668 | SpCas |
| SK9 | 941 | CATGGG | | gUUUUsAGagcuagaaauagcaaGUUsa | | 9 |
| | | ATGCTCT | | AaAuAaggcuaGUccGUUsAucAAcuu | | |
| | | | | GaaaaaguGgcaccgAgUCggugcuususu | | |
| | | | | UUU-3′ | | |
| mcPC | GA00 | CAGGTTC | 81 | 5′csasgsGUUCCAUGGGAUGCUCU | 2671 | SpCas |
| SK9 | 942 | CATGGG | | gUUUUsAGagcuaGaaauagcaaGUUsa | | 9 |
| | | ATGCTCT | | AaAuAaggCUaGUCcGUUsAucAAcu | | |
| | | | | ugaaaaaguGgcaccgAgUCggugcuususu | | |
| | | | | UUU-3′ | | |
| mcPC | GA00 | CAGGTTC | 81 | 5′csasgsGUUCCAUGGGAUGCUCU | 2672 | SpCas |
| SK9 | 943 | CATGGG | | gUUUUsAGagcuaGaaauagcaaGUUsa | | 9 |
| | | ATGCTCT | | AaAuAaggCUaGUCcGUUsAucAAcu | | |
| | | | | ugaaaaaguGgcaccgAgUcggugcuususu | | |
| | | | | UUU-3′ | | |
| mcPC | GA00 | CAGGTTC | 81 | 5′csasgsGUUCCAUGGGAUGCUCU | 2673 | SpCas |
| SK9 | 944 | CATGGG | | gUUUUsAGagcuaGaaauagcaaGUUsa | | 9 |
| | | ATGCTCT | | AaAuAaggcuaGUccGUUsAucAAcuu | | |
| | | | | GaaaaaguGgcaccgAgUCggugcuususu | | |
| | | | | UUU-3′ | | |
| mcPC | GA00 | CAGGTTC | 81 | 5′csasgGUUCCAUGGGAUGCUCUg | 1770 | SpCas |
| SK9 | 945 | CATGGG | | UUUUAGagcuaGaaauagcaaGUUaAa | | 9 |
| | | ATGCTCT | | AuAaggCUaGUCcGUUAucAAcuuGa | | |
| | | | | aaaaguGgcaccgAgUCggugcuususuUU | | |
| | | | | U-3 | | |
| mcPC | GA00 | CAGGTTC | 81 | 5′csasgGUUCCAUGGGAUGCUCUg | 1771 | SpCas |
| SK9 | 946 | CATGGG | | UUUUAGagcuagaaauagcaaGUUaAaA | | 9 |
| | | ATGCTCT | | uAaggcuaGUccGUUAucAAcuugaaaa | | |
| | | | | agugGcaccgagucggugcuususuUUU-3′ | | |
| mPCS | GA00 | CCCATAC | 69 | 5′cscscAUACCUUGGAGCAACGGg | 1772 | ABE |
| K9 | 947 | CTTGGA | | UUUUAGagcuaGaaauagcaaGUUaAa | | |
| | | GCAACG | | AuAaggCUaGUCcGUUAucAAcuuGa | | |
| | | G | | aaaaguGgcaccgAgUCggugcuususuUU | | |
| | | | | U-3′ | | |
| mPCS | GA00 | CCCATAC | 69 | 5′cscscAUACCUUGGAGCAACGGg | 2674 | ABE |
| K9 | 948 | CTTGGA | | UUUUAGagcuagaaauagcaaGUUaAaA | | |
| | | GCAACG | | uAaggcuaGUccGUUAucAAcuugaaaa | | |
| | | G | | agugGcaccgagucggugcuususuUUU-3′ | | |
| mPCS | GA00 | CCCATAC | 69 | 5′cscscAUACCUUGGAGCAACGGg | 2675 | ABE |
| K9 | 949 | CTTGGA | | UUUUAGagcuaGaaauagcaaGUUaAa | | |
| | | GCAACG | | AuAaggcuaGUccGUUAucAAcuuGaa | | |
| | | G | | aaagugGcaccgagucggugcuususuUUU- | | |
| | | | | 3′ | | |
| mAN | GA00 | GAGATA | 241 | 5′gsasgAUACCUGAGUAACUUUCg | 1773 | ABE |
| GPTL | 950 | CCTGAGT | | UUUUAGagcuaGaaauagcaaGUUaAa | | |
| 3 | | AACTTTC | | AuAaggCUaGUCcGUUAucAAcuuGa | | |
| | | | | aaaaguGgcaccgAgUCggugcuususuUU | | |
| | | | | U-3′ | | |
| mAN | GA00 | GAGATA | 241 | 5′gsasgAUACCUGAGUAACUUUCg | 2676 | ABE |
| GPTL | 951 | CCTGAGT | | UUUUAGagcuagaaauagcaaGUUaAaA | | |
| 3 | | AACTTTC | | uAaggcuaGUccGUUAucAAcuugaaaa | | |
| | | | | agugGcaccgagucggugcuususuUUU-3′ | | |
| mAN | GA00 | GAGATA | 241 | 5′gsasgAUACCUGAGUAACUUUCg | 2677 | ABE |
| GPTL | 952 | CCTGAGT | | UUUUAGagcuaGaaauagcaaGUUaAa | | |
| 3 | | AACTTTC | | AuAaggcuaGUccGUUAucAAcuuGaa | | |
| | | | | aaagugGcaccgagucggugcuususuUUU- | | |
| | | | | 3′ | | |
| mcPC | GA00 | CAGGTTC | 81 | 5′csasgGUUCCAUGGGAUGCUCUg | 2678 | SpCas |
| SK9 | 953 | CATGGG | | UUUUAGagcuaGaaauagcaaGUUaAa | | 9 |
| | | ATGCTCT | | AuAaggcuaGUccGUUAucAAcuuGaa | | |
| | | | | aaagugGcaccgagucggugcuususuUUU- | | |
| | | | | 3′ | | |
| mcPC | GA00 | CAGGTTC | 81 | 5′csasgGUUCCAUGGGAUGCUCUg | 2679 | SpCas |
| SK9 | 954 | CATGGG | | UUUUAGagcuagaaauagcaaGUUaAaA | | 9 |
| | | ATGCTCT | | uAaggCUaGUCcGUUAucAAcuuGaa | | |
| | | | | aaaguGgcaccgAgUCggugcuususuUU | | |
| | | | | U-3′ | | |
| mcPC | GA00 | CAGGTTC | 81 | 5′csasgGUUCCAUGGGAUGCUCUg | 2680 | SpCas |
| SK9 | 955 | CATGGG | | UUUUAGagcuagaaauagcaaGUUaAaA | | 9 |
| | | ATGCTCT | | uAaggcuaGUccGUUAucAAcuuGaaaa | | |
| | | | | aguGgcaccgAgUCggugcuususuUUU- | | |
| | | | | 3′ | | |
| mcPC | GA00 | CAGGTTC | 81 | 5′csasgGUUCCAUGGGAUGCUCUg | 2681 | SpCas |
| SK9 | 956 | CATGGG | | UUUUAGagcuagaaauagcaaGUUaAaA | | 9 |
| | | ATGCTCT | | uAaggCUaGUCcGUUAucAAcuugaaa | | |
| | | | | aaguGgcaccgAgUCggugcuususuUUU- | | |
| | | | | 3′ | | |
| mcPC | GA00 | CAGGTTC | 81 | 5′csasgGUUCCAUGGGAUGCUCUg | 2682 | SpCas |
| SK9 | 957 | CATGGG | | UUUUAGagcuagaaauagcaaGUUaAaA | | 9 |
| | | ATGCTCT | | uAaggCUaGUCcGUUAucAAcuugaaa | | |
| | | | | aaguGgcaccgAgUcggugcuususuUUU- | | |
| | | | | 3′ | | |
| mcPC | GA00 | CAGGTTC | 81 | 5′csasgGUUCCAUGGGAUGCUCUg | 2680 | SpCas |
| SK9 | 958 | CATGGG | | UUUUAGagcuagaaauagcaaGUUaAaA | | 9 |
| | | ATGCTCT | | uAaggcuaGUccGUUAucAAcuuGaaaa | | |
| | | | | aguGgcaccgAgUCggugcuususuUUU- | | |
| | | | | 3′ | | |
| mcPC | GA00 | CAGGTTC | 81 | 5′csasgGUUCCAUGGGAUGCUCUg | 2683 | SpCas |
| SK9 | 959 | CATGGG | | UUUUAGagcuaGaaauagcaaGUUaAa | | 9 |
| | | ATGCTCT | | AuAaggCUaGUCcGUUAucAAcuuga | | |
| | | | | aaaaguGgcaccgAgUCggugcuususuUU | | |
| | | | | U-3′ | | |
| mcPC | GA00 | CAGGTTC | 81 | 5′csasgGUUCCAUGGGAUGCUCUg | 2684 | SpCas |
| SK9 | 960 | CATGGG | | UUUUAGagcuaGaaauagcaaGUUaAa | | 9 |
| | | ATGCTCT | | AuAaggCUaGUCcGUUAucAAcuuga | | |
| | | | | aaaaguGgcaccgAgUcggugcuususuUU | | |
| | | | | U-3′ | | |
| mcPC | GA00 | CAGGTTC | 81 | 5′csasgGUUCCAUGGGAUGCUCUg | 2685 | SpCas |
| SK9 | 961 | CATGGG | | UUUUAGagcuaGaaauagcaaGUUaAa | | 9 |
| | | ATGCTCT | | AuAaggcuaGUccGUUAucAAcuuGaa | | |
| | | | | aaaguGgcaccgAgUCggugcuususuUU | | |
| | | | | U-3 | | |
| mPCS | GA00 | CCCATAC | 69 | 5′cscscAUACCUUGGAGCAACGGg | 1774 | ABE |
| K9 | 962 | CTTGGA | | UUUUAGagcuaGaaauagcaaGUUaAa | | |
| | | GCAACG | | AuAaggCUaGUCcGUUsAucAAcuuG | | |
| | | G | | aaaaaguGgcaccgAgUCggugcuususuU | | |
| | | | | UU-3′ | | |
| mPCS | GA00 | CCCATAC | 69 | 5′cscscAUACCUUGGAGCAACGGg | 2686 | ABE |
| K9 | 963 | CTTGGA | | UUUUAGagcuagaaauagcaaGUUaAaA | | |
| | | GCAACG | | uAaggcuaGUccGUUsAucAAcuugaaaa | | |
| | | G | | agugGcaccgagucggugcuususuUUU-3′ | | |
| mPCS | GA00 | CCCATAC | 69 | 5′cscscAUACCUUGGAGCAACGGg | 2687 | ABE |
| K9 | 964 | CTTGGA | | UUUUAGagcuaGaaauagcaaGUUaAa | | |
| | | GCAACG | | AuAaggcuaGUccGUUsAucAAcuuGa | | |
| | | G | | aaaagugGcaccgagucggugcuususuUUU | | |
| | | | | -3′ | | |
| mAN | GA00 | GAGATA | 241 | 5′gsasgAUACCUGAGUAACUUUCg | 1775 | ABE |
| GPTL | 965 | CCTGAGT | | UUUUAGagcuaGaaauagcaaGUUaAa | | |
| 3 | | AACTTTC | | AuAaggCUaGUCcGUUsAucAAcuuG | | |
| | | | | aaaaaguGgcaccgAgUCggugcuususuU | | |
| | | | | UU-3′ | | |
| mAN | GA00 | GAGATA | 241 | 5′gsasgAUACCUGAGUAACUUUCg | 2688 | ABE |
| GPTL | 966 | CCTGAGT | | UUUUAGagcuagaaauagcaaGUUaAaA | | |
| 3 | | AACTTTC | | uAaggcuaGUccGUUsAucAAcuugaaaa | | |
| | | | | agugGcaccgagucggugcuususuUUU-3′ | | |
| mAN | GA00 | GAGATA | 241 | 5′gsasgAUACCUGAGUAACUUUCg | 2689 | ABE |
| GPTL | 967 | CCTGAGT | | UUUUAGagcuaGaaauagcaaGUUaAa | | |
| 3 | | AACTTTC | | AuAaggcuaGUccGUUsAucAAcuuGa | | |
| | | | | aaaagugGcaccgagucggugcuususuUUU | | |
| | | | | -3′ | | |
| mcPC | GA00 | CAGGTTC | 81 | 5′csasgGUUCCAUGGGAUGCUCUg | 1776 | SpCas |
| SK9 | 968 | CATGGG | | UUUUAGagcuaGaaauagcaaGUUaAa | | 9 |
| | | ATGCTCT | | AuAaggcuaGUccGUUsAucAAcuuGa | | |
| | | | | aaaagugGcaccgagucggugcuususuUUU | | |
| | | | | -3′ | | |
| mcPC | GA00 | CAGGTTC | 81 | 5′csasgGUUCCAUGGGAUGCUCUg | 2690 | SpCas |
| SK9 | 969 | CATGGG | | UUUUAGagcuagaaauagcaaGUUaAaA | | 9 |
| | | ATGCTCT | | uAaggCUaGUCcGUUsAucAAcuuGaa | | |
| | | | | aaaguGgcaccgAgUCggugcuususuUU | | |
| | | | | U-3′ | | |
| mcPC | GA00 | CAGGTTC | 81 | 5′csasgGUUCCAUGGGAUGCUCUg | 2691 | SpCas |
| SK9 | 970 | CATGGG | | UUUUAGagcuagaaauagcaaGUUaAaA | | 9 |
| | | ATGCTCT | | uAaggcuaGUccGUUsAucAAcuuGaaa | | |
| | | | | aaguGgcaccgAgUCggugcuususuUUU- | | |
| | | | | 3′ | | |
| mcPC | GA00 | CAGGTTC | 81 | 5′csasgGUUCCAUGGGAUGCUCUg | 2692 | SpCas |
| SK9 | 971 | CATGGG | | UUUUAGagcuagaaauagcaaGUUaAaA | | 9 |
| | | ATGCTCT | | uAaggCUaGUCcGUUsAucAAcuugaa | | |
| | | | | aaaguGgcaccgAgUCggugcuususuUU | | |
| | | | | U-3′ | | |
| mcPC | GA00 | CAGGTTC | 81 | 5′csasgGUUCCAUGGGAUGCUCUg | 2693 | SpCas |
| SK9 | 972 | CATGGG | | UUUUAGagcuagaaauagcaaGUUaAaA | | 9 |
| | | ATGCTCT | | uAaggCUaGUCcGUUsAucAAcuugaa | | |
| | | | | aaaguGgcaccgAgUcggugcuususuUUU | | |
| | | | | -3′ | | |
| mcPC | GA00 | CAGGTTC | 81 | 5′csasgGUUCCAUGGGAUGCUCUg | 2691 | SpCas |
| SK9 | 973 | CATGGG | | UUUUAGagcuagaaauagcaaGUUaAaA | | 9 |
| | | ATGCTCT | | uAaggcuaGUccGUUsAucAAcuuGaaa | | |
| | | | | aaguGgcaccgAgUCggugcuususuUUU- | | |
| | | | | 3′ | | |
| mcPC | GA00 | CAGGTTC | 81 | 5′csasgGUUCCAUGGGAUGCUCUg | 2694 | SpCas |
| SK9 | 974 | CATGGG | | UUUUAGagcuaGaaauagcaaGUUaAa | | 9 |
| | | ATGCTCT | | AuAaggCUaGUCcGUUsAucAAcuug | | |
| | | | | aaaaaguGgcaccgAgUCggugcuususuU | | |
| | | | | UU-3′ | | |
| mcPC | GA00 | CAGGTTC | 81 | 5′csasgGUUCCAUGGGAUGCUCUg | 2695 | SpCas |
| SK9 | 975 | CATGGG | | UUUUAGagcuaGaaauagcaaGUUaAa | | 9 |
| | | ATGCTCT | | AuAaggCUaGUCcGUUsAucAAcuug | | |
| | | | | aaaaaguGgcaccgAgUcggugcuususuUU | | |
| | | | | U-3′ | | |
| mcPC | GA00 | CAGGTTC | 81 | 5′csasgGUUCCAUGGGAUGCUCUg | 2696 | SpCas |
| SK9 | 976 | CATGGG | | UUUUAGagcuaGaaauagcaaGUUaAa | | 9 |
| | | ATGCTCT | | AuAaggcuaGUccGUUsAucAAcuuGa | | |
| | | | | aaaaguGgcaccgAgUCggugcuususuUU | | |
| | | | | U-3′ | | |
| mPCS | GA00 | CCCATAC | 69 | 5′cscscAUACCUUGGAGCAACGGg | 1777 | ABE |
| K9 | 977 | CTTGGA | | UUUUAGagcuaGaaauagcaaGUUsaAa | | |
| | | GCAACG | | AuAaggCUaGUCcGUUAucAAcuuGa | | |
| | | G | | aaaaguGgcaccgAgUCggugcuususuUU | | |
| | | | | U-3′ | | |
| mPCS | GA00 | CCCATAC | 69 | 5′cscscAUACCUUGGAGCAACGGg | 2697 | ABE |
| K9 | 978 | CTTGGA | | UUUUAGagcuagaaauagcaaGUUsaAa | | |
| | | GCAACG | | AuAaggcuaGUccGUUAucAAcuugaaa | | |
| | | G | | aagugGcaccgagucggugcuususuUUU-3′ | | |
| mPCS | GA00 | CCCATAC | 69 | 5′cscscAUACCUUGGAGCAACGGg | 2698 | ABE |
| K9 | 979 | CTTGGA | | UUUUAGagcuaGaaauagcaaGUUsaAa | | |
| | | GCAACG | | AuAaggcuaGUccGUUAucAAcuuGaa | | |
| | | G | | aaagugGcaccgagucggugcuususuUUU- | | |
| | | | | 3′ | | |
| mAN | GA00 | GAGATA | 241 | 5′gsasgAUACCUGAGUAACUUUCg | 1778 | ABE |
| GPTL | 980 | CCTGAGT | | UUUUAGagcuaGaaauagcaaGUUsaAa | | |
| 3 | | AACTTTC | | AuAaggCUaGUCcGUUAucAAcuuGa | | |
| | | | | aaaaguGgcaccgAgUCggugcuususuUU | | |
| | | | | U-3′ | | |
| mAN | GA00 | GAGATA | 241 | 5′gsasgAUACCUGAGUAACUUUCg | 2699 | ABE |
| GPTL | 981 | CCTGAGT | | UUUUAGagcuagaaauagcaaGUUsaAa | | |
| 3 | | AACTTTC | | AuAaggcuaGUccGUUAucAAcuugaaa | | |
| | | | | aagugGcaccgagucggugcuususuUUU-3′ | | |
| mAN | GA00 | GAGATA | 241 | 5′gsasgAUACCUGAGUAACUUUCg | 1778 | ABE |
| GPTL | 982 | CCTGAGT | | UUUUAGagcuaGaaauagcaaGUUsaAa | | |
| 3 | | AACTTTC | | AuAaggCUaGUCcGUUAucAAcuuGa | | |
| | | | | aaaaguGgcaccgAgUCggugcuususuUU | | |
| | | | | U-3′ | | |
| mcPC | GA00 | CAGGTTC | 81 | 5′csasgGUUCCAUGGGAUGCUCUg | 1779 | SpCas |
| SK9 | 983 | CATGGG | | UUUUAGagcuaGaaauagcaaGUUsaAa | | 9 |
| | | ATGCTCT | | AuAaggcuaGUccGUUAucAAcuuGaa | | |
| | | | | aaagugGcaccgagucggugcuususuUUU- | | |
| | | | | 3′ | | |
| mcPC | GA00 | CAGGTTC | 81 | 5′csasgGUUCCAUGGGAUGCUCUg | 2700 | SpCas |
| SK9 | 984 | CATGGG | | UUUUAGagcuagaaauagcaaGUUsaAa | | 9 |
| | | ATGCTCT | | AuAaggCUaGUCcGUUAucAAcuuGa | | |
| | | | | aaaaguGgcaccgAgUCggugcuususuUU | | |
| | | | | U-3′ | | |
| mcPC | GA00 | CAGGTTC | 81 | 5′csasgGUUCCAUGGGAUGCUCUg | 2701 | SpCas |
| SK9 | 985 | CATGGG | | UUUUAGagcuagaaauagcaaGUUsaAa | | 9 |
| | | ATGCTCT | | AuAaggcuaGUccGUUAucAAcuuGaa | | |
| | | | | aaaguGgcaccgAgUCggugcuususuUU | | |
| | | | | U-3′ | | |
| mcPC | GA00 | CAGGTTC | 81 | 5′csasgGUUCCAUGGGAUGCUCUg | 2526 | SpCas |
| SK9 | 986 | CATGGG | | UUUUAGagcuagaaauagcaaGUUsaAa | | 9 |
| | | ATGCTCT | | AuAaggCUaGUCcGUUAucAAcuuga | | |
| | | | | aaaaguGgcaccgAgUCggugcusususuU | | |
| | | | | UU-3′ | | |
| mcPC | GA00 | CAGGTTC | 81 | 5′csasgGUUCCAUGGGAUGCUCUg | 2702 | SpCas |
| SK9 | 987 | CATGGG | | UUUUAGagcuagaaauagcaaGUUsaAa | | 9 |
| | | ATGCTCT | | AuAaggCUaGUCcGUUAucAAcuuga | | |
| | | | | aaaaguGgcaccgAgUcggugcuususuUU | | |
| | | | | U-3′ | | |
| mcPC | GA00 | CAGGTTC | 81 | 5′csasgGUUCCAUGGGAUGCUCUg | 2701 | SpCas |
| SK9 | 988 | CATGGG | | UUUUAGagcuagaaauagcaaGUUsaAa | | 9 |
| | | ATGCTCT | | AuAaggcuaGUccGUUAucAAcuuGaa | | |
| | | | | aaaguGgcaccgAgUCggugcuususuUU | | |
| | | | | U-3′ | | |
| mcPC | GA00 | CAGGTTC | 81 | 5′csasgGUUCCAUGGGAUGCUCUg | 2703 | SpCas |
| SK9 | 989 | CATGGG | | UUUUAGagcuaGaaauagcaaGUUsaAa | | 9 |
| | | ATGCTCT | | AuAaggCUaGUCcGUUAucAAcuuga | | |
| | | | | aaaaguGgcaccgAgUCggugcuususuUU | | |
| | | | | U-3′ | | |
| mcPC | GA00 | CAGGTTC | 81 | 5′csasgGUUCCAUGGGAUGCUCUg | 2704 | SpCas |
| SK9 | 990 | CATGGG | | UUUUAGagcuaGaaauagcaaGUUsaAa | | 9 |
| | | ATGCTCT | | AuAaggCUaGUCcGUUAucAAcuuga | | |
| | | | | aaaaguGgcaccgAgUcggugcuususuUU | | |
| | | | | U-3′ | | |
| mcPC | GA00 | CAGGTTC | 81 | 5′csasgGUUCCAUGGGAUGCUCUg | 2705 | SpCas |
| SK9 | 991 | CATGGG | | UUUUAGagcuaGaaauagcaaGUUsaAa | | 9 |
| | | ATGCTCT | | AuAaggcuaGUccGUUAucAAcuuGaa | | |
| | | | | aaaguGgcaccgAgUCggugcuususuUU | | |
| | | | | U-3′ | | |
| mPCS | GA00 | CCCATAC | 69 | 5′cscscAUACCUUGGAGCAACGGg | 1780 | ABE |
| K9 | 992 | CTTGGA | | UUUUsAGagcuaGaaauagcaaGUUaAa | | |
| | | GCAACG | | AuAaggCUaGUCcGUUAucAAcuuGa | | |
| | | G | | aaaaguGgcaccgAgUCggugcuususuUU | | |
| | | | | U-3′ | | |
| mPCS | GA00 | CCCATAC | 69 | 5′cscscAUACCUUGGAGCAACGGg | 2706 | ABE |
| K9 | 993 | CTTGGA | | UUUUsAGagcuagaaauagcaaGUUaAa | | |
| | | GCAACG | | AuAaggcuaGUccGUUAucAAcuugaaa | | |
| | | G | | aagugGcaccgagucggugcuususuUUU-3′ | | |
| mPCS | GA00 | CCCATAC | 69 | 5′cscscAUACCUUGGAGCAACGGg | 2707 | ABE |
| K9 | 994 | CTTGGA | | UUUUsAGagcuaGaaauagcaaGUUaAa | | |
| | | GCAACG | | AuAaggcuaGUccGUUAucAAcuuGaa | | |
| | | G | | aaagugGcaccgagucggugcuususuUUU- | | |
| | | | | 3′ | | |
| mAN | GA00 | GAGATA | 241 | 5′gsasgAUACCUGAGUAACUUUCg | 1781 | ABE |
| GPTL | 995 | CCTGAGT | | UUUUsAGagcuaGaaauagcaaGUUaAa | | |
| 3 | | AACTTTC | | AuAaggCUaGUCcGUUAucAAcuuGa | | |
| | | | | aaaaguGgcaccgAgUCggugcuususuUU | | |
| | | | | U-3′ | | |
| mAN | GA00 | GAGATA | 241 | 5′gsasgAUACCUGAGUAACUUUCg | 2708 | ABE |
| GPTL | 996 | CCTGAGT | | UUUUsAGagcuagaaauagcaaGUUaAa | | |
| 3 | | AACTTTC | | AuAaggcuaGUccGUUAucAAcuugaaa | | |
| | | | | aagugGcaccgagucggugcuususuUUU-3′ | | |
| mAN | GA00 | GAGATA | 241 | 5′gsasgAUACCUGAGUAACUUUCg | 2709 | ABE |
| GPTL | 997 | CCTGAGT | | UUUUsAGagcuaGaaauagcaaGUUaAa | | |
| 3 | | AACTTTC | | AuAaggcuaGUccGUUAucAAcuuGaa | | |
| | | | | aaagugGcaccgagucggugcuususuUUU- | | |
| | | | | 3′ | | |
| mcPC | GA00 | CAGGTTC | 81 | 5′csasgGUUCCAUGGGAUGCUCUg | 1782 | SpCas |
| SK9 | 998 | CATGGG | | UUUUsAGagcuaGaaauagcaaGUUaAa | | 9 |
| | | ATGCTCT | | AuAaggcuaGUccGUUAucAAcuuGaa | | |
| | | | | aaagugGcaccgagucggugcuususuUUU- | | |
| | | | | 3′ | | |
| mcPC | GA00 | CAGGTTC | 81 | 5′csasgGUUCCAUGGGAUGCUCUg | 2710 | SpCas |
| SK9 | 999 | CATGGG | | UUUUsAGagcuagaaauagcaaGUUaAa | | 9 |
| | | ATGCTCT | | AuAaggCUaGUCcGUUAucAAcuuGa | | |
| | | | | aaaaguGgcaccgAgUCggugcuususuUU | | |
| | | | | U-3′ | | |
| mcPC | GA01 | CAGGTTC | 81 | 5′csasgGUUCCAUGGGAUGCUCUg | 2711 | SpCas |
| SK9 | 000 | CATGGG | | UUUUsAGagcuagaaauagcaaGUUaAa | | 9 |
| | | ATGCTCT | | AuAaggcuaGUccGUUAucAAcuuGaa | | |
| | | | | aaaguGgcaccgAgUCggugcuususuUU | | |
| | | | | U-3′ | | |
| mcPC | GA01 | CAGGTTC | 81 | 5′csasgGUUCCAUGGGAUGCUCUg | 2712 | SpCas |
| SK9 | 001 | CATGGG | | UUUUsAGagcuagaaauagcaaGUUaAa | | 9 |
| | | ATGCTCT | | AuAaggCUaGUCcGUUAucAAcuuga | | |
| | | | | aaaaguGgcaccgAgUCggugcuususuUU | | |
| | | | | U-3′ | | |
| mcPC | GA01 | CAGGTTC | 81 | 5′csasgGUUCCAUGGGAUGCUCUg | 2713 | SpCas |
| SK9 | 002 | CATGGG | | UUUUsAGagcuagaaauagcaaGUUaAa | | 9 |
| | | ATGCTCT | | AuAaggCUaGUCcGUUAucAAcuuga | | |
| | | | | aaaaguGgcaccgAgUcggugcuususuUU | | |
| | | | | U-3′ | | |
| mcPC | GA01 | CAGGTTC | 81 | 5′csasgGUUCCAUGGGAUGCUCUg | 2711 | SpCas |
| SK9 | 003 | CATGGG | | UUUUsAGagcuagaaauagcaaGUUaAa | | 9 |
| | | ATGCTCT | | AuAaggcuaGUccGUUAucAAcuuGaa | | |
| | | | | aaaguGgcaccgAgUCggugcuususuUU | | |
| | | | | U-3′ | | |
| mcPC | GA01 | CAGGTTC | 81 | 5′csasgGUUCCAUGGGAUGCUCUg | 2539 | SpCas |
| SK9 | 004 | CATGGG | | UUUUsAGagcuaGaaauagcaaGUUaAa | | 9 |
| | | ATGCTCT | | AuAaggCUaGUCcGUUAucAAcuuga | | |
| | | | | aaaaguGgcaccgAgUCggugcusususuU | | |
| | | | | UU-3′ | | |
| mcPC | GA01 | CAGGTTC | 81 | 5′csasgGUUCCAUGGGAUGCUCUg | 2714 | SpCas |
| SK9 | 005 | CATGGG | | UUUUsAGagcuaGaaauagcaaGUUaAa | | 9 |
| | | ATGCTCT | | AuAaggCUaGUCcGUUAucAAcuuga | | |
| | | | | aaaaguGgcaccgAgUcggugcuususuUU | | |
| | | | | U-3′ | | |
| mcPC | GA01 | CAGGTTC | 81 | 5′csasgGUUCCAUGGGAUGCUCUg | 2715 | SpCas |
| SK9 | 006 | CATGGG | | UUUUsAGagcuaGaaauagcaaGUUaAa | | 9 |
| | | ATGCTCT | | AuAaggcuaGUccGUUAucAAcuuGaa | | |
| | | | | aaaguGgcaccgAgUCggugcuususuUU | | |
| | | | | U-3′ | | |
| mPCS | GA01 | CCCATAC | 69 | 5′cscscAUACCUUGGAGCAACGGg | 1783 | ABE |
| K9 | 007 | CTTGGA | | UUUUAGagcuaGaaauagcaaGUUsaAa | | |
| | | GCAACG | | AuAaggCUaGUCcGUUsAucAAcuuG | | |
| | | G | | aaaaaguGgcaccgAgUCggugcuususuU | | |
| | | | | UU-3′ | | |
| mPCS | GA01 | CCCATAC | 69 | 5′cscscAUACCUUGGAGCAACGGg | 2716 | ABE |
| K9 | 008 | CTTGGA | | UUUUAGagcuagaaauagcaaGUUsaAa | | |
| | | GCAACG | | AuAaggcuaGUccGUUsAucAAcuugaa | | |
| | | G | | aaagugGcaccgagucggugcuususuUUU- | | |
| | | | | 3′ | | |
| mPCS | GA01 | CCCATAC | 69 | 5′cscscAUACCUUGGAGCAACGGg | 2717 | ABE |
| K9 | 009 | CTTGGA | | UUUUAGagcuaGaaauagcaaGUUsaAa | | |
| | | GCAACG | | AuAaggcuaGUccGUUsAucAAcuuGa | | |
| | | G | | aaaagugGcaccgagucggugcuususuUUU | | |
| | | | | -3′ | | |
| mAN | GA01 | GAGATA | 241 | 5′gsasgAUACCUGAGUAACUUUCg | 1784 | ABE |
| GPTL | 010 | CCTGAGT | | UUUUAGagcuaGaaauagcaaGUUsaAa | | |
| 3 | | AACTTTC | | AuAaggCUaGUCcGUUsAucAAcuuG | | |
| | | | | aaaaaguGgcaccgAgUCggugcuususuU | | |
| | | | | UU-3′ | | |
| mAN | GA01 | GAGATA | 241 | 5′gsasgAUACCUGAGUAACUUUCg | 2718 | ABE |
| GPTL | 011 | CCTGAGT | | UUUUAGagcuagaaauagcaaGUUsaAa | | |
| 3 | | AACTTTC | | AuAaggcuaGUccGUUsAucAAcuugaa | | |
| | | | | aaagugGcaccgagucggugcuususuUUU- | | |
| | | | | 3′ | | |
| mAN | GA01 | GAGATA | 241 | 5′gsasgAUACCUGAGUAACUUUCg | 2719 | ABE |
| GPTL | 012 | CCTGAGT | | UUUUAGagcuaGaaauagcaaGUUsaAa | | |
| 3 | | AACTTTC | | AuAaggcuaGUccGUUsAucAAcuuGa | | |
| | | | | aaaagugGcaccgagucggugcuususuUUU | | |
| | | | | -3′ | | |
| mcPC | GA01 | CAGGTTC | 81 | 5′csasgGUUCCAUGGGAUGCUCUg | 1785 | SpCas |
| SK9 | 013 | CATGGG | | UUUUAGagcuaGaaauagcaaGUUsaAa | | 9 |
| | | ATGCTCT | | AuAaggcuaGUccGUUsAucAAcuuGa | | |
| | | | | aaaagugGcaccgagucggugcuususuUUU | | |
| | | | | -3′ | | |
| mcPC | GA01 | CAGGTTC | 81 | 5′csasgGUUCCAUGGGAUGCUCUg | 2720 | SpCas |
| SK9 | 014 | CATGGG | | UUUUAGagcuagaaauagcaaGUUsaAa | | 9 |
| | | ATGCTCT | | AuAaggCUaGUCcGUUsAucAAcuuG | | |
| | | | | aaaaaguGgcaccgAgUCggugcuususuU | | |
| | | | | UU-3′ | | |
| mcPC | GA01 | CAGGTTC | 81 | 5′csasgGUUCCAUGGGAUGCUCUg | 2721 | SpCas |
| SK9 | 015 | CATGGG | | UUUUAGagcuagaaauagcaaGUUsaAa | | 9 |
| | | ATGCTCT | | AuAaggcuaGUccGUUsAucAAcuuGa | | |
| | | | | aaaaguGgcaccgAgUCggugcuususuUU | | |
| | | | | U-3′ | | |
| mcPC | GA01 | CAGGTTC | 81 | 5′csasgGUUCCAUGGGAUGCUCUg | 2722 | SpCas |
| SK9 | 016 | CATGGG | | UUUUAGagcuagaaauagcaaGUUsaAa | | 9 |
| | | ATGCTCT | | AuAaggCUaGUCcGUUsAucAAcuug | | |
| | | | | aaaaaguGgcaccgAgUCggugcuususuU | | |
| | | | | UU-3′ | | |
| mcPC | GA01 | CAGGTTC | 81 | 5′csasgGUUCCAUGGGAUGCUCUg | 2549 | SpCas |
| SK9 | 017 | CATGGG | | UUUUAGagcuagaaauagcaaGUUsaAa | | 9 |
| | | ATGCTCT | | AuAaggCUaGUCcGUUsAucAAcuug | | |
| | | | | aaaaaguGgcaccgAgUcggugcusususuU | | |
| | | | | UU-3′ | | |
| mcPC | GA01 | CAGGTTC | 81 | 5′csasgGUUCCAUGGGAUGCUCUg | 2721 | SpCas |
| SK9 | 018 | CATGGG | | UUUUAGagcuagaaauagcaaGUUsaAa | | 9 |
| | | ATGCTCT | | AuAaggcuaGUccGUUsAucAAcuuGa | | |
| | | | | aaaaguGgcaccgAgUCggugcuususuUU | | |
| | | | | U-3′ | | |
| mcPC | GA01 | CAGGTTC | 81 | 5′csasgGUUCCAUGGGAUGCUCUg | 2723 | SpCas |
| SK9 | 019 | CATGGG | | UUUUAGagcuaGaaauagcaaGUUsaAa | | 9 |
| | | ATGCTCT | | AuAaggCUaGUCcGUUsAucAAcuug | | |
| | | | | aaaaaguGgcaccgAgUCggugcuususuU | | |
| | | | | UU-3′ | | |
| mcPC | GA01 | CAGGTTC | 81 | 5′csasgGUUCCAUGGGAUGCUCUg | 2724 | SpCas |
| SK9 | 020 | CATGGG | | UUUUAGagcuaGaaauagcaaGUUsaAa | | 9 |
| | | ATGCTCT | | AuAaggCUaGUCcGUUsAucAAcuug | | |
| | | | | aaaaaguGgcaccgAgUcggugcuususuUU | | |
| | | | | U-3′ | | |
| mcPC | GA01 | CAGGTTC | 81 | 5′csasgGUUCCAUGGGAUGCUCUg | 2725 | SpCas |
| SK9 | 021 | CATGGG | | UUUUAGagcuaGaaauagcaaGUUsaAa | | 9 |
| | | ATGCTCT | | AuAaggcuaGUccGUUsAucAAcuuGa | | |
| | | | | aaaaguGgcaccgAgUCggugcuususuUU | | |
| | | | | U-3′ | | |
| mPCS | GA01 | CCCATAC | 69 | 5′cscscAUACCUUGGAGCAACGGg | 1786 | ABE |
| K9 | 022 | CTTGGA | | UUUUsAGagcuaGaaauagcaaGUUsaA | | |
| | | GCAACG | | aAuAaggCUaGUCcGUUAucAAcuuG | | |
| | | G | | aaaaaguGgcaccgAgUCggugcuususuU | | |
| | | | | UU-3′ | | |
| mPCS | GA01 | CCCATAC | 69 | 5′cscscAUACCUUGGAGCAACGGg | 2726 | ABE |
| K9 | 023 | CTTGGA | | UUUUsAGagcuagaaauagcaaGUUsaA | | |
| | | GCAACG | | aAuAaggcuaGUccGUUAucAAcuugaa | | |
| | | G | | aaagugGcaccgagucggugcuususuUUU- | | |
| | | | | 3′ | | |
| mPCS | GA01 | CCCATAC | 69 | 5′cscscAUACCUUGGAGCAACGGg | 2727 | ABE |
| K9 | 024 | CTTGGA | | UUUUsAGagcuaGaaauagcaaGUUsaA | | |
| | | GCAACG | | aAuAaggcuaGUccGUUAucAAcuuGa | | |
| | | G | | aaaagugGcaccgagucggugcuususuUUU | | |
| | | | | -3′ | | |
| mAN | GA01 | GAGATA | 241 | 5′gsasgAUACCUGAGUAACUUUCg | 1787 | ABE |
| GPTL | 025 | CCTGAGT | | UUUUsAGagcuaGaaauagcaaGUUsaA | | |
| 3 | | AACTTTC | | aAuAaggCUaGUCcGUUAucAAcuuG | | |
| | | | | aaaaaguGgcaccgAgUCggugcuususuU | | |
| | | | | UU-3′ | | |
| mAN | GA01 | GAGATA | 241 | 5′gsasgAUACCUGAGUAACUUUCg | 2728 | ABE |
| GPTL | 026 | CCTGAGT | | UUUUsAGagcuagaaauagcaaGUUsaA | | |
| 3 | | AACTTTC | | aAuAaggcuaGUccGUUAucAAcuugaa | | |
| | | | | aaagugGcaccgagucggugcuususuUUU- | | |
| | | | | 3′ | | |
| mAN | GA01 | GAGATA | 241 | 5′gsasgAUACCUGAGUAACUUUCg | 2729 | ABE |
| GPTL | 027 | CCTGAGT | | UUUUsAGagcuaGaaauagcaaGUUsaA | | |
| 3 | | AACTTTC | | aAuAaggcuaGUccGUUAucAAcuuGa | | |
| | | | | aaaagugGcaccgagucggugcuususuUUU | | |
| | | | | -3′ | | |
| mcPC | GA01 | CAGGTTC | 81 | 5′csasgGUUCCAUGGGAUGCUCUg | 1788 | SpCas |
| SK9 | 028 | CATGGG | | UUUUsAGagcuaGaaauagcaaGUUsaA | | 9 |
| | | ATGCTCT | | aAuAaggcuaGUccGUUAucAAcuuGa | | |
| | | | | aaaagugGcaccgagucggugcuususuUUU | | |
| | | | | -3′ | | |
| mcPC | GA01 | CAGGTTC | 81 | 5′csasgGUUCCAUGGGAUGCUCUg | 2730 | SpCas |
| SK9 | 029 | CATGGG | | UUUUsAGagcuagaaauagcaaGUUsaA | | 9 |
| | | ATGCTCT | | aAuAaggCUaGUCcGUUAucAAcuuG | | |
| | | | | aaaaaguGgcaccgAgUCggugcuususuU | | |
| | | | | UU-3′ | | |
| mcPC | GA01 | CAGGTTC | 81 | 5′csasgGUUCCAUGGGAUGCUCUg | 2731 | SpCas |
| SK9 | 030 | CATGGG | | UUUUsAGagcuagaaauagcaaGUUsaA | | 9 |
| | | ATGCTCT | | aAuAaggcuaGUccGUUAucAAcuuGa | | |
| | | | | aaaaguGgcaccgAgUCggugcuususuUU | | |
| | | | | U-3′ | | |
| mcPC | GA01 | CAGGTTC | 81 | 5′csasgGUUCCAUGGGAUGCUCUg | 2732 | SpCas |
| SK9 | 031 | CATGGG | | UUUUsAGagcuagaaauagcaaGUUsaA | | 9 |
| | | ATGCTCT | | aAuAaggCUaGUCcGUUAucAAcuug | | |
| | | | | aaaaaguGgcaccgAgUCggugcuususuU | | |
| | | | | UU-3′ | | |
| mcPC | GA01 | CAGGTTC | 81 | 5′csasgGUUCCAUGGGAUGCUCUg | 2733 | SpCas |
| SK9 | 032 | CATGGG | | UUUUsAGagcuagaaauagcaaGUUsaA | | 9 |
| | | ATGCTCT | | aAuAaggCUaGUCcGUUAucAAcuug | | |
| | | | | aaaaaguGgcaccgAgUcggugcuususuUU | | |
| | | | | U-3′ | | |
| mcPC | GA01 | CAGGTTC | 81 | 5′csasgGUUCCAUGGGAUGCUCUg | 2558 | SpCas |
| SK9 | 033 | CATGGG | | UUUUsAGagcuagaaauagcaaGUUsaA | | 9 |
| | | ATGCTCT | | aAuAaggcuaGUccGUUAucAAcuuGa | | |
| | | | | aaaaguGgcaccgAgUCggugcusususuU | | |
| | | | | UU-3′ | | |
| mcPC | GA01 | CAGGTTC | 81 | 5′csasgGUUCCAUGGGAUGCUCUg | 2734 | SpCas |
| SK9 | 034 | CATGGG | | UUUUsAGagcuaGaaauagcaaGUUsaA | | 9 |
| | | ATGCTCT | | aAuAaggCUaGUCcGUUAucAAcuug | | |
| | | | | aaaaaguGgcaccgAgUCggugcuususuU | | |
| | | | | UU-3′ | | |
| mcPC | GA01 | CAGGTTC | 81 | 5′csasgGUUCCAUGGGAUGCUCUg | 2735 | SpCas |
| SK9 | 035 | CATGGG | | UUUUsAGagcuaGaaauagcaaGUUsaA | | 9 |
| | | ATGCTCT | | aAuAaggCUaGUCcGUUAucAAcuug | | |
| | | | | aaaaaguGgcaccgAgUcggugcuususuUU | | |
| | | | | U-3′ | | |
| mcPC | GA01 | CAGGTTC | 81 | 5′csasgGUUCCAUGGGAUGCUCUg | 2736 | SpCas |
| SK9 | 036 | CATGGG | | UUUUsAGagcuaGaaauagcaaGUUsaA | | 9 |
| | | ATGCTCT | | aAuAaggcuaGUccGUUAucAAcuuGa | | |
| | | | | aaaaguGgcaccgAgUCggugcuususuUU | | |
| | | | | U-3′ | | |
| mPCS | GA01 | CCCATAC | 69 | 5′cscscAUACCUUGGAGCAACGGg | 1789 | ABE |
| K9 | 037 | CTTGGA | | UUUUsAGagcuaGaaauagcaaGUUaAa | | |
| | | GCAACG | | AuAaggCUaGUCcGUUsAucAAcuuG | | |
| | | G | | aaaaaguGgcaccgAgUCggugcuususuU | | |
| | | | | UU-3′ | | |
| mPCS | GA01 | CCCATAC | 69 | 5′cscscAUACCUUGGAGCAACGGg | 2737 | ABE |
| K9 | 038 | CTTGGA | | UUUUsAGagcuagaaauagcaaGUUaAa | | |
| | | GCAACG | | AuAaggcuaGUccGUUsAucAAcuugaa | | |
| | | G | | aaagugGcaccgagucggugcuususuUUU- | | |
| | | | | 3′ | | |
| mPCS | GA01 | CCCATAC | 69 | 5′cscscAUACCUUGGAGCAACGGg | 2738 | ABE |
| K9 | 039 | CTTGGA | | UUUUsAGagcuaGaaauagcaaGUUaAa | | |
| | | GCAACG | | AuAaggcuaGUccGUUsAucAAcuuGa | | |
| | | G | | aaaagugGcaccgagucggugcuususuUUU | | |
| | | | | -3′ | | |
| mAN | GA01 | GAGATA | 241 | 5′gsasgAUACCUGAGUAACUUUCg | 1790 | ABE |
| GPTL | 040 | CCTGAGT | | UUUUsAGagcuaGaaauagcaaGUUaAa | | |
| 3 | | AACTTTC | | AuAaggCUaGUCcGUUsAucAAcuuG | | |
| | | | | aaaaaguGgcaccgAgUCggugcuususuU | | |
| | | | | UU-3′ | | |
| mAN | GA01 | GAGATA | 241 | 5′gsasgAUACCUGAGUAACUUUCg | 2739 | ABE |
| GPTL | 041 | CCTGAGT | | UUUUsAGagcuagaaauagcaaGUUaAa | | |
| 3 | | AACTTTC | | AuAaggcuaGUccGUUsAucAAcuugaa | | |
| | | | | aaagugGcaccgagucggugcuususuUUU- | | |
| | | | | 3′ | | |
| mAN | GA01 | GAGATA | 241 | 5′gsasgAUACCUGAGUAACUUUCg | 2740 | ABE |
| GPTL | 042 | CCTGAGT | | UUUUsAGagcuaGaaauagcaaGUUaAa | | |
| 3 | | AACTTTC | | AuAaggcuaGUccGUUsAucAAcuuGa | | |
| | | | | aaaagugGcaccgagucggugcuususuUUU | | |
| | | | | -3′ | | |
| mcPC | GA01 | CAGGTTC | 81 | 5′csasgGUUCCAUGGGAUGCUCUg | 1791 | SpCas |
| SK9 | 043 | CATGGG | | UUUUsAGagcuaGaaauagcaaGUUaAa | | 9 |
| | | ATGCTCT | | AuAaggcuaGUccGUUsAucAAcuuGa | | |
| | | | | aaaagugGcaccgagucggugcuususuUUU | | |
| | | | | -3′ | | |
| mcPC | GA01 | CAGGTTC | 81 | 5′csasgGUUCCAUGGGAUGCUCUg | 2741 | SpCas |
| SK9 | 044 | CATGGG | | UUUUsAGagcuagaaauagcaaGUUaAa | | 9 |
| | | ATGCTCT | | AuAaggCUaGUCcGUUsAucAAcuuG | | |
| | | | | aaaaaguGgcaccgAgUCggugcuususuU | | |
| | | | | UU-3′ | | |
| mcPC | GA01 | CAGGTTC | 81 | 5′csasgGUUCCAUGGGAUGCUCUg | 2742 | SpCas |
| SK9 | 045 | CATGGG | | UUUUsAGagcuagaaauagcaaGUUaAa | | 9 |
| | | ATGCTCT | | AuAaggcuaGUccGUUsAucAAcuuGa | | |
| | | | | aaaaguGgcaccgAgUCggugcuususuUU | | |
| | | | | U-3′ | | |
| mcPC | GA01 | CAGGTTC | 81 | 5′csasgGUUCCAUGGGAUGCUCUg | 2743 | SpCas |
| SK9 | 046 | CATGGG | | UUUUsAGagcuagaaauagcaaGUUaAa | | 9 |
| | | ATGCTCT | | AuAaggCUaGUCcGUUsAucAAcuug | | |
| | | | | aaaaaguGgcaccgAgUCggugcuususuU | | |
| | | | | UU-3′ | | |
| mcPC | GA01 | CAGGTTC | 81 | 5′csasgGUUCCAUGGGAUGCUCUg | 2744 | SpCas |
| SK9 | 047 | CATGGG | | UUUUsAGagcuagaaauagcaaGUUaAa | | 9 |
| | | ATGCTCT | | AuAaggCUaGUCcGUUsAucAAcuug | | |
| | | | | aaaaaguGgcaccgAgUcggugcuususuUU | | |
| | | | | U-3′ | | |
| mcPC | GA01 | CAGGTTC | 81 | 5′csasgGUUCCAUGGGAUGCUCUg | 2742 | SpCas |
| SK9 | 048 | CATGGG | | UUUUsAGagcuagaaauagcaaGUUaAa | | 9 |
| | | ATGCTCT | | AuAaggcuaGUccGUUsAucAAcuuGa | | |
| | | | | aaaaguGgcaccgAgUCggugcuususuUU | | |
| | | | | U-3′ | | |
| mcPC | GA01 | CAGGTTC | 81 | 5′csasgGUUCCAUGGGAUGCUCUg | 2745 | SpCas |
| SK9 | 049 | CATGGG | | UUUUsAGagcuaGaaauagcaaGUUaAa | | 9 |
| | | ATGCTCT | | AuAaggCUaGUCcGUUsAucAAcuug | | |
| | | | | aaaaaguGgcaccgAgUCggugcuususuU | | |
| | | | | UU-3′ | | |
| mcPC | GA01 | CAGGTTC | 81 | 5′csasgGUUCCAUGGGAUGCUCUg | 2746 | SpCas |
| SK9 | 050 | CATGGG | | UUUUsAGagcuaGaaauagcaaGUUaAa | | 9 |
| | | ATGCTCT | | AuAaggCUaGUCcGUUsAucAAcuug | | |
| | | | | aaaaaguGgcaccgAgUcggugcuususuUU | | |
| | | | | U-3′ | | |
| mcPC | GA01 | CAGGTTC | 81 | 5′csasgGUUCCAUGGGAUGCUCUg | 2747 | SpCas |
| SK9 | 051 | CATGGG | | UUUUsAGagcuaGaaauagcaaGUUaAa | | 9 |
| | | ATGCTCT | | AuAaggcuaGUccGUUsAucAAcuuGa | | |
| | | | | aaaaguGgcaccgAgUCggugcuususuUU | | |
| | | | | U-3′ | | |
| mPCS | GA01 | CCCATAC | 69 | 5′cscscAUACCUUGGAGCAACGGg | 1792 | ABE |
| K9 | 052 | CTTGGA | | UUUUsAGagcuaGaaauagcaaGUUsaA | | |
| | | GCAACG | | aAuAaggCUaGUCcGUUsAucAAcuu | | |
| | | G | | GaaaaaguGgcaccgAgUCggugcuususu | | |
| | | | | UUU-3′ | | |
| mPCS | GA01 | CCCATAC | 69 | 5′cscscAUACCUUGGAGCAACGGg | 2748 | ABE |
| K9 | 053 | CTTGGA | | UUUUsAGagcuagaaauagcaaGUUsaA | | |
| | | GCAACG | | aAuAaggcuaGUccGUUsAucAAcuuga | | |
| | | G | | aaaagugGcaccgagucggugcuususuUUU | | |
| | | | | -3′ | | |
| mPCS | GA01 | CCCATAC | 69 | 5′cscscAUACCUUGGAGCAACGGg | 2749 | ABE |
| K9 | 054 | CTTGGA | | UUUUsAGagcuaGaaauagcaaGUUsaA | | |
| | | GCAACG | | aAuAaggcuaGUccGUUsAucAAcuuG | | |
| | | G | | aaaaagugGcaccgagucggugcuususuUU | | |
| | | | | U-3′ | | |
| mAN | GA01 | GAGATA | 241 | 5′gsasgAUACCUGAGUAACUUUCg | 1793 | ABE |
| GPTL | 055 | CCTGAGT | | UUUUsAGagcuaGaaauagcaaGUUsaA | | |
| 3 | | AACTTTC | | aAuAaggCUaGUCcGUUsAucAAcuu | | |
| | | | | GaaaaaguGgcaccgAgUCggugcuususu | | |
| | | | | UUU-3′ | | |
| mAN | GA01 | GAGATA | 241 | 5′gsasgAUACCUGAGUAACUUUCg | 2750 | ABE |
| GPTL | 056 | CCTGAGT | | UUUUsAGagcuagaaauagcaaGUUsaA | | |
| 3 | | AACTTTC | | aAuAaggcuaGUccGUUsAucAAcuuga | | |
| | | | | aaaagugGcaccgagucggugcuususuUUU | | |
| | | | | -3′ | | |
| mAN | GA01 | GAGATA | 241 | 5′gsasgAUACCUGAGUAACUUUCg | 2751 | ABE |
| GPTL | 057 | CCTGAGT | | UUUUsAGagcuaGaaauagcaaGUUsaA | | |
| 3 | | AACTTTC | | aAuAaggcuaGUccGUUsAucAAcuuG | | |
| | | | | aaaaagugGcaccgagucggugcuususuUU | | |
| | | | | U-3′ | | |
| mcPC | GA01 | CAGGTTC | 81 | 5′csasgGUUCCAUGGGAUGCUCUg | 1794 | SpCas |
| SK9 | 058 | CATGGG | | UUUUsAGagcuaGaaauagcaaGUUsaA | | 9 |
| | | ATGCTCT | | aAuAaggcuaGUccGUUsAucAAcuuG | | |
| | | | | aaaaagugGcaccgagucggugcuususuUU | | |
| | | | | U-3′ | | |
| mcPC | GA01 | CAGGTTC | 81 | 5′csasgGUUCCAUGGGAUGCUCUg | 2752 | SpCas |
| SK9 | 059 | CATGGG | | UUUUsAGagcuagaaauagcaaGUUsaA | | 9 |
| | | ATGCTCT | | aAuAaggCUaGUCcGUUsAucAAcuu | | |
| | | | | GaaaaaguGgcaccgAgUCggugcuususu | | |
| | | | | UUU-3′ | | |
| mcPC | GA01 | CAGGTTC | 81 | 5′csasgGUUCCAUGGGAUGCUCUg | 2753 | SpCas |
| SK9 | 060 | CATGGG | | UUUUsAGagcuagaaauagcaaGUUsaA | | 9 |
| | | ATGCTCT | | aAuAaggcuaGUccGUUsAucAAcuuG | | |
| | | | | aaaaaguGgcaccgAgUCggugcuususuU | | |
| | | | | UU-3′ | | |
| mcPC | GA01 | CAGGTTC | 81 | 5′csasgGUUCCAUGGGAUGCUCUg | 2754 | SpCas |
| SK9 | 061 | CATGGG | | UUUUsAGagcuagaaauagcaaGUUsaA | | 9 |
| | | ATGCTCT | | aAuAaggCUaGUCcGUUsAucAAcuu | | |
| | | | | gaaaaaguGgcaccgAgUCggugcuususuU | | |
| | | | | UU-3′ | | |
| mcPC | GA01 | CAGGTTC | 81 | 5′csasgGUUCCAUGGGAUGCUCUg | 2755 | SpCas |
| SK9 | 062 | CATGGG | | UUUUsAGagcuagaaauagcaaGUUsaA | | 9 |
| | | ATGCTCT | | aAuAaggCUaGUCcGUUsAucAAcuu | | |
| | | | | gaaaaaguGgcaccgAgUcggugcuususuU | | |
| | | | | UU-3′ | | |
| mcPC | GA01 | CAGGTTC | 81 | 5′csasgGUUCCAUGGGAUGCUCUg | 2753 | SpCas |
| SK9 | 063 | CATGGG | | UUUUsAGagcuagaaauagcaaGUUsaA | | 9 |
| | | ATGCTCT | | aAuAaggcuaGUccGUUsAucAAcuuG | | |
| | | | | aaaaaguGgcaccgAgUCggugcuususuU | | |
| | | | | UU-3′ | | |
| mcPC | GA01 | CAGGTTC | 81 | 5′csasgGUUCCAUGGGAUGCUCUg | 2756 | SpCas |
| SK9 | 064 | CATGGG | | UUUUsAGagcuaGaaauagcaaGUUsaA | | 9 |
| | | ATGCTCT | | aAuAaggCUaGUCcGUUsAucAAcuu | | |
| | | | | gaaaaaguGgcaccgAgUCggugcuususuU | | |
| | | | | UU-3′ | | |
| mcPC | GA01 | CAGGTTC | 81 | 5′csasgGUUCCAUGGGAUGCUCUg | 2757 | SpCas |
| SK9 | 065 | CATGGG | | UUUUsAGagcuaGaaauagcaaGUUsaA | | 9 |
| | | ATGCTCT | | aAuAaggCUaGUCcGUUsAucAAcuu | | |
| | | | | gaaaaaguGgcaccgAgUcggugcuususuU | | |
| | | | | UU-3′ | | |
| mcPC | GA01 | CAGGTTC | 81 | 5′csasgGUUCCAUGGGAUGCUCUg | 2758 | SpCas |
| SK9 | 066 | CATGGG | | UUUUsAGagcuaGaaauagcaaGUUsaA | | 9 |
| | | ATGCTCT | | aAuAaggcuaGUccGUUsAucAAcuuG | | |
| | | | | aaaaaguGgcaccgAgUCggugcuususuU | | |
| | | | | UU-3′ | | |
| mPCS | GA01 | CCCATAC | 69 | 5′cscscsAUACCUUGGAGCAACGGg | 1795 | ABE |
| K9 | 067 | CTTGGA | | UUUUAGagcuaGaaauagcaaGUUaAa | | |
| | | GCAACG | | AuAaggCUaGUCcGUUAucAAcuuGa | | |
| | | G | | aaaaguGgcaccgAgUCggugcusususuN | | |
| | | | | NN-3′ | | |
| mPCS | GA01 | CCCATAC | 69 | 5′cscscsAUACCUUGGAGCAACGGg | 2759 | ABE |
| K9 | 068 | CTTGGA | | UUUUAGagcuagaaauagcaaGUUaAaA | | |
| | | GCAACG | | uAaggcuaGUccGUUAucAAcuugaaaa | | |
| | | G | | agugGcaccgagucggugcusususuNNN-3′ | | |
| mPCS | GA01 | CCCATAC | 69 | 5′cscscsAUACCUUGGAGCAACGGg | 2760 | ABE |
| K9 | 069 | CTTGGA | | UUUUAGagcuaGaaauagcaaGUUaAa | | |
| | | GCAACG | | AuAaggcuaGUccGUUAucAAcuuGaa | | |
| | | G | | aaagugGcaccgagucggugcusususuNNN | | |
| | | | | -3′ | | |
| mAN | GA01 | GAGATA | 241 | 5′gsasgsAUACCUGAGUAACUUUC | 1796 | ABE |
| GPTL | 070 | CCTGAGT | | gUUUUAGagcuaGaaauagcaaGUUaAa | | |
| 3 | | AACTTTC | | AuAaggCUaGUCcGUUAucAAcuuGa | | |
| | | | | aaaaguGgcaccgAgUCggugcusususuN | | |
| | | | | NN-3′ | | |
| mAN | GA01 | GAGATA | 241 | 5′gsasgsAUACCUGAGUAACUUUC | 2761 | ABE |
| GPTL | 071 | CCTGAGT | | gUUUUAGagcuagaaauagcaaGUUaAa | | |
| 3 | | AACTTTC | | AuAaggcuaGUccGUUAucAAcuugaaa | | |
| | | | | aagugGcaccgagucggugcusususuNNN- | | |
| | | | | 3′ | | |
| mAN | GA01 | GAGATA | 241 | 5′gsasgsAUACCUGAGUAACUUUC | 2762 | ABE |
| GPTL | 072 | CCTGAGT | | gUUUUAGagcuaGaaauagcaaGUUaAa | | |
| 3 | | AACTTTC | | AuAaggcuaGUccGUUAucAAcuuGaa | | |
| | | | | aaagugGcaccgagucggugcusususuNNN | | |
| | | | | -3′ | | |
| mcPC | GA01 | CAGGTTC | 81 | 5′csasgsGUUCCAUGGGAUGCUCU | 1797 | SpCas |
| SK9 | 073 | CATGGG | | gUUUUAGagcuaGaaauagcaaGUUaAa | | 9 |
| | | ATGCTCT | | AuAaggcuaGUccGUUAucAAcuuGaa | | |
| | | | | aaagugGcaccgagucggugcusususuNNN | | |
| | | | | -3′ | | |
| mcPC | GA01 | CAGGTTC | 81 | 5′csasgsGUUCCAUGGGAUGCUCU | 2763 | SpCas |
| SK9 | 074 | CATGGG | | gUUUUAGagcuagaaauagcaaGUUaAa | | 9 |
| | | ATGCTCT | | AuAaggCUaGUCcGUUAucAAcuuGa | | |
| | | | | aaaaguGgcaccgAgUCggugcusususuN | | |
| | | | | NN-3′ | | |
| mcPC | GA01 | CAGGTTC | 81 | 5′csasgsGUUCCAUGGGAUGCUCU | 2764 | SpCas |
| SK9 | 075 | CATGGG | | gUUUUAGagcuagaaauagcaaGUUaAa | | 9 |
| | | ATGCTCT | | AuAaggcuaGUccGUUAucAAcuuGaa | | |
| | | | | aaaguGgcaccgAgUCggugcusususuNN | | |
| | | | | N-3′ | | |
| mcPC | GA01 | CAGGTTC | 81 | 5′csasgsGUUCCAUGGGAUGCUCU | 2765 | SpCas |
| SK9 | 076 | CATGGG | | gUUUUAGagcuagaaauagcaaGUUaAa | | 9 |
| | | ATGCTCT | | AuAaggCUaGUCcGUUAucAAcuuga | | |
| | | | | aaaaguGgcaccgAgUCggugcusususuN | | |
| | | | | NN-3′ | | |
| mcPC | GA01 | CAGGTTC | 81 | 5′csasgsGUUCCAUGGGAUGCUCU | 2766 | SpCas |
| SK9 | 077 | CATGGG | | gUUUUAGagcuagaaauagcaaGUUaAa | | 9 |
| | | ATGCTCT | | AuAaggCUaGUCcGUUAucAAcuuga | | |
| | | | | aaaaguGgcaccgAgUcggugcusususuNN | | |
| | | | | N-3′ | | |
| mcPC | GA01 | CAGGTTC | 81 | 5′csasgsGUUCCAUGGGAUGCUCU | 2764 | SpCas |
| SK9 | 078 | CATGGG | | gUUUUAGagcuagaaauagcaaGUUaAa | | 9 |
| | | ATGCTCT | | AuAaggcuaGUccGUUAucAAcuuGaa | | |
| | | | | aaaguGgcaccgAgUCggugcusususuNN | | |
| | | | | N-3′ | | |
| mcPC | GA01 | CAGGTTC | 81 | 5′csasgsGUUCCAUGGGAUGCUCU | 2767 | SpCas |
| SK9 | 079 | CATGGG | | gUUUUAGagcuaGaaauagcaaGUUaAa | | 9 |
| | | ATGCTCT | | AuAaggCUaGUCcGUUAucAAcuuga | | |
| | | | | aaaaguGgcaccgAgUCggugcusususuN | | |
| | | | | NN-3′ | | |
| mcPC | GA01 | CAGGTTC | 81 | 5′csasgsGUUCCAUGGGAUGCUCU | 2768 | SpCas |
| SK9 | 080 | CATGGG | | gUUUUAGagcuaGaaauagcaaGUUaAa | | 9 |
| | | ATGCTCT | | AuAaggCUaGUCcGUUAucAAcuuga | | |
| | | | | aaaaguGgcaccgAgUcggugcusususuNN | | |
| | | | | N-3′ | | |
| mcPC | GA01 | CAGGTTC | 81 | 5′csasgsGUUCCAUGGGAUGCUCU | 2769 | SpCas |
| SK9 | 081 | CATGGG | | gUUUUAGagcuaGaaauagcaaGUUaAa | | 9 |
| | | ATGCTCT | | AuAaggcuaGUccGUUAucAAcuuGaa | | |
| | | | | aaaguGgcaccgAgUCggugcusususuNN | | |
| | | | | N-3′ | | |
| mPCS | GA01 | CCCATAC | 69 | 5′cscscsAUACCUUGGAGCAACGGg | 1798 | ABE |
| K9 | 082 | CTTGGA | | UUUUAGagcuaGaaauagcaaGUUaAa | | |
| | | GCAACG | | AuAaggCUaGUCcGUUsAucAAcuuG | | |
| | | G | | aaaaaguGgcaccgAgUCggugcusususuN | | |
| | | | | NN-3′ | | |
| mPCS | GA01 | CCCATAC | 69 | 5′cscscsAUACCUUGGAGCAACGGg | 2770 | ABE |
| K9 | 083 | CTTGGA | | UUUUAGagcuagaaauagcaaGUUaAaA | | |
| | | GCAACG | | uAaggcuaGUccGUUsAucAAcuugaaaa | | |
| | | G | | agugGcaccgagucggugcusususuNNN-3′ | | |
| mPCS | GA01 | CCCATAC | 69 | 5′cscscsAUACCUUGGAGCAACGGg | 2771 | ABE |
| K9 | 084 | CTTGGA | | UUUUAGagcuaGaaauagcaaGUUaAa | | |
| | | GCAACG | | AuAaggcuaGUccGUUsAucAAcuuGa | | |
| | | G | | aaaagugGcaccgagucggugcusususuNN | | |
| | | | | N-3′ | | |
| mAN | GA01 | GAGATA | 241 | 5′gsasgsAUACCUGAGUAACUUUC | 1799 | ABE |
| GPTL | 085 | CCTGAGT | | gUUUUAGagcuaGaaauagcaaGUUaAa | | |
| 3 | | AACTTTC | | AuAaggCUaGUCcGUUsAucAAcuuG | | |
| | | | | aaaaaguGgcaccgAgUCggugcusususuN | | |
| | | | | NN-3′ | | |
| mAN | GA01 | GAGATA | 241 | 5′gsasgsAUACCUGAGUAACUUUC | 2772 | ABE |
| GPTL | 086 | CCTGAGT | | gUUUUAGagcuagaaauagcaaGUUaAa | | |
| 3 | | AACTTTC | | AuAaggcuaGUccGUUsAucAAcuugaa | | |
| | | | | aaagugGcaccgagucggugcusususuNNN | | |
| | | | | -3′ | | |
| mAN | GA01 | GAGATA | 241 | 5′gsasgsAUACCUGAGUAACUUUC | 2773 | ABE |
| GPTL | 087 | CCTGAGT | | gUUUUAGagcuaGaaauagcaaGUUaAa | | |
| 3 | | AACTTTC | | AuAaggcuaGUccGUUsAucAAcuuGa | | |
| | | | | aaaagugGcaccgagucggugcusususuNN | | |
| | | | | N-3′ | | |
| mcPC | GA01 | CAGGTTC | 81 | 5′csasgsGUUCCAUGGGAUGCUCU | 1800 | SpCas |
| SK9 | 088 | CATGGG | | gUUUUAGagcuaGaaauagcaaGUUaAa | | 9 |
| | | ATGCTCT | | AuAaggcuaGUccGUUsAucAAcuuGa | | |
| | | | | aaaagugGcaccgagucggugcusususuNN | | |
| | | | | N-3′ | | |
| mcPC | GA01 | CAGGTTC | 81 | 5′csasgsGUUCCAUGGGAUGCUCU | 2774 | SpCas |
| SK9 | 089 | CATGGG | | gUUUUAGagcuagaaauagcaaGUUaAa | | 9 |
| | | ATGCTCT | | AuAaggCUaGUCcGUUsAucAAcuuG | | |
| | | | | NN-3′ | | |
| mcPC | GA01 | CAGGTTC | 81 | 5′csasgsGUUCCAUGGGAUGCUCU | 2775 | SpCas |
| SK9 | 090 | CATGGG | | gUUUUAGagcuagaaauagcaaGUUaAa | | 9 |
| | | ATGCTCT | | AuAaggcuaGUccGUUsAucAAcuuGa | | |
| | | | | NN-3′ | | |
| mcPC | GA01 | CAGGTTC | 81 | 5′csasgsGUUCCAUGGGAUGCUCU | 2776 | SpCas |
| SK9 | 091 | CATGGG | | gUUUUAGagcuagaaauagcaaGUUaAa | | 9 |
| | | ATGCTCT | | AuAaggCUaGUCcGUUsAucAAcuug | | |
| | | | | aaaaaguGgcaccgAgUCggugcusususuN | | |
| | | | | NN-3′ | | |
| mcPC | GA01 | CAGGTTC | 81 | 5′csasgsGUUCCAUGGGAUGCUCU | 2777 | SpCas |
| SK9 | 092 | CATGGG | | gUUUUAGagcuagaaauagcaaGUUaAa | | 9 |
| | | ATGCTCT | | AuAaggCUaGUCcGUUsAucAAcuug | | |
| | | | | aaaaaguGgcaccgAgUcggugcusususuN | | |
| | | | | NN-3′ | | |
| mcPC | GA01 | CAGGTTC | 81 | 5′csasgsGUUCCAUGGGAUGCUCU | 2775 | SpCas |
| SK9 | 093 | CATGGG | | gUUUUAGagcuagaaauagcaaGUUaAa | | 9 |
| | | ATGCTCT | | AuAaggcuaGUccGUUsAucAAcuuGa | | |
| | | | | aaaaguGgcaccgAgUCggugcusususuN | | |
| | | | | NN-3′ | | |
| mcPC | GA01 | CAGGTTC | 81 | 5′csasgsGUUCCAUGGGAUGCUCU | 2778 | SpCas |
| SK9 | 094 | CATGGG | | gUUUUAGagcuaGaaauagcaaGUUaAa | | 9 |
| | | ATGCTCT | | AuAaggCUaGUCcGUUsAucAAcuug | | |
| | | | | aaaaaguGgcaccgAgUCggugcusususuN | | |
| | | | | NN-3′ | | |
| mcPC | GA01 | CAGGTTC | 81 | 5′csasgsGUUCCAUGGGAUGCUCU | 2779 | SpCas |
| SK9 | 095 | CATGGG | | gUUUUAGagcuaGaaauagcaaGUUaAa | | 9 |
| | | ATGCTCT | | AuAaggCUaGUCcGUUsAucAAcuug | | |
| | | | | aaaaaguGgcaccgAgUcggugcusususuN | | |
| | | | | NN-3′ | | |
| mcPC | GA01 | CAGGTTC | 81 | 5′csasgsGUUCCAUGGGAUGCUCU | 2780 | SpCas |
| SK9 | 096 | CATGGG | | gUUUUAGagcuaGaaauagcaaGUUaAa | | 9 |
| | | ATGCTCT | | AuAaggcuaGUccGUUsAucAAcuuGa | | |
| | | | | aaaaguGgcaccgAgUCggugcusususuN | | |
| | | | | NN-3′ | | |
| mPCS | GA01 | CCCATAC | 69 | 5′cscscsAUACCUUGGAGCAACGGg | 1802 | ABE |
| K9 | 097 | CTTGGA | | UUUUAGagcuaGaaauagcaaGUUsaAa | | |
| | | GCAACG | | AuAaggCUaGUCcGUUAucAAcuuGa | | |
| | | G | | aaaaguGgcaccgAgUCggugcusususuN | | |
| | | | | NN-3′ | | |
| mPCS | GA01 | CCCATAC | 69 | 5′cscscsAUACCUUGGAGCAACGGg | 2781 | ABE |
| K9 | 098 | CTTGGA | | UUUUAGagcuagaaauagcaaGUUsaAa | | |
| | | GCAACG | | AuAaggcuaGUccGUUAucAAcuugaaa | | |
| | | G | | aagugGcaccgagucggugcusususuNNN- | | |
| | | | | 3 | | |
| mPCS | GA01 | CCCATAC | 69 | 5′cscscsAUACCUUGGAGCAACGGg | 2782 | ABE |
| K9 | 099 | CTTGGA | | UUUUAGagcuaGaaauagcaaGUUsaAa | | |
| | | GCAACG | | AuAaggcuaGUccGUUAucAAcuuGaa | | |
| | | G | | aaagugGcaccgagucggugcusususuNNN | | |
| | | | | -3′ | | |
| mAN | GA01 | GAGATA | 241 | 5′gsasgsAUACCUGAGUAACUUUC | 1803 | ABE |
| GPTL | 100 | CCTGAGT | | gUUUUAGagcuaGaaauagcaaGUUsaA | | |
| 3 | | AACTTTC | | aAuAaggCUaGUCcGUUAucAAcuuG | | |
| | | | | aaaaaguGgcaccgAgUCggugcusususuN | | |
| | | | | NN-3′ | | |
| mAN | GA01 | GAGATA | 241 | 5′gsasgsAUACCUGAGUAACUUUC | 2783 | ABE |
| GPTL | 101 | CCTGAGT | | gUUUUAGagcuagaaauagcaaGUUsaA | | |
| 3 | | AACTTTC | | aAuAaggcuaGUccGUUAucAAcuugaa | | |
| | | | | aaagugGcaccgagucggugcusususuNNN | | |
| | | | | -3′ | | |
| mAN | GA01 | GAGATA | 241 | 5′gsasgsAUACCUGAGUAACUUUC | 2784 | ABE |
| GPTL | 102 | CCTGAGT | | gUUUUAGagcuaGaaauagcaaGUUsaA | | |
| 3 | | AACTTTC | | aAuAaggcuaGUccGUUAucAAcuuGa | | |
| | | | | aaaagugGcaccgagucggugcusususuNN | | |
| | | | | N-3′ | | |
| mcPC | GA01 | CAGGTTC | 81 | 5′csasgsGUUCCAUGGGAUGCUCU | 1804 | SpCas |
| SK9 | 103 | CATGGG | | gUUUUAGagcuaGaaauagcaaGUUsaA | | 9 |
| | | ATGCTCT | | aAuAaggcuaGUccGUUAucAAcuuGa | | |
| | | | | aaaagugGcaccgagucggugcusususuNN | | |
| | | | | N-3′ | | |
| mcPC | GA01 | CAGGTTC | 81 | 5′csasgsGUUCCAUGGGAUGCUCU | 2785 | SpCas |
| SK9 | 104 | CATGGG | | gUUUUAGagcuagaaauagcaaGUUsaA | | 9 |
| | | ATGCTCT | | aAuAaggCUaGUCcGUUAucAAcuuG | | |
| | | | | aaaaaguGgcaccgAgUCggugcusususuN | | |
| | | | | NN-3′ | | |
| mcPC | GA01 | CAGGTTC | 81 | 5′csasgsGUUCCAUGGGAUGCUCU | 2786 | SpCas |
| SK9 | 105 | CATGGG | | gUUUUAGagcuagaaauagcaaGUUsaA | | 9 |
| | | ATGCTCT | | aAuAaggcuaGUccGUUAucAAcuuGa | | |
| | | | | NN-3′ | | |
| mcPC | GA01 | CAGGTTC | 81 | 5′csasgsGUUCCAUGGGAUGCUCU | 2787 | SpCas |
| SK9 | 106 | CATGGG | | gUUUUAGagcuagaaauagcaaGUUsaA | | 9 |
| | | ATGCTCT | | aAuAaggCUaGUCcGUUAucAAcuug | | |
| | | | | NN-3′ | | |
| mcPC | GA01 | CAGGTTC | 81 | 5′csasgsGUUCCAUGGGAUGCUCU | 2788 | SpCas |
| SK9 | 107 | CATGGG | | gUUUUAGagcuagaaauagcaaGUUsaA | | 9 |
| | | ATGCTCT | | aAuAaggCUaGUCcGUUAucAAcuug | | |
| | | | | NN-3′ | | |
| mcPC | GA01 | CAGGTTC | 81 | 5′csasgsGUUCCAUGGGAUGCUCU | 2786 | SpCas |
| SK9 | 108 | CATGGG | | gUUUUAGagcuagaaauagcaaGUUsaA | | 9 |
| | | ATGCTCT | | aAuAaggcuaGUccGUUAucAAcuuGa | | |
| | | | | aaaaguGgcaccgAgUCggugcusususuN | | |
| | | | | NN-3′ | | |
| mcPC | GA01 | CAGGTTC | 81 | 5′csasgsGUUCCAUGGGAUGCUCU | 2789 | SpCas |
| SK9 | 109 | CATGGG | | gUUUUAGagcuaGaaauagcaaGUUsaA | | 9 |
| | | ATGCTCT | | aAuAaggCUaGUCcGUUAucAAcuug | | |
| | | | | NN-3′ | | |
| mcPC | GA01 | CAGGTTC | 81 | 5′csasgsGUUCCAUGGGAUGCUCU | 2790 | SpCas |
| SK9 | 110 | CATGGG | | gUUUUAGagcuaGaaauagcaaGUUsaA | | 9 |
| | | ATGCTCT | | aAuAaggCUaGUCcGUUAucAAcuug | | |
| | | | | aaaaaguGgcaccgAgUcggugcusususuN | | |
| | | | | NN-3′ | | |
| mcPC | GA01 | CAGGTTC | 81 | 5′csasgsGUUCCAUGGGAUGCUCU | 2791 | SpCas |
| SK9 | 111 | CATGGG | | gUUUUAGagcuaGaaauagcaaGUUsaA | | 9 |
| | | ATGCTCT | | aAuAaggcuaGUccGUUAucAAcuuGa | | |
| | | | | aaaaguGgcaccgAgUCggugcusususuN | | |
| | | | | NN-3′ | | |
| mPCS | GA01 | CCCATAC | 69 | 5′cscscsAUACCUUGGAGCAACGGg | 1805 | ABE |
| K9 | 112 | CTTGGA | | UUUUsAGagcuaGaaauagcaaGUUaAa | | |
| | | GCAACG | | AuAaggCUaGUCcGUUAucAAcuuGa | | |
| | | G | | aaaaguGgcaccgAgUCggugcusususuN | | |
| | | | | NN-3′ | | |
| mPCS | GA01 | CCCATAC | 69 | 5′cscscsAUACCUUGGAGCAACGGg | 2792 | ABE |
| K9 | 113 | CTTGGA | | UUUUsAGagcuagaaauagcaaGUUaAa | | |
| | | GCAACG | | AuAaggcuaGUccGUUAucAAcuugaaa | | |
| | | G | | aagugGcaccgagucggugcusususuNNN- | | |
| | | | | 3′ | | |
| mPCS | GA01 | CCCATAC | 69 | 5′cscscsAUACCUUGGAGCAACGGg | 2793 | ABE |
| K9 | 114 | CTTGGA | | UUUUsAGagcuaGaaauagcaaGUUaAa | | |
| | | GCAACG | | AuAaggcuaGUccGUUAucAAcuuGaa | | |
| | | G | | aaagugGcaccgagucggugcusususuNNN | | |
| | | | | -3′ | | |
| mAN | GA01 | GAGATA | 241 | 5′gsasgsAUACCUGAGUAACUUUC | 1806 | ABE |
| GPTL | 115 | CCTGAGT | | gUUUUsAGagcuaGaaauagcaaGUUaA | | |
| 3 | | AACTTTC | | aAuAaggCUaGUCcGUUAucAAcuuG | | |
| | | | | aaaaaguGgcaccgAgUCggugcusususuN | | |
| | | | | NN-3′ | | |
| mAN | GA01 | GAGATA | 241 | 5′gsasgsAUACCUGAGUAACUUUC | 2794 | ABE |
| GPTL | 116 | CCTGAGT | | gUUUUsAGagcuagaaauagcaaGUUaA | | |
| 3 | | AACTTTC | | aAuAaggcuaGUccGUUAucAAcuugaa | | |
| | | | | aaagugGcaccgagucggugcusususuNNN | | |
| | | | | -3′ | | |
| mAN | GA01 | GAGATA | 241 | 5′gsasgsAUACCUGAGUAACUUUC | 2795 | ABE |
| GPTL | 117 | CCTGAGT | | gUUUUsAGagcuaGaaauagcaaGUUaA | | |
| 3 | | AACTTTC | | aAuAaggcuaGUccGUUAucAAcuuGa | | |
| | | | | aaaagugGcaccgagucggugcusususuNN | | |
| | | | | N-3′ | | |
| mcPC | GA01 | CAGGTTC | 81 | 5′csasgsGUUCCAUGGGAUGCUCU | 1807 | SpCas |
| SK9 | 118 | CATGGG | | gUUUUsAGagcuaGaaauagcaaGUUaA | | 9 |
| | | ATGCTCT | | aAuAaggcuaGUccGUUAucAAcuuGa | | |
| | | | | aaaagugGcaccgagucggugcusususuNN | | |
| | | | | N-3′ | | |
| mcPC | GA01 | CAGGTTC | 81 | 5′csasgsGUUCCAUGGGAUGCUCU | 2796 | SpCas |
| SK9 | 119 | CATGGG | | gUUUUsAGagcuagaaauagcaaGUUaA | | 9 |
| | | ATGCTCT | | aAuAaggCUaGUCcGUUAucAAcuuG | | |
| | | | | aaaaaguGgcaccgAgUCggugcusususuN | | |
| | | | | NN-3′ | | |
| mcPC | GA01 | CAGGTTC | 81 | 5′csasgsGUUCCAUGGGAUGCUCU | 2797 | SpCas |
| SK9 | 120 | CATGGG | | gUUUUsAGagcuagaaauagcaaGUUaA | | 9 |
| | | ATGCTCT | | aAuAaggcuaGUccGUUAucAAcuuGa | | |
| | | | | aaaaguGgcaccgAgUCggugcusususuN | | |
| | | | | NN-3′ | | |
| mcPC | GA01 | CAGGTTC | 81 | 5′csasgsGUUCCAUGGGAUGCUCU | 2798 | SpCas |
| SK9 | 121 | CATGGG | | gUUUUsAGagcuagaaauagcaaGUUaA | | 9 |
| | | ATGCTCT | | aAuAaggCUaGUCcGUUAucAAcuug | | |
| | | | | aaaaaguGgcaccgAgUCggugcusususuN | | |
| | | | | NN-3′ | | |
| mcPC | GA01 | CAGGTTC | 81 | 5′csasgsGUUCCAUGGGAUGCUCU | 2799 | SpCas |
| SK9 | 122 | CATGGG | | gUUUUsAGagcuagaaauagcaaGUUaA | | 9 |
| | | ATGCTCT | | aAuAaggCUaGUCcGUUAucAAcuug | | |
| | | | | aaaaaguGgcaccgAgUcggugcusususuN | | |
| | | | | NN-3′ | | |
| mcPC | GA01 | CAGGTTC | 81 | 5′csasgsGUUCCAUGGGAUGCUCU | 2797 | SpCas |
| SK9 | 123 | CATGGG | | gUUUUsAGagcuagaaauagcaaGUUaA | | 9 |
| | | ATGCTCT | | aAuAaggcuaGUccGUUAucAAcuuGa | | |
| | | | | aaaaguGgcaccgAgUCggugcusususuN | | |
| | | | | NN-3′ | | |
| mcPC | GA01 | CAGGTTC | 81 | 5′csasgsGUUCCAUGGGAUGCUCU | 2800 | SpCas |
| SK9 | 124 | CATGGG | | gUUUUsAGagcuaGaaauagcaaGUUaA | | 9 |
| | | ATGCTCT | | aAuAaggCUaGUCcGUUAucAAcuug | | |
| | | | | NN-3′ | | |
| mcPC | GA01 | CAGGTTC | 81 | 5′csasgsGUUCCAUGGGAUGCUCU | 2801 | SpCas |
| SK9 | 125 | CATGGG | | gUUUUsAGagcuaGaaauagcaaGUUaA | | 9 |
| | | ATGCTCT | | aAuAaggCUaGUCcGUUAucAAcuug | | |
| | | | | aaaaaguGgcaccgAgUcggugcusususuN | | |
| | | | | NN-3′ | | |
| mcPC | GA01 | CAGGTTC | 81 | 5′csasgsGUUCCAUGGGAUGCUCU | 2802 | SpCas |
| SK9 | 126 | CATGGG | | gUUUUsAGagcuaGaaauagcaaGUUaA | | 9 |
| | | ATGCTCT | | aAuAaggcuaGUccGUUAucAAcuuGa | | |
| | | | | aaaaguGgcaccgAgUCggugcusususuN | | |
| | | | | NN-3′ | | |
| mPCS | GA01 | CCCATAC | 69 | 5′cscscsAUACCUUGGAGCAACGGg | 1808 | ABE |
| K9 | 127 | CTTGGA | | UUUUAGagcuaGaaauagcaaGUUsaAa | | |
| | | GCAACG | | AuAaggCUaGUCcGUUsAucAAcuuG | | |
| | | G | | aaaaaguGgcaccgAgUCggugcusususuN | | |
| | | | | NN-3′ | | |
| mPCS | GA01 | CCCATAC | 69 | 5′cscscsAUACCUUGGAGCAACGGg | 2803 | ABE |
| K9 | 128 | CTTGGA | | UUUUAGagcuagaaauagcaaGUUsaAa | | |
| | | GCAACG | | AuAaggcuaGUccGUUsAucAAcuugaa | | |
| | | G | | aaagugGcaccgagucggugcusususuNNN | | |
| | | | | -3′ | | |
| mPCS | GA01 | CCCATAC | 69 | 5′cscscsAUACCUUGGAGCAACGGg | 2804 | ABE |
| K9 | 129 | CTTGGA | | UUUUAGagcuaGaaauagcaaGUUsaAa | | |
| | | GCAACG | | AuAaggcuaGUccGUUsAucAAcuuGa | | |
| | | G | | aaaagugGcaccgagucggugcusususuNN | | |
| | | | | N-3′ | | |
| mAN | GA01 | GAGATA | 241 | 5′gsasgsAUACCUGAGUAACUUUC | 1809 | ABE |
| GPTL | 130 | CCTGAGT | | gUUUUAGagcuaGaaauagcaaGUUsaA | | |
| 3 | | AACTTTC | | aAuAaggCUaGUCcGUUsAucAAcuu | | |
| | | | | GaaaaaguGgcaccgAgUCggugcusususu | | |
| | | | | NNN-3′ | | |
| mAN | GA01 | GAGATA | 241 | 5′gsasgsAUACCUGAGUAACUUUC | 2805 | ABE |
| GPTL | 131 | CCTGAGT | | gUUUUAGagcuagaaauagcaaGUUsaA | | |
| 3 | | AACTTTC | | aAuAaggcuaGUccGUUsAucAAcuuga | | |
| | | | | aaaagugGcaccgagucggugcusususuNN | | |
| | | | | N-3′ | | |
| mAN | GA01 | GAGATA | 241 | 5′gsasgsAUACCUGAGUAACUUUC | 2806 | ABE |
| GPTL | 132 | CCTGAGT | | gUUUUAGagcuaGaaauagcaaGUUsaA | | |
| 3 | | AACTTTC | | aAuAaggcuaGUccGUUsAucAAcuuG | | |
| | | | | aaaaagugGcaccgagucggugcusususuNN | | |
| | | | | N-3 | | |
| mcPC | GA01 | CAGGTTC | 81 | 5′csasgsGUUCCAUGGGAUGCUCU | 1810 | SpCas |
| SK9 | 133 | CATGGG | | gUUUUAGagcuaGaaauagcaaGUUsaA | | 9 |
| | | ATGCTCT | | aAuAaggcuaGUccGUUsAucAAcuuG | | |
| | | | | aaaaagugGcaccgagucggugcusususuNN | | |
| | | | | N-3′ | | |
| mcPC | GA01 | CAGGTTC | 81 | 5′csasgsGUUCCAUGGGAUGCUCU | 2807 | SpCas |
| SK9 | 134 | CATGGG | | gUUUUAGagcuagaaauagcaaGUUsaA | | 9 |
| | | ATGCTCT | | aAuAaggCUaGUCcGUUsAucAAcuu | | |
| | | | | GaaaaaguGgcaccgAgUCggugcusususu | | |
| | | | | NNN-3′ | | |
| mcPC | GA01 | CAGGTTC | 81 | 5′csasgsGUUCCAUGGGAUGCUCU | 2808 | SpCas |
| SK9 | 135 | CATGGG | | gUUUUAGagcuagaaauagcaaGUUsaA | | 9 |
| | | ATGCTCT | | aAuAaggcuaGUccGUUsAucAAcuuG | | |
| | | | | aaaaaguGgcaccgAgUCggugcusususuN | | |
| | | | | NN-3′ | | |
| mcPC | GA01 | CAGGTTC | 81 | 5′csasgsGUUCCAUGGGAUGCUCU | 2809 | SpCas |
| SK9 | 136 | CATGGG | | gUUUUAGagcuagaaauagcaaGUUsaA | | 9 |
| | | ATGCTCT | | aAuAaggCUaGUCcGUUsAucAAcuu | | |
| | | | | gaaaaaguGgcaccgAgUCggugcusususu | | |
| | | | | NNN-3′ | | |
| mcPC | GA01 | CAGGTTC | 81 | 5′csasgsGUUCCAUGGGAUGCUCU | 2810 | SpCas |
| SK9 | 137 | CATGGG | | gUUUUAGagcuagaaauagcaaGUUsaA | | 9 |
| | | ATGCTCT | | aAuAaggCUaGUCcGUUsAucAAcuu | | |
| | | | | gaaaaaguGgcaccgAgUcggugcusususu | | |
| | | | | NNN-3′ | | |
| mcPC | GA01 | CAGGTTC | 81 | 5′csasgsGUUCCAUGGGAUGCUCU | 2808 | SpCas |
| SK9 | 138 | CATGGG | | gUUUUAGagcuagaaauagcaaGUUsaA | | 9 |
| | | ATGCTCT | | aAuAaggcuaGUccGUUsAucAAcuuG | | |
| | | | | aaaaaguGgcaccgAgUCggugcusususuN | | |
| | | | | NN-3′ | | |
| mcPC | GA01 | CAGGTTC | 81 | 5′csasgsGUUCCAUGGGAUGCUCU | 2811 | SpCas |
| SK9 | 139 | CATGGG | | gUUUUAGagcuaGaaauagcaaGUUsaA | | 9 |
| | | ATGCTCT | | aAuAaggCUaGUCcGUUsAucAAcuu | | |
| | | | | gaaaaaguGgcaccgAgUCggugcusususu | | |
| | | | | NNN-3′ | | |
| mcPC | GA01 | CAGGTTC | 81 | 5′csasgsGUUCCAUGGGAUGCUCU | 2812 | SpCas |
| SK9 | 140 | CATGGG | | gUUUUAGagcuaGaaauagcaaGUUsaA | | 9 |
| | | ATGCTCT | | aAuAaggCUaGUCcGUUsAucAAcuu | | |
| | | | | gaaaaaguGgcaccgAgUcggugcusususu | | |
| | | | | NNN-3′ | | |
| mcPC | GA01 | CAGGTTC | 81 | 5′csasgsGUUCCAUGGGAUGCUCU | 2813 | SpCas |
| SK9 | 141 | CATGGG | | gUUUUAGagcuaGaaauagcaaGUUsaA | | 9 |
| | | ATGCTCT | | aAuAaggcuaGUccGUUsAucAAcuuG | | |
| | | | | NN-3′ | | |
| mPCS | GA01 | CCCATAC | 69 | 5′cscscsAUACCUUGGAGCAACGGg | 1811 | ABE |
| K9 | 142 | CTTGGA | | UUUUsAGagcuaGaaauagcaaGUUsaA | | |
| | | GCAACG | | aAuAaggCUaGUCcGUUAucAAcuuG | | |
| | | G | | aaaaaguGgcaccgAgUCggugcusususuN | | |
| | | | | NN-3′ | | |
| mPCS | GA01 | CCCATAC | 69 | 5′cscscsAUACCUUGGAGCAACGGg | 2814 | ABE |
| K9 | 143 | CTTGGA | | UUUUsAGagcuagaaauagcaaGUUsaA | | |
| | | GCAACG | | aAuAaggcuaGUccGUUAucAAcuugaa | | |
| | | G | | aaagugGcaccgagucggugcusususuNNN | | |
| | | | | -3′ | | |
| mPCS | GA01 | CCCATAC | 69 | 5′cscscsAUACCUUGGAGCAACGGg | 2815 | ABE |
| K9 | 144 | CTTGGA | | UUUUsAGagcuaGaaauagcaaGUUsaA | | |
| | | GCAACG | | aAuAaggcuaGUccGUUAucAAcuuGa | | |
| | | G | | aaaagugGcaccgagucggugcusususuNN | | |
| | | | | N-3′ | | |
| mAN | GA01 | GAGATA | 241 | 5′gsasgsAUACCUGAGUAACUUUC | 1812 | ABE |
| GPTL | 145 | CCTGAGT | | gUUUUsAGagcuaGaaauagcaaGUUsa | | |
| 3 | | AACTTTC | | AaAuAaggCUaGUCcGUUAucAAcuu | | |
| | | | | GaaaaaguGgcaccgAgUCggugcusususu | | |
| | | | | NNN-3′ | | |
| mAN | GA01 | GAGATA | 241 | 5′gsasgsAUACCUGAGUAACUUUC | 2816 | ABE |
| GPTL | 146 | CCTGAGT | | gUUUUsAGagcuagaaauagcaaGUUsa | | |
| 3 | | AACTTTC | | AaAuAaggcuaGUccGUUAucAAcuug | | |
| | | | | aaaaagugGcaccgagucggugcusususuNN | | |
| | | | | N-3′ | | |
| mAN | GA01 | GAGATA | 241 | 5′gsasgsAUACCUGAGUAACUUUC | 2817 | ABE |
| GPTL | 147 | CCTGAGT | | gUUUUsAGagcuaGaaauagcaaGUUsa | | |
| 3 | | AACTTTC | | AaAuAaggcuaGUccGUUAucAAcuuG | | |
| | | | | aaaaagugGcaccgagucggugcusususuNN | | |
| | | | | N-3′ | | |
| mcPC | GA01 | CAGGTTC | 81 | 5′csasgsGUUCCAUGGGAUGCUCU | 1813 | SpCas |
| SK9 | 148 | CATGGG | | gUUUUsAGagcuaGaaauagcaaGUUsa | | 9 |
| | | ATGCTCT | | AaAuAaggcuaGUccGUUAucAAcuuG | | |
| | | | | aaaaagugGcaccgagucggugcusususuNN | | |
| | | | | N-3′ | | |
| mcPC | GA01 | CAGGTTC | 81 | 5′csasgsGUUCCAUGGGAUGCUCU | 2818 | SpCas |
| SK9 | 149 | CATGGG | | gUUUUsAGagcuagaaauagcaaGUUsa | | 9 |
| | | ATGCTCT | | AaAuAaggCUaGUCcGUUAucAAcuu | | |
| | | | | GaaaaaguGgcaccgAgUCggugcusususu | | |
| | | | | NNN-3′ | | |
| mcPC | GA01 | CAGGTTC | 81 | 5′csasgsGUUCCAUGGGAUGCUCU | 2819 | SpCas |
| SK9 | 150 | CATGGG | | gUUUUsAGagcuagaaauagcaaGUUsa | | 9 |
| | | ATGCTCT | | AaAuAaggcuaGUccGUUAucAAcuuG | | |
| | | | | aaaaaguGgcaccgAgUCggugcusususuN | | |
| | | | | NN-3′ | | |
| mcPC | GA01 | CAGGTTC | 81 | 5′csasgsGUUCCAUGGGAUGCUCU | 2820 | SpCas |
| SK9 | 151 | CATGGG | | gUUUUsAGagcuagaaauagcaaGUUsa | | 9 |
| | | ATGCTCT | | AaAuAaggCUaGUCcGUUAucAAcuu | | |
| | | | | gaaaaaguGgcaccgAgUCggugcusususu | | |
| | | | | NNN-3′ | | |
| mcPC | GA01 | CAGGTTC | 81 | 5′csasgsGUUCCAUGGGAUGCUCU | 2821 | SpCas |
| SK9 | 152 | CATGGG | | gUUUUsAGagcuagaaauagcaaGUUsa | | 9 |
| | | ATGCTCT | | AaAuAaggCUaGUCcGUUAucAAcuu | | |
| | | | | gaaaaaguGgcaccgAgUcggugcusususu | | |
| | | | | NNN-3′ | | |
| mcPC | GA01 | CAGGTTC | 81 | 5′csasgsGUUCCAUGGGAUGCUCU | 1814 | SpCas |
| SK9 | 153 | CATGGG | | gUUUUsAGagcuagaaauagcaaGUUsa | | 9 |
| | | ATGCTCT | | AaAuAaggcuaGUccGUUAucAAcuuG | | |
| | | | | aaaaaguGgcaccgAgUCggugcusususu- | | |
| | | | | NNN3′ | | |
| mcPC | GA01 | CAGGTTC | 81 | 5′csasgsGUUCCAUGGGAUGCUCU | 2822 | SpCas |
| SK9 | 154 | CATGGG | | gUUUUsAGagcuaGaaauagcaaGUUsa | | 9 |
| | | ATGCTCT | | AaAuAaggCUaGUCcGUUAucAAcuu | | |
| | | | | gaaaaaguGgcaccgAgUCggugcusususu | | |
| | | | | NNN-3′ | | |
| mcPC | GA01 | CAGGTTC | 81 | 5′csasgsGUUCCAUGGGAUGCUCU | 2823 | SpCas |
| SK9 | 155 | CATGGG | | gUUUUsAGagcuaGaaauagcaaGUUsa | | 9 |
| | | ATGCTCT | | AaAuAaggCUaGUCcGUUAucAAcuu | | |
| | | | | gaaaaaguGgcaccgAgUcggugcusususu | | |
| | | | | NNN-3′ | | |
| mcPC | GA01 | CAGGTTC | 81 | 5′csasgsGUUCCAUGGGAUGCUCU | 2824 | SpCas |
| SK9 | 156 | CATGGG | | gUUUUsAGagcuaGaaauagcaaGUUsa | | 9 |
| | | ATGCTCT | | AaAuAaggcuaGUccGUUAucAAcuuG | | |
| | | | | aaaaaguGgcaccgAgUCggugcusususuN | | |
| | | | | NN-3′ | | |
| mPCS | GA01 | CCCATAC | 69 | 5′cscscsAUACCUUGGAGCAACGGg | 1815 | ABE |
| K9 | 157 | CTTGGA | | UUUUsAGagcuaGaaauagcaaGUUaAa | | |
| | | GCAACG | | AuAaggCUaGUCcGUUsAucAAcuuG | | |
| | | G | | NN-3′ | | |
| mPCS | GA01 | CCCATAC | 69 | 5′cscscsAUACCUUGGAGCAACGGg | 2825 | ABE |
| K9 | 158 | CTTGGA | | UUUUsAGagcuagaaauagcaaGUUaAa | | |
| | | GCAACG | | AuAaggcuaGUccGUUsAucAAcuugaa | | |
| | | G | | aaagugGcaccgagucggugcusususuNNN | | |
| | | | | -3′ | | |
| mPCS | GA01 | CCCATAC | 69 | 5′cscscsAUACCUUGGAGCAACGGg | 2826 | ABE |
| K9 | 159 | CTTGGA | | UUUUsAGagcuaGaaauagcaaGUUaAa | | |
| | | GCAACG | | AuAaggcuaGUccGUUsAucAAcuuGa | | |
| | | G | | aaaagugGcaccgagucggugcusususuNN | | |
| | | | | N-3′ | | |
| mAN | GA01 | GAGATA | 241 | 5′gsasgsAUACCUGAGUAACUUUC | 1816 | ABE |
| GPTL | 160 | CCTGAGT | | gUUUUsAGagcuaGaaauagcaaGUUaA | | |
| 3 | | AACTTTC | | aAuAaggCUaGUCcGUUsAucAAcuu | | |
| | | | | GaaaaaguGgcaccgAgUCggugcusususu | | |
| | | | | NNN-3′ | | |
| mAN | GA01 | GAGATA | 241 | 5′gsasgsAUACCUGAGUAACUUUC | 2827 | ABE |
| GPTL | 161 | CCTGAGT | | gUUUUsAGagcuagaaauagcaaGUUaA | | |
| 3 | | AACTTTC | | aAuAaggcuaGUccGUUsAucAAcuuga | | |
| | | | | aaaagugGcaccgagucggugcusususuNN | | |
| | | | | N-3′ | | |
| mAN | GA01 | GAGATA | 241 | 5′gsasgsAUACCUGAGUAACUUUC | 2828 | ABE |
| GPTL | 162 | CCTGAGT | | gUUUUsAGagcuaGaaauagcaaGUUaA | | |
| 3 | | AACTTTC | | aAuAaggcuaGUccGUUsAucAAcuuG | | |
| | | | | aaaaagugGcaccgagucggugcusususuNN | | |
| | | | | N-3′ | | |
| mcPC | GA01 | CAGGTTC | 81 | 5′csasgsGUUCCAUGGGAUGCUCU | 1817 | SpCas |
| SK9 | 163 | CATGGG | | gUUUUsAGagcuaGaaauagcaaGUUaA | | 9 |
| | | ATGCTCT | | aAuAaggcuaGUccGUUsAucAAcuuG | | |
| | | | | aaaaagugGcaccgagucggugcusususuNN | | |
| | | | | N-3′ | | |
| mcPC | GA01 | CAGGTTC | 81 | 5′csasgsGUUCCAUGGGAUGCUCU | 2829 | SpCas |
| SK9 | 164 | CATGGG | | gUUUUsAGagcuagaaauagcaaGUUaA | | 9 |
| | | ATGCTCT | | aAuAaggCUaGUCcGUUsAucAAcuu | | |
| | | | | GaaaaaguGgcaccgAgUCggugcusususu | | |
| | | | | NNN-3′ | | |
| mcPC | GA01 | CAGGTTC | 81 | 5′csasgsGUUCCAUGGGAUGCUCU | 2830 | SpCas |
| SK9 | 165 | CATGGG | | gUUUUsAGagcuagaaauagcaaGUUaA | | 9 |
| | | ATGCTCT | | aAuAaggcuaGUccGUUsAucAAcuuG | | |
| | | | | aaaaaguGgcaccgAgUCggugcusususuN | | |
| | | | | NN-3′ | | |
| mcPC | GA01 | CAGGTTC | 81 | 5′csasgsGUUCCAUGGGAUGCUCU | 2831 | SpCas |
| SK9 | 166 | CATGGG | | gUUUUsAGagcuagaaauagcaaGUUaA | | 9 |
| | | ATGCTCT | | aAuAaggCUaGUCcGUUsAucAAcuu | | |
| | | | | gaaaaaguGgcaccgAgUCggugcusususu | | |
| | | | | NNN-3′ | | |
| mcPC | GA01 | CAGGTTC | 81 | 5′csasgsGUUCCAUGGGAUGCUCU | 2832 | SpCas |
| SK9 | 167 | CATGGG | | gUUUUsAGagcuagaaauagcaaGUUaA | | 9 |
| | | ATGCTCT | | aAuAaggCUaGUCcGUUsAucAAcuu | | |
| | | | | gaaaaaguGgcaccgAgUcggugcusususu | | |
| | | | | NNN-3′ | | |
| mcPC | GA01 | CAGGTTC | 81 | 5′csasgsGUUCCAUGGGAUGCUCU | 2830 | SpCas |
| SK9 | 168 | CATGGG | | gUUUUsAGagcuagaaauagcaaGUUaA | | 9 |
| | | ATGCTCT | | aAuAaggcuaGUccGUUsAucAAcuuG | | |
| | | | | NN-3′ | | |
| mcPC | GA01 | CAGGTTC | 81 | 5′csasgsGUUCCAUGGGAUGCUCU | 2833 | SpCas |
| SK9 | 169 | CATGGG | | gUUUUsAGagcuaGaaauagcaaGUUaA | | 9 |
| | | ATGCTCT | | aAuAaggCUaGUCcGUUsAucAAcuu | | |
| | | | | gaaaaaguGgcaccgAgUCggugcusususu | | |
| | | | | NNN-3′ | | |
| mcPC | GA01 | CAGGTTC | 81 | 5′csasgsGUUCCAUGGGAUGCUCU | 2834 | SpCas |
| SK9 | 170 | CATGGG | | gUUUUsAGagcuaGaaauagcaaGUUaA | | 9 |
| | | ATGCTCT | | aAuAaggCUaGUCcGUUsAucAAcuu | | |
| | | | | gaaaaaguGgcaccgAgUcggugcusususu | | |
| | | | | NNN-3′ | | |
| mcPC | GA01 | CAGGTTC | 81 | 5′csasgsGUUCCAUGGGAUGCUCU | 2835 | SpCas |
| SK9 | 171 | CATGGG | | gUUUUsAGagcuaGaaauagcaaGUUaA | | 9 |
| | | ATGCTCT | | aAuAaggcuaGUccGUUsAucAAcuuG | | |
| | | | | aaaaaguGgcaccgAgUCggugcusususuN | | |
| | | | | NN-3′ | | |
| mPCS | GA01 | CCCATAC | 69 | 5′cscscsAUACCUUGGAGCAACGGg | 1818 | ABE |
| K9 | 172 | CTTGGA | | UUUUsAGagcuaGaaauagcaaGUUsaA | | |
| | | GCAACG | | aAuAaggCUaGUCcGUUsAucAAcuu | | |
| | | G | | GaaaaaguGgcaccgAgUCggugcusususu | | |
| | | | | NNN-3′ | | |
| mPCS | GA01 | CCCATAC | 69 | 5′cscscsAUACCUUGGAGCAACGGg | 2836 | ABE |
| K9 | 173 | CTTGGA | | UUUUsAGagcuagaaauagcaaGUUsaA | | |
| | | GCAACG | | aAuAaggcuaGUccGUUsAucAAcuuga | | |
| | | G | | aaaagugGcaccgagucggugcusususuNN | | |
| | | | | N-3′ | | |
| mPCS | GA01 | CCCATAC | 69 | 5′cscscsAUACCUUGGAGCAACGGg | 2837 | ABE |
| K9 | 174 | CTTGGA | | UUUUsAGagcuaGaaauagcaaGUUsaA | | |
| | | GCAACG | | aAuAaggcuaGUccGUUsAucAAcuuG | | |
| | | G | | aaaaagugGcaccgagucggugcusususuNN | | |
| | | | | N-3′ | | |
| mAN | GA01 | GAGATA | 241 | 5′gsasgsAUACCUGAGUAACUUUC | 1819 | ABE |
| GPTL | 175 | CCTGAGT | | gUUUUsAGagcuaGaaauagcaaGUUsa | | |
| 3 | | AACTTTC | | AaAuAaggCUaGUCcGUUsAucAAcu | | |
| | | | | uGaaaaaguGgcaccgAgUCggugcususus | | |
| | | | | uNNN-3′ | | |
| mAN | GA01 | GAGATA | 241 | 5′gsasgsAUACCUGAGUAACUUUC | 2838 | ABE |
| GPTL | 176 | CCTGAGT | | gUUUUsAGagcuagaaauagcaaGUUsa | | |
| 3 | | AACTTTC | | AaAuAaggcuaGUccGUUsAucAAcuu | | |
| | | | | gaaaaagugGcaccgagucggugcusususuN | | |
| | | | | NN-3′ | | |
| mAN | GA01 | GAGATA | 241 | 5′gsasgsAUACCUGAGUAACUUUC | 2839 | ABE |
| GPTL | 177 | CCTGAGT | | gUUUUsAGagcuaGaaauagcaaGUUsa | | |
| 3 | | AACTTTC | | AaAuAaggcuaGUccGUUsAucAAcuu | | |
| | | | | NN-3′ | | |
| mcPC | GA01 | CAGGTTC | 81 | 5′csasgsGUUCCAUGGGAUGCUCU | 1820 | SpCas |
| SK9 | 178 | CATGGG | | gUUUUsAGagcuaGaaauagcaaGUUsa | | 9 |
| | | ATGCTCT | | AaAuAaggcuaGUccGUUsAucAAcuu | | |
| | | | | NN-3′ | | |
| mcPC | GA01 | CAGGTTC | 81 | 5′csasgsGUUCCAUGGGAUGCUCU | 2840 | SpCas |
| SK9 | 179 | CATGGG | | gUUUUsAGagcuagaaauagcaaGUUsa | | 9 |
| | | ATGCTCT | | AaAuAaggCUaGUCcGUUsAucAAcu | | |
| | | | | uGaaaaaguGgcaccgAgUCggugcususus | | |
| | | | | uNNN-3′ | | |
| mcPC | GA01 | CAGGTTC | 81 | 5′csasgsGUUCCAUGGGAUGCUCU | 2841 | SpCas |
| SK9 | 180 | CATGGG | | gUUUUsAGagcuagaaauagcaaGUUsa | | 9 |
| | | ATGCTCT | | AaAuAaggcuaGUccGUUsAucAAcuu | | |
| | | | | GaaaaaguGgcaccgAgUCggugcusususu | | |
| | | | | NNN-3′ | | |
| mcPC | GA01 | CAGGTTC | 81 | 5′csasgsGUUCCAUGGGAUGCUCU | 2842 | SpCas |
| SK9 | 181 | CATGGG | | gUUUUsAGagcuagaaauagcaaGUUsa | | 9 |
| | | ATGCTCT | | AaAuAaggCUaGUCcGUUsAucAAcu | | |
| | | | | ugaaaaaguGgcaccgAgUCggugcususus | | |
| | | | | uNNN-3′ | | |
| mcPC | GA01 | CAGGTTC | 81 | 5′csasgsGUUCCAUGGGAUGCUCU | 2843 | SpCas |
| SK9 | 182 | CATGGG | | gUUUUsAGagcuagaaauagcaaGUUsa | | 9 |
| | | ATGCTCT | | AaAuAaggCUaGUCcGUUsAucAAcu | | |
| | | | | ugaaaaaguGgcaccgAgUcggugcusususu | | |
| | | | | NNN-3′ | | |
| mcPC | GA01 | CAGGTTC | 81 | 5′csasgsGUUCCAUGGGAUGCUCU | 2841 | SpCas |
| SK9 | 183 | CATGGG | | gUUUUsAGagcuagaaauagcaaGUUsa | | 9 |
| | | ATGCTCT | | AaAuAaggcuaGUccGUUsAucAAcuu | | |
| | | | | GaaaaaguGgcaccgAgUCggugcusususu | | |
| | | | | NNN-3′ | | |
| mcPC | GA01 | CAGGTTC | 81 | 5′csasgsGUUCCAUGGGAUGCUCU | 2844 | SpCas |
| SK9 | 184 | CATGGG | | gUUUUsAGagcuaGaaauagcaaGUUsa | | 9 |
| | | ATGCTCT | | AaAuAaggCUaGUCcGUUsAucAAcu | | |
| | | | | ugaaaaaguGgcaccgAgUCggugcususus | | |
| | | | | uNNN-3′ | | |
| mcPC | GA01 | CAGGTTC | 81 | 5′csasgsGUUCCAUGGGAUGCUCU | 2845 | SpCas |
| SK9 | 185 | CATGGG | | gUUUUsAGagcuaGaaauagcaaGUUsa | | 9 |
| | | ATGCTCT | | AaAuAaggCUaGUCcGUUsAucAAcu | | |
| | | | | ugaaaaaguGgcaccgAgUcggugcusususu | | |
| | | | | NNN-3′ | | |
| mcPC | GA01 | CAGGTTC | 81 | 5′csasgsGUUCCAUGGGAUGCUCU | 2846 | SpCas |
| SK9 | 186 | CATGGG | | gUUUUsAGagcuaGaaauagcaaGUUsa | | 9 |
| | | ATGCTCT | | AaAuAaggcuaGUccGUUsAucAAcuu | | |
| | | | | GaaaaaguGgcaccgAgUCggugcusususu | | |
| | | | | NNN-3′ | | |
| mcPC | GA01 | CAGGTTC | 81 | 5′csasgGUUCCAUGGGAUGCUCUg | 1821 | SpCas |
| SK9 | 187 | CATGGG | | UUUUAGagcuaGaaauagcaaGUUaAa | | 9 |
| | | ATGCTCT | | AuAaggCUaGUCcGUUAucAAcuuGa | | |
| | | | | aaaaguGgcaccgAgUCggugcusususuN | | |
| | | | | NN-3′ | | |
| mcPC | GA01 | CAGGTTC | 81 | 5′csasgGUUCCAUGGGAUGCUCUg | 2847 | SpCas |
| SK9 | 188 | CATGGG | | UUUUAGagcuagaaauagcaaGUUaAaA | | 9 |
| | | ATGCTCT | | uAaggcuaGUccGUUAucAAcuugaaaa | | |
| | | | | agugGcaccgagucggugcusususuNNN-3′ | | |
| mPCS | GA01 | CCCATAC | 69 | 5′cscscAUACCUUGGAGCAACGGg | 1822 | ABE |
| K9 | 189 | CTTGGA | | UUUUAGagcuaGaaauagcaaGUUaAa | | |
| | | GCAACG | | AuAaggCUaGUCcGUUAucAAcuuGa | | |
| | | G | | NN-3′ | | |
| mPCS | GA01 | CCCATAC | 69 | 5′cscscAUACCUUGGAGCAACGGg | 2848 | ABE |
| K9 | 190 | CTTGGA | | UUUUAGagcuagaaauagcaaGUUaAaA | | |
| | | GCAACG | | uAaggcuaGUccGUUAucAAcuugaaaa | | |
| | | G | | agugGcaccgagucggugcusususuNNN-3′ | | |
| mPCS | GA01 | CCCATAC | 69 | 5′cscscAUACCUUGGAGCAACGGg | 2849 | ABE |
| K9 | 191 | CTTGGA | | UUUUAGagcuaGaaauagcaaGUUaAa | | |
| | | GCAACG | | AuAaggcuaGUccGUUAucAAcuuGaa | | |
| | | G | | aaagugGcaccgagucggugcusususuNNN | | |
| | | | | -3′ | | |
| mAN | GA01 | GAGATA | 241 | 5′gsasgAUACCUGAGUAACUUUCg | 1823 | ABE |
| GPTL | 192 | CCTGAGT | | UUUUAGagcuaGaaauagcaaGUUaAa | | |
| 3 | | AACTTTC | | AuAaggCUaGUCcGUUAucAAcuuGa | | |
| | | | | aaaaguGgcaccgAgUCggugcusususuN | | |
| | | | | NN-3′ | | |
| mAN | GA01 | GAGATA | 241 | 5′gsasgAUACCUGAGUAACUUUCg | 2850 | ABE |
| GPTL | 193 | CCTGAGT | | UUUUAGagcuagaaauagcaaGUUaAaA | | |
| 3 | | AACTTTC | | uAaggcuaGUccGUUAucAAcuugaaaa | | |
| | | | | agugGcaccgagucggugcusususuNNN-3′ | | |
| mAN | GA01 | GAGATA | 241 | 5′gsasgAUACCUGAGUAACUUUCg | 2851 | ABE |
| GPTL | 194 | CCTGAGT | | UUUUAGagcuaGaaauagcaaGUUaAa | | |
| 3 | | AACTTTC | | AuAaggcuaGUccGUUAucAAcuuGaa | | |
| | | | | aaagugGcaccgagucggugcusususuNNN | | |
| | | | | -3′ | | |
| mcPC | GA01 | CAGGTTC | 81 | 5′csasgGUUCCAUGGGAUGCUCUg | 2852 | SpCas |
| SK9 | 195 | CATGGG | | UUUUAGagcuaGaaauagcaaGUUaAa | | 9 |
| | | ATGCTCT | | AuAaggcuaGUccGUUAucAAcuuGaa | | |
| | | | | aaagugGcaccgagucggugcusususuNNN | | |
| | | | | -3′ | | |
| mcPC | GA01 | CAGGTTC | 81 | 5′csasgGUUCCAUGGGAUGCUCUg | 2853 | SpCas |
| SK9 | 196 | CATGGG | | UUUUAGagcuagaaauagcaaGUUaAaA | | 9 |
| | | ATGCTCT | | uAaggCUaGUCcGUUAucAAcuuGaa | | |
| | | | | aaaguGgcaccgAgUCggugcusususuNN | | |
| | | | | N-3′ | | |
| mcPC | GA01 | CAGGTTC | 81 | 5′csasgGUUCCAUGGGAUGCUCUg | 2854 | SpCas |
| SK9 | 197 | CATGGG | | UUUUAGagcuagaaauagcaaGUUaAaA | | 9 |
| | | ATGCTCT | | uAaggcuaGUccGUUAucAAcuuGaaaa | | |
| | | | | aguGgcaccgAgUCggugcusususuNNN- | | |
| | | | | 3′ | | |
| mcPC | GA01 | CAGGTTC | 81 | 5′csasgGUUCCAUGGGAUGCUCUg | 2855 | SpCas |
| SK9 | 198 | CATGGG | | UUUUAGagcuagaaauagcaaGUUaAaA | | 9 |
| | | ATGCTCT | | uAaggCUaGUCcGUUAucAAcuugaaa | | |
| | | | | aaguGgcaccgAgUCggugcusususuNNN | | |
| | | | | -3′ | | |
| mcPC | GA01 | CAGGTTC | 81 | 5′csasgGUUCCAUGGGAUGCUCUg | 2856 | SpCas |
| SK9 | 199 | CATGGG | | UUUUAGagcuagaaauagcaaGUUaAaA | | 9 |
| | | ATGCTCT | | uAaggCUaGUCcGUUAucAAcuugaaa | | |
| | | | | aaguGgcaccgAgUcggugcusususuNNN | | |
| | | | | -3′ | | |
| mcPC | GA01 | CAGGTTC | 81 | 5′csasgGUUCCAUGGGAUGCUCUg | 2854 | SpCas |
| SK9 | 200 | CATGGG | | UUUUAGagcuagaaauagcaaGUUaAaA | | 9 |
| | | ATGCTCT | | uAaggcuaGUccGUUAucAAcuuGaaaa | | |
| | | | | aguGgcaccgAgUCggugcusususuNNN- | | |
| | | | | 3′ | | |
| mcPC | GA01 | CAGGTTC | 81 | 5′csasgGUUCCAUGGGAUGCUCUg | 2857 | SpCas |
| SK9 | 201 | CATGGG | | UUUUAGagcuaGaaauagcaaGUUaAa | | 9 |
| | | ATGCTCT | | AuAaggCUaGUCcGUUAucAAcuuga | | |
| | | | | NN-3′ | | |
| mcPC | GA01 | CAGGTTC | 81 | 5′csasgGUUCCAUGGGAUGCUCUg | 2858 | SpCas |
| SK9 | 202 | CATGGG | | UUUUAGagcuaGaaauagcaaGUUaAa | | 9 |
| | | ATGCTCT | | AuAaggCUaGUCcGUUAucAAcuuga | | |
| | | | | aaaaguGgcaccgAgUcggugcusususuNN | | |
| | | | | N-3′ | | |
| mcPC | GA01 | CAGGTTC | 81 | 5′csasgGUUCCAUGGGAUGCUCUg | 2859 | SpCas |
| SK9 | 203 | CATGGG | | UUUUAGagcuaGaaauagcaaGUUaAa | | 9 |
| | | ATGCTCT | | AuAaggcuaGUccGUUAucAAcuuGaa | | |
| | | | | aaaguGgcaccgAgUCggugcusususuNN | | |
| | | | | N-3′ | | |
| mPCS | GA01 | CCCATAC | 69 | 5′cscscAUACCUUGGAGCAACGGg | 1824 | ABE |
| K9 | 204 | CTTGGA | | UUUUAGagcuaGaaauagcaaGUUaAa | | |
| | | GCAACG | | AuAaggCUaGUCcGUUsAucAAcuuG | | |
| | | G | | NN-3′ | | |
| mPCS | GA01 | CCCATAC | 69 | 5′cscscAUACCUUGGAGCAACGGg | 2860 | ABE |
| K9 | 205 | CTTGGA | | UUUUAGagcuagaaauagcaaGUUaAaA | | |
| | | GCAACG | | uAaggcuaGUccGUUsAucAAcuugaaaa | | |
| | | G | | agugGcaccgagucggugcusususuNNN-3′ | | |
| mPCS | GA01 | CCCATAC | 69 | 5′cscscAUACCUUGGAGCAACGGg | 2861 | ABE |
| K9 | 206 | CTTGGA | | UUUUAGagcuaGaaauagcaaGUUaAa | | |
| | | GCAACG | | AuAaggcuaGUccGUUsAucAAcuuGa | | |
| | | G | | aaaagugGcaccgagucggugcusususuNN | | |
| | | | | N-3′ | | |
| mAN | GA01 | GAGATA | 241 | 5′gsasgAUACCUGAGUAACUUUCg | 1825 | ABE |
| GPTL | 207 | CCTGAGT | | UUUUAGagcuaGaaauagcaaGUUaAa | | |
| 3 | | AACTTTC | | AuAaggCUaGUCcGUUsAucAAcuuG | | |
| | | | | aaaaaguGgcaccgAgUCggugcusususuN | | |
| | | | | NN-3′ | | |
| mAN | GA01 | GAGATA | 241 | 5′gsasgAUACCUGAGUAACUUUCg | 2862 | ABE |
| GPTL | 208 | CCTGAGT | | UUUUAGagcuagaaauagcaaGUUaAaA | | |
| 3 | | AACTTTC | | uAaggcuaGUccGUUsAucAAcuugaaaa | | |
| | | | | agugGcaccgagucggugcusususuNNN-3′ | | |
| mAN | GA01 | GAGATA | 241 | 5′gsasgAUACCUGAGUAACUUUCg | 2863 | ABE |
| GPTL | 209 | CCTGAGT | | UUUUAGagcuaGaaauagcaaGUUaAa | | |
| 3 | | AACTTTC | | AuAaggcuaGUccGUUsAucAAcuuGa | | |
| | | | | aaaagugGcaccgagucggugcusususuNN | | |
| | | | | N-3′ | | |
| mcPC | GA01 | CAGGTTC | 81 | 5′csasgGUUCCAUGGGAUGCUCUg | 1826 | SpCas |
| SK9 | 210 | CATGGG | | UUUUAGagcuaGaaauagcaaGUUaAa | | 9 |
| | | ATGCTCT | | AuAaggcuaGUccGUUsAucAAcuuGa | | |
| | | | | aaaagugGcaccgagucggugcusususuNN | | |
| | | | | N-3′ | | |
| mcPC | GA01 | CAGGTTC | 81 | 5′csasgGUUCCAUGGGAUGCUCUg | 2864 | SpCas |
| SK9 | 211 | CATGGG | | UUUUAGagcuagaaauagcaaGUUaAaA | | 9 |
| | | ATGCTCT | | uAaggCUaGUCcGUUsAucAAcuuGaa | | |
| | | | | aaaguGgcaccgAgUCggugcusususuNN | | |
| | | | | N-3′ | | |
| mcPC | GA01 | CAGGTTC | 81 | 5′csasgGUUCCAUGGGAUGCUCUg | 2865 | SpCas |
| SK9 | 212 | CATGGG | | UUUUAGagcuagaaauagcaaGUUaAaA | | 9 |
| | | ATGCTCT | | uAaggcuaGUccGUUsAucAAcuuGaaa | | |
| | | | | aaguGgcaccgAgUCggugcusususuNNN | | |
| | | | | -3′ | | |
| mcPC | GA01 | CAGGTTC | 81 | 5′csasgGUUCCAUGGGAUGCUCUg | 2866 | SpCas |
| SK9 | 213 | CATGGG | | UUUUAGagcuagaaauagcaaGUUaAaA | | 9 |
| | | ATGCTCT | | uAaggCUaGUCcGUUsAucAAcuugaa | | |
| | | | | aaaguGgcaccgAgUCggugcusususuNN | | |
| | | | | N-3′ | | |
| mcPC | GA01 | CAGGTTC | 81 | 5′csasgGUUCCAUGGGAUGCUCUg | 2867 | SpCas |
| SK9 | 214 | CATGGG | | UUUUAGagcuagaaauagcaaGUUaAaA | | 9 |
| | | ATGCTCT | | uAaggCUaGUCcGUUsAucAAcuugaa | | |
| | | | | aaaguGgcaccgAgUcggugcusususuNN | | |
| | | | | N-3′ | | |
| mcPC | GA01 | CAGGTTC | 81 | 5′csasgGUUCCAUGGGAUGCUCUg | 2865 | SpCas |
| SK9 | 215 | CATGGG | | UUUUAGagcuagaaauagcaaGUUaAaA | | 9 |
| | | ATGCTCT | | uAaggcuaGUccGUUsAucAAcuuGaaa | | |
| | | | | aaguGgcaccgAgUCggugcusususuNNN | | |
| | | | | -3′ | | |
| mcPC | GA01 | CAGGTTC | 81 | 5′csasgGUUCCAUGGGAUGCUCUg | 2868 | SpCas |
| SK9 | 216 | CATGGG | | UUUUAGagcuaGaaauagcaaGUUaAa | | 9 |
| | | ATGCTCT | | AuAaggCUaGUCcGUUsAucAAcuug | | |
| | | | | aaaaaguGgcaccgAgUCggugcusususuN | | |
| | | | | NN-3′ | | |
| mcPC | GA01 | CAGGTTC | 81 | 5′csasgGUUCCAUGGGAUGCUCUg | 2869 | SpCas |
| SK9 | 217 | CATGGG | | UUUUAGagcuaGaaauagcaaGUUaAa | | 9 |
| | | ATGCTCT | | AuAaggCUaGUCcGUUsAucAAcuug | | |
| | | | | aaaaaguGgcaccgAgUcggugcusususuN | | |
| | | | | NN-3′ | | |
| mcPC | GA01 | CAGGTTC | 81 | 5′csasgGUUCCAUGGGAUGCUCUg | 2870 | SpCas |
| SK9 | 218 | CATGGG | | UUUUAGagcuaGaaauagcaaGUUaAa | | 9 |
| | | ATGCTCT | | AuAaggcuaGUccGUUsAucAAcuuGa | | |
| | | | | aaaaguGgcaccgAgUCggugcusususuN | | |
| | | | | NN-3′ | | |
| mPCS | GA01 | CCCATAC | 69 | 5′cscscAUACCUUGGAGCAACGGg | 1827 | ABE |
| K9 | 219 | CTTGGA | | UUUUAGagcuaGaaauagcaaGUUsaAa | | |
| | | GCAACG | | AuAaggCUaGUCcGUUAucAAcuuGa | | |
| | | G | | aaaaguGgcaccgAgUCggugcusususuN | | |
| | | | | NN-3′ | | |
| mPCS | GA01 | CCCATAC | 69 | 5′cscscAUACCUUGGAGCAACGGg | 2871 | ABE |
| K9 | 220 | CTTGGA | | UUUUAGagcuagaaauagcaaGUUsaAa | | |
| | | GCAACG | | AuAaggcuaGUccGUUAucAAcuugaaa | | |
| | | G | | aagugGcaccgagucggugcusususuNNN- | | |
| | | | | 3′ | | |
| mPCS | GA01 | CCCATAC | 69 | 5′cscscAUACCUUGGAGCAACGGg | 2872 | ABE |
| K9 | 221 | CTTGGA | | UUUUAGagcuaGaaauagcaaGUUsaAa | | |
| | | GCAACG | | AuAaggcuaGUccGUUAucAAcuuGaa | | |
| | | G | | aaagugGcaccgagucggugcusususuNNN | | |
| | | | | -3′ | | |
| mAN | GA01 | GAGATA | 241 | 5′gsasgAUACCUGAGUAACUUUCg | 1828 | ABE |
| GPTL | 222 | CCTGAGT | | UUUUAGagcuaGaaauagcaaGUUsaAa | | |
| 3 | | AACTTTC | | AuAaggCUaGUCcGUUAucAAcuuGa | | |
| | | | | aaaaguGgcaccgAgUCggugcusususuN | | |
| | | | | NN-3′ | | |
| mAN | GA01 | GAGATA | 241 | 5′gsasgAUACCUGAGUAACUUUCg | 2873 | ABE |
| GPTL | 223 | CCTGAGT | | UUUUAGagcuagaaauagcaaGUUsaAa | | |
| 3 | | AACTTTC | | AuAaggcuaGUccGUUAucAAcuugaaa | | |
| | | | | aagugGcaccgagucggugcusususuNNN- | | |
| | | | | 3′ | | |
| mAN | GA01 | GAGATA | 241 | 5′gsasgAUACCUGAGUAACUUUCg | 2874 | ABE |
| GPTL | 224 | CCTGAGT | | UUUUAGagcuaGaaauagcaaGUUsaAa | | |
| 3 | | AACTTTC | | AuAaggcuaGUccGUUAucAAcuuGaa | | |
| | | | | aaagugGcaccgagucggugcusususuNNN | | |
| | | | | -3′ | | |
| mcPC | GA01 | CAGGTTC | 81 | 5′csasgGUUCCAUGGGAUGCUCUg | 1829 | SpCas |
| SK9 | 225 | CATGGG | | UUUUAGagcuaGaaauagcaaGUUsaAa | | 9 |
| | | ATGCTCT | | AuAaggcuaGUccGUUAucAAcuuGaa | | |
| | | | | aaagugGcaccgagucggugcusususuNNN | | |
| | | | | -3′ | | |
| mcPC | GA01 | CAGGTTC | 81 | 5′csasgGUUCCAUGGGAUGCUCUg | 2875 | SpCas |
| SK9 | 226 | CATGGG | | UUUUAGagcuagaaauagcaaGUUsaAa | | 9 |
| | | ATGCTCT | | AuAaggCUaGUCcGUUAucAAcuuGa | | |
| | | | | NN-3′ | | |
| mcPC | GA01 | CAGGTTC | 81 | 5′csasgGUUCCAUGGGAUGCUCUg | 2876 | SpCas |
| SK9 | 227 | CATGGG | | UUUUAGagcuagaaauagcaaGUUsaAa | | 9 |
| | | ATGCTCT | | AuAaggcuaGUccGUUAucAAcuuGaa | | |
| | | | | aaaguGgcaccgAgUCggugcusususuNN | | |
| | | | | N-3′ | | |
| mcPC | GA01 | CAGGTTC | 81 | 5′csasgGUUCCAUGGGAUGCUCUg | 2877 | SpCas |
| SK9 | 228 | CATGGG | | UUUUAGagcuagaaauagcaaGUUsaAa | | 9 |
| | | ATGCTCT | | AuAaggCUaGUCcGUUAucAAcuuga | | |
| | | | | aaaaguGgcaccgAgUCggugcusususuN | | |
| | | | | NN-3′ | | |
| mcPC | GA01 | CAGGTTC | 81 | 5′csasgGUUCCAUGGGAUGCUCUg | 2878 | SpCas |
| SK9 | 229 | CATGGG | | UUUUAGagcuagaaauagcaaGUUsaAa | | 9 |
| | | ATGCTCT | | AuAaggCUaGUCcGUUAucAAcuuga | | |
| | | | | aaaaguGgcaccgAgUcggugcusususuNN | | |
| | | | | N-3′ | | |
| mcPC | GA01 | CAGGTTC | 81 | 5′csasgGUUCCAUGGGAUGCUCUg | 2876 | SpCas |
| SK9 | 230 | CATGGG | | UUUUAGagcuagaaauagcaaGUUsaAa | | 9 |
| | | ATGCTCT | | AuAaggcuaGUccGUUAucAAcuuGaa | | |
| | | | | aaaguGgcaccgAgUCggugcusususuNN | | |
| | | | | N-3′ | | |
| mcPC | GA01 | CAGGTTC | 81 | 5′csasgGUUCCAUGGGAUGCUCUg | 2879 | SpCas |
| SK9 | 231 | CATGGG | | UUUUAGagcuaGaaauagcaaGUUsaAa | | 9 |
| | | ATGCTCT | | AuAaggCUaGUCcGUUAucAAcuuga | | |
| | | | | NN-3′ | | |
| mcPC | GA01 | CAGGTTC | 81 | 5′csasgGUUCCAUGGGAUGCUCUg | 2880 | SpCas |
| SK9 | 232 | CATGGG | | UUUUAGagcuaGaaauagcaaGUUsaAa | | 9 |
| | | ATGCTCT | | AuAaggCUaGUCcGUUAucAAcuuga | | |
| | | | | aaaaguGgcaccgAgUcggugcusususuNN | | |
| | | | | N-3′ | | |
| mcPC | GA01 | CAGGTTC | 81 | 5′csasgGUUCCAUGGGAUGCUCUg | 2881 | SpCas |
| SK9 | 233 | CATGGG | | UUUUAGagcuaGaaauagcaaGUUsaAa | | 9 |
| | | ATGCTCT | | AuAaggcuaGUccGUUAucAAcuuGaa | | |
| | | | | aaaguGgcaccgAgUCggugcusususuNN | | |
| | | | | N-3′ | | |
| mPCS | GA01 | CCCATAC | 69 | 5′cscscAUACCUUGGAGCAACGGg | 1830 | ABE |
| K9 | 234 | CTTGGA | | UUUUsAGagcuaGaaauagcaaGUUaAa | | |
| | | GCAACG | | AuAaggCUaGUCcGUUAucAAcuuGa | | |
| | | G | | aaaaguGgcaccgAgUCggugcusususuN | | |
| | | | | NN-3′ | | |
| mPCS | GA01 | CCCATAC | 69 | 5′cscscAUACCUUGGAGCAACGGg | 2882 | ABE |
| K9 | 235 | CTTGGA | | UUUUsAGagcuagaaauagcaaGUUaAa | | |
| | | GCAACG | | AuAaggcuaGUccGUUAucAAcuugaaa | | |
| | | G | | aagugGcaccgagucggugcusususuNNN- | | |
| | | | | 3′ | | |
| mPCS | GA01 | CCCATAC | 69 | 5′cscscAUACCUUGGAGCAACGGg | 2883 | ABE |
| K9 | 236 | CTTGGA | | UUUUsAGagcuaGaaauagcaaGUUaAa | | |
| | | GCAACG | | AuAaggcuaGUccGUUAucAAcuuGaa | | |
| | | G | | aaagugGcaccgagucggugcusususuNNN | | |
| | | | | -3′ | | |
| mAN | GA01 | GAGATA | 241 | 5′gsasgAUACCUGAGUAACUUUCg | 1831 | ABE |
| GPTL | 237 | CCTGAGT | | UUUUsAGagcuaGaaauagcaaGUUaAa | | |
| 3 | | AACTTTC | | AuAaggCUaGUCcGUUAucAAcuuGa | | |
| | | | | NN-3′ | | |
| mAN | GA01 | GAGATA | 241 | 5′gsasgAUACCUGAGUAACUUUCg | 2884 | ABE |
| GPTL | 238 | CCTGAGT | | UUUUsAGagcuagaaauagcaaGUUaAa | | |
| 3 | | AACTTTC | | AuAaggcuaGUccGUUAucAAcuugaaa | | |
| | | | | aagugGcaccgagucggugcusususuNNN- | | |
| | | | | 3′ | | |
| mAN | GA01 | GAGATA | 241 | 5′gsasgAUACCUGAGUAACUUUCg | 2885 | ABE |
| GPTL | 239 | CCTGAGT | | UUUUsAGagcuaGaaauagcaaGUUaAa | | |
| 3 | | AACTTTC | | AuAaggcuaGUccGUUAucAAcuuGaa | | |
| | | | | aaagugGcaccgagucggugcusususuNNN | | |
| | | | | -3′ | | |
| mcPC | GA01 | CAGGTTC | 81 | 5′csasgGUUCCAUGGGAUGCUCUg | 1832 | SpCas |
| SK9 | 240 | CATGGG | | UUUUsAGagcuaGaaauagcaaGUUaAa | | 9 |
| | | ATGCTCT | | AuAaggcuaGUccGUUAucAAcuuGaa | | |
| | | | | aaagugGcaccgagucggugcusususuNNN | | |
| | | | | -3′ | | |
| mcPC | GA01 | CAGGTTC | 81 | 5′csasgGUUCCAUGGGAUGCUCUg | 2886 | SpCas |
| SK9 | 241 | CATGGG | | UUUUsAGagcuagaaauagcaaGUUaAa | | 9 |
| | | ATGCTCT | | AuAaggCUaGUCcGUUAucAAcuuGa | | |
| | | | | NN-3′ | | |
| mcPC | GA01 | CAGGTTC | 81 | 5′csasgGUUCCAUGGGAUGCUCUg | 2887 | SpCas |
| SK9 | 242 | CATGGG | | UUUUsAGagcuagaaauagcaaGUUaAa | | 9 |
| | | ATGCTCT | | AuAaggcuaGUccGUUAucAAcuuGaa | | |
| | | | | aaaguGgcaccgAgUCggugcusususuNN | | |
| | | | | N-3′ | | |
| mcPC | GA01 | CAGGTTC | 81 | 5′csasgGUUCCAUGGGAUGCUCUg | 2888 | SpCas |
| SK9 | 243 | CATGGG | | UUUUsAGagcuagaaauagcaaGUUaAa | | 9 |
| | | ATGCTCT | | AuAaggCUaGUCcGUUAucAAcuuga | | |
| | | | | aaaaguGgcaccgAgUCggugcusususuN | | |
| | | | | NN-3′ | | |
| mcPC | GA01 | CAGGTTC | 81 | 5′csasgGUUCCAUGGGAUGCUCUg | 2889 | SpCas |
| SK9 | 244 | CATGGG | | UUUUsAGagcuagaaauagcaaGUUaAa | | 9 |
| | | ATGCTCT | | AuAaggCUaGUCcGUUAucAAcuuga | | |
| | | | | aaaaguGgcaccgAgUcggugcusususuNN | | |
| | | | | N-3′ | | |
| mcPC | GA01 | CAGGTTC | 81 | 5′csasgGUUCCAUGGGAUGCUCUg | 2887 | SpCas |
| SK9 | 245 | CATGGG | | UUUUsAGagcuagaaauagcaaGUUaAa | | 9 |
| | | ATGCTCT | | AuAaggcuaGUccGUUAucAAcuuGaa | | |
| | | | | aaaguGgcaccgAgUCggugcusususuNN | | |
| | | | | N-3′ | | |
| mcPC | GA01 | CAGGTTC | 81 | 5′csasgGUUCCAUGGGAUGCUCUg | 2890 | SpCas |
| SK9 | 246 | CATGGG | | UUUUsAGagcuaGaaauagcaaGUUaAa | | 9 |
| | | ATGCTCT | | AuAaggCUaGUCcGUUAucAAcuuga | | |
| | | | | aaaaguGgcaccgAgUCggugcusususuN | | |
| | | | | NN-3′ | | |
| mcPC | GA01 | CAGGTTC | 81 | 5′csasgGUUCCAUGGGAUGCUCUg | 2891 | SpCas |
| SK9 | 247 | CATGGG | | UUUUsAGagcuaGaaauagcaaGUUaAa | | 9 |
| | | ATGCTCT | | AuAaggCUaGUCcGUUAucAAcuuga | | |
| | | | | aaaaguGgcaccgAgUcggugcusususuNN | | |
| | | | | N-3′ | | |
| mcPC | GA01 | CAGGTTC | 81 | 5′csasgGUUCCAUGGGAUGCUCUg | 2892 | SpCas |
| SK9 | 248 | CATGGG | | UUUUsAGagcuaGaaauagcaaGUUaAa | | 9 |
| | | ATGCTCT | | AuAaggcuaGUccGUUAucAAcuuGaa | | |
| | | | | aaaguGgcaccgAgUCggugcusususuNN | | |
| | | | | N-3′ | | |
| mPCS | GA01 | CCCATAC | 69 | 5′cscscAUACCUUGGAGCAACGGg | 1833 | ABE |
| K9 | 249 | CTTGGA | | UUUUAGagcuaGaaauagcaaGUUsaAa | | |
| | | GCAACG | | AuAaggCUaGUCcGUUsAucAAcuuG | | |
| | | G | | aaaaaguGgcaccgAgUCggugcusususuN | | |
| | | | | NN-3′ | | |
| mPCS | GA01 | CCCATAC | 69 | 5′cscscAUACCUUGGAGCAACGGg | 2893 | ABE |
| K9 | 250 | CTTGGA | | UUUUAGagcuagaaauagcaaGUUsaAa | | |
| | | GCAACG | | AuAaggcuaGUccGUUsAucAAcuugaa | | |
| | | G | | aaagugGcaccgagucggugcusususuNNN | | |
| | | | | -3′ | | |
| mPCS | GA01 | CCCATAC | 69 | 5′cscscAUACCUUGGAGCAACGGg | 2894 | ABE |
| K9 | 251 | CTTGGA | | UUUUAGagcuaGaaauagcaaGUUsaAa | | |
| | | GCAACG | | AuAaggcuaGUccGUUsAucAAcuuGa | | |
| | | G | | aaaagugGcaccgagucggugcusususuNN | | |
| | | | | N-3′ | | |
| mAN | GA01 | GAGATA | 241 | 5′gsasgAUACCUGAGUAACUUUCg | 1834 | ABE |
| GPTL | 252 | CCTGAGT | | UUUUAGagcuaGaaauagcaaGUUsaAa | | |
| 3 | | AACTTTC | | AuAaggCUaGUCcGUUsAucAAcuuG | | |
| | | | | NN-3′ | | |
| mAN | GA01 | GAGATA | 241 | 5′gsasgAUACCUGAGUAACUUUCg | 2895 | ABE |
| GPTL | 253 | CCTGAGT | | UUUUAGagcuagaaauagcaaGUUsaAa | | |
| 3 | | AACTTTC | | AuAaggcuaGUccGUUsAucAAcuugaa | | |
| | | | | aaagugGcaccgagucggugcusususuNNN | | |
| | | | | -3′ | | |
| mAN | GA01 | GAGATA | 241 | 5′gsasgAUACCUGAGUAACUUUCg | 2896 | ABE |
| GPTL | 254 | CCTGAGT | | UUUUAGagcuaGaaauagcaaGUUsaAa | | |
| 3 | | AACTTTC | | AuAaggcuaGUccGUUsAucAAcuuGa | | |
| | | | | aaaagugGcaccgagucggugcusususuNN | | |
| | | | | N-3′ | | |
| mcPC | GA01 | CAGGTTC | 81 | 5′csasgGUUCCAUGGGAUGCUCUg | 1835 | SpCas |
| SK9 | 255 | CATGGG | | UUUUAGagcuaGaaauagcaaGUUsaAa | | 9 |
| | | ATGCTCT | | AuAaggcuaGUccGUUsAucAAcuuGa | | |
| | | | | aaaagugGcaccgagucggugcusususuNN | | |
| | | | | N-3′ | | |
| mcPC | GA01 | CAGGTTC | 81 | 5′csasgGUUCCAUGGGAUGCUCUg | 2897 | SpCas |
| SK9 | 256 | CATGGG | | UUUUAGagcuagaaauagcaaGUUsaAa | | 9 |
| | | ATGCTCT | | AuAaggCUaGUCcGUUsAucAAcuuG | | |
| | | | | aaaaaguGgcaccgAgUCggugcusususuN | | |
| | | | | NN-3′ | | |
| mcPC | GA01 | CAGGTTC | 81 | 5′csasgGUUCCAUGGGAUGCUCUg | 2898 | SpCas |
| SK9 | 257 | CATGGG | | UUUUAGagcuagaaauagcaaGUUsaAa | | 9 |
| | | ATGCTCT | | AuAaggcuaGUccGUUsAucAAcuuGa | | |
| | | | | aaaaguGgcaccgAgUCggugcusususuN | | |
| | | | | NN-3′ | | |
| mcPC | GA01 | CAGGTTC | 81 | 5′csasgGUUCCAUGGGAUGCUCUg | 2899 | SpCas |
| SK9 | 258 | CATGGG | | UUUUAGagcuagaaauagcaaGUUsaAa | | 9 |
| | | ATGCTCT | | AuAaggCUaGUCcGUUsAucAAcuug | | |
| | | | | aaaaaguGgcaccgAgUCggugcusususuN | | |
| | | | | NN-3′ | | |
| mcPC | GA01 | CAGGTTC | 81 | 5′csasgGUUCCAUGGGAUGCUCUg | 2900 | SpCas |
| SK9 | 259 | CATGGG | | UUUUAGagcuagaaauagcaaGUUsaAa | | 9 |
| | | ATGCTCT | | AuAaggCUaGUCcGUUsAucAAcuug | | |
| | | | | 7 | | |
| | | | | NN-3′ | | |
| mcPC | GA01 | CAGGTTC | 81 | 5′csasgGUUCCAUGGGAUGCUCUg | 2898 | SpCas |
| SK9 | 260 | CATGGG | | UUUUAGagcuagaaauagcaaGUUsaAa | | 9 |
| | | ATGCTCT | | AuAaggcuaGUccGUUsAucAAcuuGa | | |
| | | | | aaaaguGgcaccgAgUCggugcusususuN | | |
| | | | | NN-3′ | | |
| mcPC | GA01 | CAGGTTC | 81 | 5′csasgGUUCCAUGGGAUGCUCUg | 2901 | SpCas |
| SK9 | 261 | CATGGG | | UUUUAGagcuaGaaauagcaaGUUsaAa | | 9 |
| | | ATGCTCT | | AuAaggCUaGUCcGUUsAucAAcuug | | |
| | | | | NN-3′ | | |
| mcPC | GA01 | CAGGTTC | 81 | 5′csasgGUUCCAUGGGAUGCUCUg | 2902 | SpCas |
| SK9 | 262 | CATGGG | | UUUUAGagcuaGaaauagcaaGUUsaAa | | 9 |
| | | ATGCTCT | | AuAaggCUaGUCcGUUsAucAAcuug | | |
| | | | | aaaaaguGgcaccgAgUcggugcusususuN | | |
| | | | | NN-3′ | | |
| mcPC | GA01 | CAGGTTC | 81 | 5′csasgGUUCCAUGGGAUGCUCUg | 2903 | SpCas |
| SK9 | 263 | CATGGG | | UUUUAGagcuaGaaauagcaaGUUsaAa | | 9 |
| | | ATGCTCT | | AuAaggcuaGUccGUUsAucAAcuuGa | | |
| | | | | NN-3′ | | |
| mPCS | GA01 | CCCATAC | 69 | 5′cscscAUACCUUGGAGCAACGGg | 1836 | ABE |
| K9 | 264 | CTTGGA | | UUUUsAGagcuaGaaauagcaaGUUsaA | | |
| | | GCAACG | | aAuAaggCUaGUCcGUUAucAAcuuG | | |
| | | G | | NN-3′ | | |
| mPCS | GA01 | CCCATAC | 69 | 5′cscscAUACCUUGGAGCAACGGg | 2904 | ABE |
| K9 | 265 | CTTGGA | | UUUUsAGagcuagaaauagcaaGUUsaA | | |
| | | GCAACG | | aAuAaggcuaGUccGUUAucAAcuugaa | | |
| | | G | | aaagugGcaccgagucggugcusususuNNN | | |
| | | | | -3′ | | |
| mPCS | GA01 | CCCATAC | 69 | 5′cscscAUACCUUGGAGCAACGGg | 2905 | ABE |
| K9 | 266 | CTTGGA | | UUUUsAGagcuaGaaauagcaaGUUsaA | | |
| | | GCAACG | | aAuAaggcuaGUccGUUAucAAcuuGa | | |
| | | G | | aaaagugGcaccgagucggugcusususuNN | | |
| | | | | N-3′ | | |
| mAN | GA01 | GAGATA | 241 | 5′gsasgAUACCUGAGUAACUUUCg | 1837 | ABE |
| GPTL | 267 | CCTGAGT | | UUUUsAGagcuaGaaauagcaaGUUsaA | | |
| 3 | | AACTTTC | | aAuAaggCUaGUCcGUUAucAAcuuG | | |
| | | | | NN-3′ | | |
| mAN | GA01 | GAGATA | 241 | 5′gsasgAUACCUGAGUAACUUUCg | 2906 | ABE |
| GPTL | 268 | CCTGAGT | | UUUUsAGagcuagaaauagcaaGUUsaA | | |
| 3 | | AACTTTC | | aAuAaggcuaGUccGUUAucAAcuugaa | | |
| | | | | aaagugGcaccgagucggugcusususuNNN | | |
| | | | | -3′ | | |
| mAN | GA01 | GAGATA | 241 | 5′gsasgAUACCUGAGUAACUUUCg | 2907 | ABE |
| GPTL | 269 | CCTGAGT | | UUUUsAGagcuaGaaauagcaaGUUsaA | | |
| 3 | | AACTTTC | | aAuAaggcuaGUccGUUAucAAcuuGa | | |
| | | | | aaaagugGcaccgagucggugcusususuNN | | |
| | | | | N-3′ | | |
| mcPC | GA01 | CAGGTTC | 81 | 5′csasgGUUCCAUGGGAUGCUCUg | 1838 | SpCas |
| SK9 | 270 | CATGGG | | UUUUsAGagcuaGaaauagcaaGUUsaA | | 9 |
| | | ATGCTCT | | aAuAaggcuaGUccGUUAucAAcuuGa | | |
| | | | | aaaagugGcaccgagucggugcusususuNN | | |
| | | | | N-3′ | | |
| mcPC | GA01 | CAGGTTC | 81 | 5′csasgGUUCCAUGGGAUGCUCUg | 2908 | SpCas |
| SK9 | 271 | CATGGG | | UUUUsAGagcuagaaauagcaaGUUsaA | | 9 |
| | | ATGCTCT | | aAuAaggCUaGUCcGUUAucAAcuuG | | |
| | | | | aaaaaguGgcaccgAgUCggugcusususuN | | |
| | | | | NN-3′ | | |
| mcPC | GA01 | CAGGTTC | 81 | 5′csasgGUUCCAUGGGAUGCUCUg | 2909 | SpCas |
| SK9 | 272 | CATGGG | | UUUUsAGagcuagaaauagcaaGUUsaA | | 9 |
| | | ATGCTCT | | aAuAaggcuaGUccGUUAucAAcuuGa | | |
| | | | | aaaaguGgcaccgAgUCggugcusususuN | | |
| | | | | NN-3′ | | |
| mcPC | GA01 | CAGGTTC | 81 | 5′csasgGUUCCAUGGGAUGCUCUg | 2910 | SpCas |
| SK9 | 273 | CATGGG | | UUUUsAGagcuagaaauagcaaGUUsaA | | 9 |
| | | ATGCTCT | | aAuAaggCUaGUCcGUUAucAAcuug | | |
| | | | | NN-3′ | | |
| mcPC | GA01 | CAGGTTC | 81 | 5′csasgGUUCCAUGGGAUGCUCUg | 2911 | SpCas |
| SK9 | 274 | CATGGG | | UUUUsAGagcuagaaauagcaaGUUsaA | | 9 |
| | | ATGCTCT | | aAuAaggCUaGUCcGUUAucAAcuug | | |
| | | | | aaaaaguGgcaccgAgUcggugcusususuN | | |
| | | | | NN-3′ | | |
| mcPC | GA01 | CAGGTTC | 81 | 5′csasgGUUCCAUGGGAUGCUCUg | 2909 | SpCas |
| SK9 | 275 | CATGGG | | UUUUsAGagcuagaaauagcaaGUUsaA | | 9 |
| | | ATGCTCT | | aAuAaggcuaGUccGUUAucAAcuuGa | | |
| | | | | aaaaguGgcaccgAgUCggugcusususuN | | |
| | | | | NN-3′ | | |
| mcPC | GA01 | CAGGTTC | 81 | 5′csasgGUUCCAUGGGAUGCUCUg | 2912 | SpCas |
| SK9 | 276 | CATGGG | | UUUUsAGagcuaGaaauagcaaGUUsaA | | 9 |
| | | ATGCTCT | | aAuAaggCUaGUCcGUUAucAAcuug | | |
| | | | | aaaaaguGgcaccgAgUCggugcusususuN | | |
| | | | | NN-3′ | | |
| mcPC | GA01 | CAGGTTC | 81 | 5′csasgGUUCCAUGGGAUGCUCUg | 2913 | SpCas |
| SK9 | 277 | CATGGG | | UUUUsAGagcuaGaaauagcaaGUUsaA | | 9 |
| | | ATGCTCT | | aAuAaggCUaGUCcGUUAucAAcuug | | |
| | | | | aaaaaguGgcaccgAgUcggugcusususuN | | |
| | | | | NN-3′ | | |
| mcPC | GA01 | CAGGTTC | 81 | 5′csasgGUUCCAUGGGAUGCUCUg | 2914 | SpCas |
| SK9 | 278 | CATGGG | | UUUUsAGagcuaGaaauagcaaGUUsaA | | 9 |
| | | ATGCTCT | | aAuAaggcuaGUccGUUAucAAcuuGa | | |
| | | | | aaaaguGgcaccgAgUCggugcusususuN | | |
| | | | | NN-3′ | | |
| mPCS | GA01 | CCCATAC | 69 | 5′cscscAUACCUUGGAGCAACGGg | 1839 | ABE |
| K9 | 279 | CTTGGA | | UUUUsAGagcuaGaaauagcaaGUUaAa | | |
| | | GCAACG | | AuAaggCUaGUCcGUUsAucAAcuuG | | |
| | | G | | aaaaaguGgcaccgAgUCggugcusususuN | | |
| | | | | NN-3′ | | |
| mPCS | GA01 | CCCATAC | 69 | 5′cscscAUACCUUGGAGCAACGGg | 2915 | ABE |
| K9 | 280 | CTTGGA | | UUUUsAGagcuagaaauagcaaGUUaAa | | |
| | | GCAACG | | AuAaggcuaGUccGUUsAucAAcuugaa | | |
| | | G | | aaagugGcaccgagucggugcusususuNNN | | |
| | | | | -3′ | | |
| mPCS | GA01 | CCCATAC | 69 | 5′cscscAUACCUUGGAGCAACGGg | 2916 | ABE |
| K9 | 281 | CTTGGA | | UUUUsAGagcuaGaaauagcaaGUUaAa | | |
| | | GCAACG | | AuAaggcuaGUccGUUsAucAAcuuGa | | |
| | | G | | aaaagugGcaccgagucggugcusususuNN | | |
| | | | | N-3′ | | |
| mAN | GA01 | GAGATA | 241 | 5′gsasgAUACCUGAGUAACUUUCg | 1840 | ABE |
| GPTL | 282 | CCTGAGT | | UUUUsAGagcuaGaaauagcaaGUUaAa | | |
| 3 | | AACTTTC | | AuAaggCUaGUCcGUUsAucAAcuuG | | |
| | | | | aaaaaguGgcaccgAgUCggugcusususuN | | |
| | | | | NN-3′ | | |
| mAN | GA01 | GAGATA | 241 | 5′gsasgAUACCUGAGUAACUUUCg | 2917 | ABE |
| GPTL | 283 | CCTGAGT | | UUUUsAGagcuagaaauagcaaGUUaAa | | |
| 3 | | AACTTTC | | AuAaggcuaGUccGUUsAucAAcuugaa | | |
| | | | | aaagugGcaccgagucggugcusususuNNN | | |
| | | | | -3′ | | |
| mAN | GA01 | GAGATA | 241 | 5′gsasgAUACCUGAGUAACUUUCg | 2918 | ABE |
| GPTL | 284 | CCTGAGT | | UUUUsAGagcuaGaaauagcaaGUUaAa | | |
| 3 | | AACTTTC | | AuAaggcuaGUccGUUsAucAAcuuGa | | |
| | | | | aaaagugGcaccgagucggugcusususuNN | | |
| | | | | N-3′ | | |
| mcPC | GA01 | CAGGTTC | 81 | 5′csasgGUUCCAUGGGAUGCUCUg | 1841 | SpCas |
| SK9 | 285 | CATGGG | | UUUUsAGagcuaGaaauagcaaGUUaAa | | 9 |
| | | ATGCTCT | | AuAaggcuaGUccGUUsAucAAcuuGa | | |
| | | | | aaaagugGcaccgagucggugcusususuNN | | |
| | | | | N-3′ | | |
| mcPC | GA01 | CAGGTTC | 81 | 5′csasgGUUCCAUGGGAUGCUCUg | 2919 | SpCas |
| SK9 | 286 | CATGGG | | UUUUsAGagcuagaaauagcaaGUUaAa | | 9 |
| | | ATGCTCT | | AuAaggCUaGUCcGUUsAucAAcuuG | | |
| | | | | NN-3′ | | |
| mcPC | GA01 | CAGGTTC | 81 | 5′csasgGUUCCAUGGGAUGCUCUg | 2920 | SpCas |
| SK9 | 287 | CATGGG | | UUUUsAGagcuagaaauagcaaGUUaAa | | 9 |
| | | ATGCTCT | | AuAaggcuaGUccGUUsAucAAcuuGa | | |
| | | | | aaaaguGgcaccgAgUCggugcusususuN | | |
| | | | | NN-3′ | | |
| mcPC | GA01 | CAGGTTC | 81 | 5′csasgGUUCCAUGGGAUGCUCUg | 2921 | SpCas |
| SK9 | 288 | CATGGG | | UUUUsAGagcuagaaauagcaaGUUaAa | | 9 |
| | | ATGCTCT | | AuAaggCUaGUCcGUUsAucAAcuug | | |
| | | | | aaaaaguGgcaccgAgUCggugcusususuN | | |
| | | | | NN-3′ | | |
| mcPC | GA01 | CAGGTTC | 81 | 5′csasgGUUCCAUGGGAUGCUCUg | 2922 | SpCas |
| SK9 | 289 | CATGGG | | UUUUsAGagcuagaaauagcaaGUUaAa | | 9 |
| | | ATGCTCT | | AuAaggCUaGUCcGUUsAucAAcuug | | |
| | | | | aaaaaguGgcaccgAgUcggugcusususuN | | |
| | | | | NN-3′ | | |
| mcPC | GA01 | CAGGTTC | 81 | 5′csasgGUUCCAUGGGAUGCUCUg | 2920 | SpCas |
| SK9 | 290 | CATGGG | | UUUUsAGagcuagaaauagcaaGUUaAa | | 9 |
| | | ATGCTCT | | AuAaggcuaGUccGUUsAucAAcuuGa | | |
| | | | | aaaaguGgcaccgAgUCggugcusususuN | | |
| | | | | NN-3′ | | |
| mcPC | GA01 | CAGGTTC | 81 | 5′csasgGUUCCAUGGGAUGCUCUg | 2923 | SpCas |
| SK9 | 291 | CATGGG | | UUUUsAGagcuaGaaauagcaaGUUaAa | | 9 |
| | | ATGCTCT | | AuAaggCUaGUCcGUUsAucAAcuug | | |
| | | | | NN-3′ | | |
| mcPC | GA01 | CAGGTTC | 81 | 5′csasgGUUCCAUGGGAUGCUCUg | 2924 | SpCas |
| SK9 | 292 | CATGGG | | UUUUsAGagcuaGaaauagcaaGUUaAa | | 9 |
| | | ATGCTCT | | AuAaggCUaGUCcGUUsAucAAcuug | | |
| | | | | NN-3′ | | |
| mcPC | GA01 | CAGGTTC | 81 | 5′csasgGUUCCAUGGGAUGCUCUg | 2925 | SpCas |
| SK9 | 293 | CATGGG | | UUUUsAGagcuaGaaauagcaaGUUaAa | | 9 |
| | | ATGCTCT | | AuAaggcuaGUccGUUsAucAAcuuGa | | |
| | | | | aaaaguGgcaccgAgUCggugcusususuN | | |
| | | | | NN-3′ | | |
| mPCS | GA01 | CCCATAC | 69 | 5′cscscAUACCUUGGAGCAACGGg | 1842 | ABE |
| K9 | 294 | CTTGGA | | UUUUsAGagcuaGaaauagcaaGUUsaA | | |
| | | GCAACG | | aAuAaggCUaGUCcGUUsAucAAcuu | | |
| | | G | | GaaaaaguGgcaccgAgUCggugcusususu | | |
| | | | | NNN-3′ | | |
| mPCS | GA01 | CCCATAC | 69 | 5′cscscAUACCUUGGAGCAACGGg | 2926 | ABE |
| K9 | 295 | CTTGGA | | UUUUsAGagcuagaaauagcaaGUUsaA | | |
| | | GCAACG | | aAuAaggcuaGUccGUUsAucAAcuuga | | |
| | | G | | aaaagugGcaccgagucggugcusususuNN | | |
| | | | | N-3′ | | |
| mPCS | GA01 | CCCATAC | 69 | 5′cscscAUACCUUGGAGCAACGGg | 2927 | ABE |
| K9 | 296 | CTTGGA | | UUUUsAGagcuaGaaauagcaaGUUsaA | | |
| | | GCAACG | | aAuAaggcuaGUccGUUsAucAAcuuG | | |
| | | G | | N-3′ | | |
| mAN | GA01 | GAGATA | 241 | 5′gsasgAUACCUGAGUAACUUUCg | 1843 | ABE |
| GPTL | 297 | CCTGAGT | | UUUUsAGagcuaGaaauagcaaGUUsaA | | |
| 3 | | AACTTTC | | aAuAaggCUaGUCcGUUsAucAAcuu | | |
| | | | | GaaaaaguGgcaccgAgUCggugcusususu | | |
| | | | | NNN-3′ | | |
| mAN | GA01 | GAGATA | 241 | 5′gsasAUACCUGAGUAACUUUCgU | 1844 | ABE |
| GPTL | 298 | CCTGAGT | | UUUsAGagcuagaaauagcaaGUUsaAa | | |
| 3 | | AACTTTC | | AuAaggcuaGUccGUUsAucAAcuugaa | | |
| | | | | aaagugGcaccgagucggugcusususuNNN | | |
| | | | | -3′ | | |
| mAN | GA01 | GAGATA | 241 | 5′gsasgAUACCUGAGUAACUUUCg | 2928 | ABE |
| GPTL | 299 | CCTGAGT | | UUUUsAGagcuaGaaauagcaaGUUsaA | | |
| 3 | | AACTTTC | | aAuAaggcuaGUccGUUsAucAAcuuG | | |
| | | | | aaaaagugGcaccgagucggugcusususuNN | | |
| | | | | N-3′ | | |
| mcPC | GA01 | CAGGTTC | 81 | 5′csasgGUUCCAUGGGAUGCUCUg | 1845 | SpCas |
| SK9 | 300 | CATGGG | | UUUUsAGagcuaGaaauagcaaGUUsaA | | 9 |
| | | ATGCTCT | | aAuAaggcuaGUccGUUsAucAAcuuG | | |
| | | | | aaaaagugGcaccgagucggugcusususuNN | | |
| | | | | N-3′ | | |
| mcPC | GA01 | CAGGTTC | 81 | 5′csasgGUUCCAUGGGAUGCUCUg | 2929 | SpCas |
| SK9 | 301 | CATGGG | | UUUUsAGagcuagaaauagcaaGUUsaA | | 9 |
| | | ATGCTCT | | aAuAaggCUaGUCcGUUsAucAAcuu | | |
| | | | | GaaaaaguGgcaccgAgUCggugcusususu | | |
| | | | | NNN-3′ | | |
| mcPC | GA01 | CAGGTTC | 81 | 5′csasgGUUCCAUGGGAUGCUCUg | 2930 | SpCas |
| SK9 | 302 | CATGGG | | UUUUsAGagcuagaaauagcaaGUUsaA | | 9 |
| | | ATGCTCT | | aAuAaggcuaGUccGUUsAucAAcuuG | | |
| | | | | aaaaaguGgcaccgAgUCggugcusususuN | | |
| | | | | NN-3′ | | |
| mcPC | GA01 | CAGGTTC | 81 | 5′csasgGUUCCAUGGGAUGCUCUg | 2931 | SpCas |
| SK9 | 303 | CATGGG | | UUUUsAGagcuagaaauagcaaGUUsaA | | 9 |
| | | ATGCTCT | | aAuAaggCUaGUCcGUUsAucAAcuu | | |
| | | | | gaaaaaguGgcaccgAgUCggugcusususu | | |
| | | | | NNN-3′ | | |
| mcPC | GA01 | CAGGTTC | 81 | 5′csasgGUUCCAUGGGAUGCUCUg | 2932 | SpCas |
| SK9 | 304 | CATGGG | | UUUUsAGagcuagaaauagcaaGUUsaA | | 9 |
| | | ATGCTCT | | aAuAaggCUaGUCcGUUsAucAAcuu | | |
| | | | | gaaaaaguGgcaccgAgUcggugcusususu | | |
| | | | | NNN-3′ | | |
| mcPC | GA01 | CAGGTTC | 81 | 5′csasgGUUCCAUGGGAUGCUCUg | 2930 | SpCas |
| SK9 | 305 | CATGGG | | UUUUsAGagcuagaaauagcaaGUUsaA | | 9 |
| | | ATGCTCT | | aAuAaggcuaGUccGUUsAucAAcuuG | | |
| | | | | aaaaaguGgcaccgAgUCggugcusususuN | | |
| | | | | NN-3′ | | |
| mcPC | GA01 | CAGGTTC | 81 | 5′csasgGUUCCAUGGGAUGCUCUg | 2933 | SpCas |
| SK9 | 306 | CATGGG | | UUUUsAGagcuaGaaauagcaaGUUsaA | | 9 |
| | | ATGCTCT | | aAuAaggCUaGUCcGUUsAucAAcuu | | |
| | | | | gaaaaaguGgcaccgAgUCggugcusususu | | |
| | | | | NNN-3′ | | |
| mcPC | GA01 | CAGGTTC | 81 | 5′csasgGUUCCAUGGGAUGCUCUg | 2934 | SpCas |
| SK9 | 307 | CATGGG | | UUUUsAGagcuaGaaauagcaaGUUsaA | | 9 |
| | | ATGCTCT | | aAuAaggCUaGUCcGUUsAucAAcuu | | |
| | | | | gaaaaaguGgcaccgAgUcggugcusususu | | |
| | | | | NNN-3′ | | |
| mcPC | GA01 | CAGGTTC | 81 | 5′csasgGUUCCAUGGGAUGCUCUg | 2935 | SpCas |
| SK9 | 308 | CATGGG | | UUUUsAGagcuaGaaauagcaaGUUsaA | | 9 |
| | | ATGCTCT | | aAuAaggcuaGUccGUUsAucAAcuuG | | |
| | | | | aaaaaguGgcaccgAgUCggugcusususuN | | |
| | | | | NN-3′ | | |
| mcPC | GA01 | CAGGTTC | 81 | 5′csasgsGUUCCAUGGGAUGCUCU | 1846 | SpCas |
| SK9 | 309 | CATGGG | | gUUUUAGagcuaGaaauagcaaGUUaAa | | 9 |
| | | ATGCTCT | | AuAaggCUaGUCcGUUAucAAcuuGa | | |
| | | | | aaaaguGgcaccgAgUCggugcuususuNN | | |
| | | | | N-3 | | |
| mcPC | GA01 | CAGGTTC | 81 | 5′csasgsGUUCCAUGGGAUGCUCU | 1847 | SpCas |
| SK9 | 310 | CATGGG | | gUUUUAGagcuagaaauagcaaGUUaAa | | 9 |
| | | ATGCTCT | | AuAaggcuaGUccGUUAucAAcuugaaa | | |
| | | | | aagugGcaccgagucggugcuususuNNN-3′ | | |
| mPCS | GA01 | CCCATAC | 69 | 5′cscscsAUACCUUGGAGCAACGGg | 1848 | ABE |
| K9 | 311 | CTTGGA | | UUUUAGagcuaGaaauagcaaGUUaAa | | |
| | | GCAACG | | AuAaggCUaGUCcGUUAucAAcuuGa | | |
| | | G | | aaaaguGgcaccgAgUCggugcuususuNN | | |
| | | | | N-3′ | | |
| mPCS | GA01 | CCCATAC | 69 | 5′cscscsAUACCUUGGAGCAACGGg | 2936 | ABE |
| K9 | 312 | CTTGGA | | UUUUAGagcuagaaauagcaaGUUaAaA | | |
| | | GCAACG | | uAaggcuaGUccGUUAucAAcuugaaaa | | |
| | | G | | agugGcaccgagucggugcuususuNNN-3′ | | |
| mPCS | GA01 | CCCATAC | 69 | 5′cscscsAUACCUUGGAGCAACGGg | 2937 | ABE |
| K9 | 313 | CTTGGA | | UUUUAGagcuaGaaauagcaaGUUaAa | | |
| | | GCAACG | | AuAaggcuaGUccGUUAucAAcuuGaa | | |
| | | G | | aaagugGcaccgagucggugcuususuNNN- | | |
| | | | | 3′ | | |
| mAN | GA01 | GAGATA | 241 | 5′gsasgsAUACCUGAGUAACUUUC | 1849 | ABE |
| GPTL | 314 | CCTGAGT | | gUUUUAGagcuaGaaauagcaaGUUaAa | | |
| 3 | | AACTTTC | | AuAaggCUaGUCcGUUAucAAcuuGa | | |
| | | | | aaaaguGgcaccgAgUCggugcuususuNN | | |
| | | | | N-3′ | | |
| mAN | GA01 | GAGATA | 241 | 5′gsasgsAUACCUGAGUAACUUUC | 2938 | ABE |
| GPTL | 315 | CCTGAGT | | gUUUUAGagcuagaaauagcaaGUUaAa | | |
| 3 | | AACTTTC | | AuAaggcuaGUccGUUAucAAcuugaaa | | |
| | | | | aagugGcaccgagucggugcuususuNNN-3′ | | |
| mAN | GA01 | GAGATA | 241 | 5′gsasgsAUACCUGAGUAACUUUC | 2939 | ABE |
| GPTL | 316 | CCTGAGT | | gUUUUAGagcuaGaaauagcaaGUUaAa | | |
| 3 | | AACTTTC | | AuAaggcuaGUccGUUAucAAcuuGaa | | |
| | | | | aaagugGcaccgagucggugcuususuNNN- | | |
| | | | | 3′ | | |
| mcPC | GA01 | CAGGTTC | 81 | 5′csasgsGUUCCAUGGGAUGCUCU | 2940 | SpCas |
| SK9 | 317 | CATGGG | | gUUUUAGagcuaGaaauagcaaGUUaAa | | 9 |
| | | ATGCTCT | | AuAaggcuaGUccGUUAucAAcuuGaa | | |
| | | | | aaagugGcaccgagucggugcuususuNNN- | | |
| | | | | 3′ | | |
| mcPC | GA01 | CAGGTTC | 81 | 5′csasgsGUUCCAUGGGAUGCUCU | 2941 | SpCas |
| SK9 | 318 | CATGGG | | gUUUUAGagcuagaaauagcaaGUUaAa | | 9 |
| | | ATGCTCT | | AuAaggCUaGUCcGUUAucAAcuuGa | | |
| | | | | aaaaguGgcaccgAgUCggugcuususuNN | | |
| | | | | N-3′ | | |
| mcPC | GA01 | CAGGTTC | 81 | 5′csasgsGUUCCAUGGGAUGCUCU | 2942 | SpCas |
| SK9 | 319 | CATGGG | | gUUUUAGagcuagaaauagcaaGUUaAa | | 9 |
| | | ATGCTCT | | AuAaggcuaGUccGUUAucAAcuuGaa | | |
| | | | | aaaguGgcaccgAgUCggugcuususuNN | | |
| | | | | N-3′ | | |
| mcPC | GA01 | CAGGTTC | 81 | 5′csasgsGUUCCAUGGGAUGCUCU | 2943 | SpCas |
| SK9 | 320 | CATGGG | | gUUUUAGagcuagaaauagcaaGUUaAa | | 9 |
| | | ATGCTCT | | AuAaggCUaGUCcGUUAucAAcuuga | | |
| | | | | aaaaguGgcaccgAgUCggugcuususuNN | | |
| | | | | N-3′ | | |
| mcPC | GA01 | CAGGTTC | 81 | 5′csasgsGUUCCAUGGGAUGCUCU | 2944 | SpCas |
| SK9 | 321 | CATGGG | | gUUUUAGagcuagaaauagcaaGUUaAa | | 9 |
| | | ATGCTCT | | AuAaggCUaGUCcGUUAucAAcuuga | | |
| | | | | aaaaguGgcaccgAgUcggugcuususuNN | | |
| | | | | N-3′ | | |
| mcPC | GA01 | CAGGTTC | 81 | 5′csasgsGUUCCAUGGGAUGCUCU | 2942 | SpCas |
| SK9 | 322 | CATGGG | | gUUUUAGagcuagaaauagcaaGUUaAa | | 9 |
| | | ATGCTCT | | AuAaggcuaGUccGUUAucAAcuuGaa | | |
| | | | | aaaguGgcaccgAgUCggugcuususuNN | | |
| | | | | N-3′ | | |
| mcPC | GA01 | CAGGTTC | 81 | 5′csasgsGUUCCAUGGGAUGCUCU | 2945 | SpCas |
| SK9 | 323 | CATGGG | | gUUUUAGagcuaGaaauagcaaGUUaAa | | 9 |
| | | ATGCTCT | | AuAaggCUaGUCcGUUAucAAcuuga | | |
| | | | | aaaaguGgcaccgAgUCggugcuususuNN | | |
| | | | | N-3 | | |
| mcPC | GA01 | CAGGTTC | 81 | 5′csasgsGUUCCAUGGGAUGCUCU | 2946 | SpCas |
| SK9 | 324 | CATGGG | | gUUUUAGagcuaGaaauagcaaGUUaAa | | 9 |
| | | ATGCTCT | | AuAaggCUaGUCcGUUAucAAcuuga | | |
| | | | | aaaaguGgcaccgAgUcggugcuususuNN | | |
| | | | | N-3′ | | |
| mcPC | GA01 | CAGGTTC | 81 | 5′csasgsGUUCCAUGGGAUGCUCU | 2947 | SpCas |
| SK9 | 325 | CATGGG | | gUUUUAGagcuaGaaauagcaaGUUaAa | | 9 |
| | | ATGCTCT | | AuAaggcuaGUccGUUAucAAcuuGaa | | |
| | | | | aaaguGgcaccgAgUCggugcuususuNN | | |
| | | | | N-3′ | | |
| mPCS | GA01 | CCCATAC | 69 | 5′cscscsAUACCUUGGAGCAACGGg | 1850 | ABE |
| K9 | 326 | CTTGGA | | UUUUAGagcuaGaaauagcaaGUUaAa | | |
| | | GCAACG | | AuAaggCUaGUCcGUUsAucAAcuuG | | |
| | | G | | aaaaaguGgcaccgAgUCggugcuususuN | | |
| | | | | NN-3′ | | |
| mPCS | GA01 | CCCATAC | 69 | 5′cscscsAUACCUUGGAGCAACGGg | 2948 | ABE |
| K9 | 327 | CTTGGA | | UUUUAGagcuagaaauagcaaGUUaAaA | | |
| | | GCAACG | | uAaggcuaGUccGUUsAucAAcuugaaaa | | |
| | | G | | agugGcaccgagucggugcuususuNNN-3′ | | |
| mPCS | GA01 | CCCATAC | 69 | 5′cscscsAUACCUUGGAGCAACGGg | 2949 | ABE |
| K9 | 328 | CTTGGA | | UUUUAGagcuaGaaauagcaaGUUaAa | | |
| | | GCAACG | | AuAaggcuaGUccGUUsAucAAcuuGa | | |
| | | G | | aaaagugGcaccgagucggugcuususuNNN | | |
| | | | | -3′ | | |
| mAN | GA01 | GAGATA | 241 | 5′gsasgsAUACCUGAGUAACUUUC | 1851 | ABE |
| GPTL | 329 | CCTGAGT | | gUUUUAGagcuaGaaauagcaaGUUaAa | | |
| 3 | | AACTTTC | | AuAaggCUaGUCcGUUsAucAAcuuG | | |
| | | | | aaaaaguGgcaccgAgUCggugcuususuN | | |
| | | | | NN-3′ | | |
| mAN | GA01 | GAGATA | 241 | 5′gsasgsAUACCUGAGUAACUUUC | 2950 | ABE |
| GPTL | 330 | CCTGAGT | | gUUUUAGagcuagaaauagcaaGUUaAa | | |
| 3 | | AACTTTC | | AuAaggcuaGUccGUUsAucAAcuugaa | | |
| | | | | aaagugGcaccgagucggugcuususuNNN- | | |
| | | | | 3′ | | |
| mAN | GA01 | GAGATA | 241 | 5′gsasgsAUACCUGAGUAACUUUC | 2951 | ABE |
| GPTL | 331 | CCTGAGT | | gUUUUAGagcuaGaaauagcaaGUUaAa | | |
| 3 | | AACTTTC | | AuAaggcuaGUccGUUsAucAAcuuGa | | |
| | | | | aaaagugGcaccgagucggugcuususuNNN | | |
| | | | | -3′ | | |
| mcPC | GA01 | CAGGTTC | 81 | 5′csasgsGUUCCAUGGGAUGCUCU | 1852 | SpCas |
| SK9 | 332 | CATGGG | | gUUUUAGagcuaGaaauagcaaGUUaAa | | 9 |
| | | ATGCTCT | | AuAaggcuaGUccGUUsAucAAcuuGa | | |
| | | | | aaaagugGcaccgagucggugcuususuNNN | | |
| | | | | -3′ | | |
| mcPC | GA01 | CAGGTTC | 81 | 5′csasgsGUUCCAUGGGAUGCUCU | 2952 | SpCas |
| SK9 | 333 | CATGGG | | gUUUUAGagcuagaaauagcaaGUUaAa | | 9 |
| | | ATGCTCT | | AuAaggCUaGUCcGUUsAucAAcuuG | | |
| | | | | aaaaaguGgcaccgAgUCggugcuususuN | | |
| | | | | NN-3′ | | |
| mcPC | GA01 | CAGGTTC | 81 | 5′csasgsGUUCCAUGGGAUGCUCU | 2953 | SpCas |
| SK9 | 334 | CATGGG | | gUUUUAGagcuagaaauagcaaGUUaAa | | 9 |
| | | ATGCTCT | | AuAaggcuaGUccGUUsAucAAcuuGa | | |
| | | | | aaaaguGgcaccgAgUCggugcuususuNN | | |
| | | | | N-3′ | | |
| mcPC | GA01 | CAGGTTC | 81 | 5′csasgsGUUCCAUGGGAUGCUCU | 2954 | SpCas |
| SK9 | 335 | CATGGG | | gUUUUAGagcuagaaauagcaaGUUaAa | | 9 |
| | | ATGCTCT | | AuAaggCUaGUCcGUUsAucAAcuug | | |
| | | | | 20 | | |
| | | | | NN-3′ | | |
| mcPC | GA01 | CAGGTTC | 81 | 5′csasgsGUUCCAUGGGAUGCUCU | 2955 | SpCas |
| SK9 | 336 | CATGGG | | gUUUUAGagcuagaaauagcaaGUUaAa | | 9 |
| | | ATGCTCT | | AuAaggCUaGUCcGUUsAucAAcuug | | |
| | | | | aaaaaguGgcaccgAgUcggugcuususuNN | | |
| | | | | N-3′ | | |
| mcPC | GA01 | CAGGTTC | 81 | 5′csasgsGUUCCAUGGGAUGCUCU | 2953 | SpCas |
| SK9 | 337 | CATGGG | | gUUUUAGagcuagaaauagcaaGUUaAa | | 9 |
| | | ATGCTCT | | AuAaggcuaGUccGUUsAucAAcuuGa | | |
| | | | | aaaaguGgcaccgAgUCggugcuususuNN | | |
| | | | | N-3′ | | |
| mcPC | GA01 | CAGGTTC | 81 | 5′csasgsGUUCCAUGGGAUGCUCU | 2956 | SpCas |
| SK9 | 338 | CATGGG | | gUUUUAGagcuaGaaauagcaaGUUaAa | | 9 |
| | | ATGCTCT | | AuAaggCUaGUCcGUUsAucAAcuug | | |
| | | | | aaaaaguGgcaccgAgUCggugcuususuN | | |
| | | | | NN-3′ | | |
| mcPC | GA01 | CAGGTTC | 81 | 5′csasgsGUUCCAUGGGAUGCUCU | 2957 | SpCas |
| SK9 | 339 | CATGGG | | gUUUUAGagcuaGaaauagcaaGUUaAa | | 9 |
| | | ATGCTCT | | AuAaggCUaGUCcGUUsAucAAcuug | | |
| | | | | aaaaaguGgcaccgAgUcggugcuususuNN | | |
| | | | | N-3′ | | |
| mcPC | GA01 | CAGGTTC | 81 | 5′csasgsGUUCCAUGGGAUGCUCU | 2958 | SpCas |
| SK9 | 340 | CATGGG | | gUUUUAGagcuaGaaauagcaaGUUaAa | | 9 |
| | | ATGCTCT | | AuAaggcuaGUccGUUsAucAAcuuGa | | |
| | | | | aaaaguGgcaccgAgUCggugcuususuNN | | |
| | | | | N-3′ | | |
| mPCS | GA01 | CCCATAC | 69 | 5′cscscsAUACCUUGGAGCAACGGg | 1853 | ABE |
| K9 | 341 | CTTGGA | | UUUUAGagcuaGaaauagcaaGUUsaAa | | |
| | | GCAACG | | AuAaggCUaGUCcGUUAucAAcuuGa | | |
| | | G | | aaaaguGgcaccgAgUCggugcuususuNN | | |
| | | | | N-3′ | | |
| mPCS | GA01 | CCCATAC | 69 | 5′cscscsAUACCUUGGAGCAACGGg | 2959 | ABE |
| K9 | 342 | CTTGGA | | UUUUAGagcuagaaauagcaaGUUsaAa | | |
| | | GCAACG | | AuAaggcuaGUccGUUAucAAcuugaaa | | |
| | | G | | aagugGcaccgagucggugcuususuNNN-3′ | | |
| mPCS | GA01 | CCCATAC | 69 | 5′cscscsAUACCUUGGAGCAACGGg | 2960 | ABE |
| K9 | 343 | CTTGGA | | UUUUAGagcuaGaaauagcaaGUUsaAa | | |
| | | GCAACG | | AuAaggcuaGUccGUUAucAAcuuGaa | | |
| | | G | | aaagugGcaccgagucggugcuususuNNN- | | |
| | | | | 3′ | | |
| mAN | GA01 | GAGATA | 241 | 5′gsasgsAUACCUGAGUAACUUUC | 1854 | ABE |
| GPTL | 344 | CCTGAGT | | gUUUUAGagcuaGaaauagcaaGUUsaA | | |
| 3 | | AACTTTC | | aAuAaggCUaGUCcGUUAucAAcuuG | | |
| | | | | aaaaaguGgcaccgAgUCggugcuususuN | | |
| | | | | NN-3′ | | |
| mAN | GA01 | GAGATA | 241 | 5′gsasgsAUACCUGAGUAACUUUC | 2961 | ABE |
| GPTL | 345 | CCTGAGT | | gUUUUAGagcuagaaauagcaaGUUsaA | | |
| 3 | | AACTTTC | | aAuAaggcuaGUccGUUAucAAcuugaa | | |
| | | | | aaagugGcaccgagucggugcuususuNNN- | | |
| | | | | 3′ | | |
| mAN | GA01 | GAGATA | 241 | 5′gsasgsAUACCUGAGUAACUUUC | 2962 | ABE |
| GPTL | 346 | CCTGAGT | | gUUUUAGagcuaGaaauagcaaGUUsaA | | |
| 3 | | AACTTTC | | aAuAaggcuaGUccGUUAucAAcuuGa | | |
| | | | | aaaagugGcaccgagucggugcuususuNNN | | |
| | | | | -3′ | | |
| mcPC | GA01 | CAGGTTC | 81 | 5′csasgsGUUCCAUGGGAUGCUCU | 1855 | SpCas |
| SK9 | 347 | CATGGG | | gUUUUAGagcuaGaaauagcaaGUUsaA | | 9 |
| | | ATGCTCT | | aAuAaggcuaGUccGUUAucAAcuuGa | | |
| | | | | aaaagugGcaccgagucggugcuususuNNN | | |
| | | | | -3′ | | |
| mcPC | GA01 | CAGGTTC | 81 | 5′csasgsGUUCCAUGGGAUGCUCU | 2963 | SpCas |
| SK9 | 348 | CATGGG | | gUUUUAGagcuagaaauagcaaGUUsaA | | 9 |
| | | ATGCTCT | | aAuAaggCUaGUCcGUUAucAAcuuG | | |
| | | | | NN-3′ | | |
| mcPC | GA01 | CAGGTTC | 81 | 5′csasgsGUUCCAUGGGAUGCUCU | 2964 | SpCas |
| SK9 | 349 | CATGGG | | gUUUUAGagcuagaaauagcaaGUUsaA | | 9 |
| | | ATGCTCT | | aAuAaggcuaGUccGUUAucAAcuuGa | | |
| | | | | aaaaguGgcaccgAgUCggugcuususuNN | | |
| | | | | N-3′ | | |
| mcPC | GA01 | CAGGTTC | 81 | 5′csasgsGUUCCAUGGGAUGCUCU | 2787 | SpCas |
| SK9 | 350 | CATGGG | | gUUUUAGagcuagaaauagcaaGUUsaA | | 9 |
| | | ATGCTCT | | aAuAaggCUaGUCcGUUAucAAcuug | | |
| | | | | aaaaaguGgcaccgAgUCggugcusususuN | | |
| | | | | NN-3′ | | |
| mcPC | GA01 | CAGGTTC | 81 | 5′csasgsGUUCCAUGGGAUGCUCU | 2965 | SpCas |
| SK9 | 351 | CATGGG | | gUUUUAGagcuagaaauagcaaGUUsaA | | 9 |
| | | ATGCTCT | | aAuAaggCUaGUCcGUUAucAAcuug | | |
| | | | | aaaaaguGgcaccgAgUcggugcuususuNN | | |
| | | | | N-3′ | | |
| mcPC | GA01 | CAGGTTC | 81 | 5′csasgsGUUCCAUGGGAUGCUCU | 2964 | SpCas |
| SK9 | 352 | CATGGG | | gUUUUAGagcuagaaauagcaaGUUsaA | | 9 |
| | | ATGCTCT | | aAuAaggcuaGUccGUUAucAAcuuGa | | |
| | | | | aaaaguGgcaccgAgUCggugcuususuNN | | |
| | | | | N-3′ | | |
| mcPC | GA01 | CAGGTTC | 81 | 5′csasgsGUUCCAUGGGAUGCUCU | 2966 | SpCas |
| SK9 | 353 | CATGGG | | gUUUUAGagcuaGaaauagcaaGUUsaA | | 9 |
| | | ATGCTCT | | aAuAaggCUaGUCcGUUAucAAcuug | | |
| | | | | NN-3′ | | |
| mcPC | GA01 | CAGGTTC | 81 | 5′csasgsGUUCCAUGGGAUGCUCU | 2967 | SpCas |
| SK9 | 354 | CATGGG | | gUUUUAGagcuaGaaauagcaaGUUsaA | | 9 |
| | | ATGCTCT | | aAuAaggCUaGUCcGUUAucAAcuug | | |
| | | | | aaaaaguGgcaccgAgUcggugcuususuNN | | |
| | | | | N-3′ | | |
| mcPC | GA01 | CAGGTTC | 81 | 5′csasgsGUUCCAUGGGAUGCUCU | 2968 | SpCas |
| SK9 | 355 | CATGGG | | gUUUUAGagcuaGaaauagcaaGUUsaA | | 9 |
| | | ATGCTCT | | aAuAaggcuaGUccGUUAucAAcuuGa | | |
| | | | | aaaaguGgcaccgAgUCggugcuususuNN | | |
| | | | | N-3′ | | |
| mPCS | GA01 | CCCATAC | 69 | 5′cscscsAUACCUUGGAGCAACGGg | 1856 | ABE |
| K9 | 356 | CTTGGA | | UUUUsAGagcuaGaaauagcaaGUUaAa | | |
| | | GCAACG | | AuAaggCUaGUCcGUUAucAAcuuGa | | |
| | | G | | aaaaguGgcaccgAgUCggugcuususuNN | | |
| | | | | N-3′ | | |
| mPCS | GA01 | CCCATAC | 69 | 5′cscscsAUACCUUGGAGCAACGGg | 2969 | ABE |
| K9 | 357 | CTTGGA | | UUUUsAGagcuagaaauagcaaGUUaAa | | |
| | | GCAACG | | AuAaggcuaGUccGUUAucAAcuugaaa | | |
| | | G | | aagugGcaccgagucggugcuususuNNN-3′ | | |
| mPCS | GA01 | CCCATAC | 69 | 5′cscscsAUACCUUGGAGCAACGGg | 2970 | ABE |
| K9 | 358 | CTTGGA | | UUUUsAGagcuaGaaauagcaaGUUaAa | | |
| | | GCAACG | | AuAaggcuaGUccGUUAucAAcuuGaa | | |
| | | G | | aaagugGcaccgagucggugcuususuNNN- | | |
| | | | | 3′ | | |
| mAN | GA01 | GAGATA | 241 | 5′gsasgsAUACCUGAGUAACUUUC | 1857 | ABE |
| GPTL | 359 | CCTGAGT | | gUUUUsAGagcuaGaaauagcaaGUUaA | | |
| 3 | | AACTTTC | | aAuAaggCUaGUCcGUUAucAAcuuG | | |
| | | | | aaaaaguGgcaccgAgUCggugcuususuN | | |
| | | | | NN-3′ | | |
| mAN | GA01 | GAGATA | 241 | 5′gsasgsAUACCUGAGUAACUUUC | 2971 | ABE |
| GPTL | 360 | CCTGAGT | | gUUUUsAGagcuagaaauagcaaGUUaA | | |
| 3 | | AACTTTC | | aAuAaggcuaGUccGUUAucAAcuugaa | | |
| | | | | aaagugGcaccgagucggugcuususuNNN- | | |
| | | | | 3′ | | |
| mAN | GA01 | GAGATA | 241 | 5′gsasgsAUACCUGAGUAACUUUC | 2972 | ABE |
| GPTL | 361 | CCTGAGT | | gUUUUsAGagcuaGaaauagcaaGUUaA | | |
| 3 | | AACTTTC | | aAuAaggcuaGUccGUUAucAAcuuGa | | |
| | | | | aaaagugGcaccgagucggugcuususuNNN | | |
| | | | | -3′ | | |
| mcPC | GA01 | CAGGTTC | 81 | 5′csasgsGUUCCAUGGGAUGCUCU | 1858 | SpCas |
| SK9 | 362 | CATGGG | | gUUUUsAGagcuaGaaauagcaaGUUaA | | 9 |
| | | ATGCTCT | | aAuAaggcuaGUccGUUAucAAcuuGa | | |
| | | | | aaaagugGcaccgagucggugcuususuNNN | | |
| | | | | -3′ | | |
| mcPC | GA01 | CAGGTTC | 81 | 5′csasgsGUUCCAUGGGAUGCUCU | 2973 | SpCas |
| SK9 | 363 | CATGGG | | gUUUUsAGagcuagaaauagcaaGUUaA | | 9 |
| | | ATGCTCT | | aAuAaggCUaGUCcGUUAucAAcuuG | | |
| | | | | aaaaaguGgcaccgAgUCggugcuususuN | | |
| | | | | NN-3′ | | |
| mcPC | GA01 | CAGGTTC | 81 | 5′csasgsGUUCCAUGGGAUGCUCU | 2974 | SpCas |
| SK9 | 364 | CATGGG | | gUUUUsAGagcuagaaauagcaaGUUaA | | 9 |
| | | ATGCTCT | | aAuAaggcuaGUccGUUAucAAcuuGa | | |
| | | | | aaaaguGgcaccgAgUCggugcuususuNN | | |
| | | | | N-3′ | | |
| mcPC | GA01 | CAGGTTC | 81 | 5′csasgsGUUCCAUGGGAUGCUCU | 2975 | SpCas |
| SK9 | 365 | CATGGG | | gUUUUsAGagcuagaaauagcaaGUUaA | | 9 |
| | | ATGCTCT | | aAuAaggCUaGUCcGUUAucAAcuug | | |
| | | | | aaaaaguGgcaccgAgUCggugcuususuN | | |
| | | | | NN-3′ | | |
| mcPC | GA01 | CAGGTTC | 81 | 5′csasgsGUUCCAUGGGAUGCUCU | 2976 | SpCas |
| SK9 | 366 | CATGGG | | gUUUUsAGagcuagaaauagcaaGUUaA | | 9 |
| | | ATGCTCT | | aAuAaggCUaGUCcGUUAucAAcuug | | |
| | | | | aaaaaguGgcaccgAgUcggugcuususuNN | | |
| | | | | N-3′ | | |
| mcPC | GA01 | CAGGTTC | 81 | 5′csasgsGUUCCAUGGGAUGCUCU | 2974 | SpCas |
| SK9 | 367 | CATGGG | | gUUUUsAGagcuagaaauagcaaGUUaA | | 9 |
| | | ATGCTCT | | aAuAaggcuaGUccGUUAucAAcuuGa | | |
| | | | | aaaaguGgcaccgAgUCggugcuususuNN | | |
| | | | | N-3′ | | |
| mcPC | GA01 | CAGGTTC | 81 | 5′csasgsGUUCCAUGGGAUGCUCU | 2800 | SpCas |
| SK9 | 368 | CATGGG | | gUUUUsAGagcuaGaaauagcaaGUUaA | | 9 |
| | | ATGCTCT | | aAuAaggCUaGUCcGUUAucAAcuug | | |
| | | | | aaaaaguGgcaccgAgUCggugcusususuN | | |
| | | | | NN-3′ | | |
| mcPC | GA01 | CAGGTTC | 81 | 5′csasgsGUUCCAUGGGAUGCUCU | 2977 | SpCas |
| SK9 | 369 | CATGGG | | gUUUUsAGagcuaGaaauagcaaGUUaA | | 9 |
| | | ATGCTCT | | aAuAaggCUaGUCcGUUAucAAcuug | | |
| | | | | aaaaaguGgcaccgAgUcggugcuususuNN | | |
| | | | | N-3′ | | |
| mcPC | GA01 | CAGGTTC | 81 | 5′csasgsGUUCCAUGGGAUGCUCU | 2978 | SpCas |
| SK9 | 370 | CATGGG | | gUUUUsAGagcuaGaaauagcaaGUUaA | | 9 |
| | | ATGCTCT | | aAuAaggcuaGUccGUUAucAAcuuGa | | |
| | | | | aaaaguGgcaccgAgUCggugcuususuNN | | |
| | | | | N-3′ | | |
| mPCS | GA01 | CCCATAC | 69 | 5′cscscsAUACCUUGGAGCAACGGg | 1859 | ABE |
| K9 | 371 | CTTGGA | | UUUUAGagcuaGaaauagcaaGUUsaAa | | |
| | | GCAACG | | AuAaggCUaGUCcGUUsAucAAcuuG | | |
| | | G | | aaaaaguGgcaccgAgUCggugcuususuN | | |
| | | | | NN-3′ | | |
| mPCS | GA01 | CCCATAC | 69 | 5′cscscsAUACCUUGGAGCAACGGg | 2979 | ABE |
| K9 | 372 | CTTGGA | | UUUUAGagcuagaaauagcaaGUUsaAa | | |
| | | GCAACG | | AuAaggcuaGUccGUUsAucAAcuugaa | | |
| | | G | | aaagugGcaccgagucggugcuususuNNN- | | |
| | | | | 3′ | | |
| mPCS | GA01 | CCCATAC | 69 | 5′cscscsAUACCUUGGAGCAACGGg | 2980 | ABE |
| K9 | 373 | CTTGGA | | UUUUAGagcuaGaaauagcaaGUUsaAa | | |
| | | GCAACG | | AuAaggcuaGUccGUUsAucAAcuuGa | | |
| | | G | | aaaagugGcaccgagucggugcuususuNNN | | |
| | | | | -3′ | | |
| mAN | GA01 | GAGATA | 241 | 5′gsasgsAUACCUGAGUAACUUUC | 1860 | ABE |
| GPTL | 374 | CCTGAGT | | gUUUUAGagcuaGaaauagcaaGUUsaA | | |
| 3 | | AACTTTC | | aAuAaggCUaGUCcGUUsAucAAcuu | | |
| | | | | GaaaaaguGgcaccgAgUCggugcuususu | | |
| | | | | NNN-3′ | | |
| mAN | GA01 | GAGATA | 241 | 5′gsasgsAUACCUGAGUAACUUUC | 2981 | ABE |
| GPTL | 375 | CCTGAGT | | gUUUUAGagcuagaaauagcaaGUUsaA | | |
| 3 | | AACTTTC | | aAuAaggcuaGUccGUUsAucAAcuuga | | |
| | | | | aaaagugGcaccgagucggugcuususuNNN | | |
| | | | | -3′ | | |
| mAN | GA01 | GAGATA | 241 | 5′gsasgsAUACCUGAGUAACUUUC | 2982 | ABE |
| GPTL | 376 | CCTGAGT | | gUUUUAGagcuaGaaauagcaaGUUsaA | | |
| 3 | | AACTTTC | | aAuAaggcuaGUccGUUsAucAAcuuG | | |
| | | | | aaaaagugGcaccgagucggugcuususuNN | | |
| | | | | N-3′ | | |
| mcPC | GA01 | CAGGTTC | 81 | 5′csasgsGUUCCAUGGGAUGCUCU | 1861 | SpCas |
| SK9 | 377 | CATGGG | | gUUUUAGagcuaGaaauagcaaGUUsaA | | 9 |
| | | ATGCTCT | | aAuAaggcuaGUccGUUsAucAAcuuG | | |
| | | | | aaaaagugGcaccgagucggugcuususuNN | | |
| | | | | N-3′ | | |
| mcPC | GA01 | CAGGTTC | 81 | 5′csasgsGUUCCAUGGGAUGCUCU | 2983 | SpCas |
| SK9 | 378 | CATGGG | | gUUUUAGagcuagaaauagcaaGUUsaA | | 9 |
| | | ATGCTCT | | aAuAaggCUaGUCcGUUsAucAAcuu | | |
| | | | | GaaaaaguGgcaccgAgUCggugcuususu | | |
| | | | | NNN-3′ | | |
| mcPC | GA01 | CAGGTTC | 81 | 5′csasgsGUUCCAUGGGAUGCUCU | 2984 | SpCas |
| SK9 | 379 | CATGGG | | gUUUUAGagcuagaaauagcaaGUUsaA | | 9 |
| | | ATGCTCT | | aAuAaggcuaGUccGUUsAucAAcuuG | | |
| | | | | NN-3′ | | |
| mcPC | GA01 | CAGGTTC | 81 | 5′csasgsGUUCCAUGGGAUGCUCU | 2985 | SpCas |
| SK9 | 380 | CATGGG | | gUUUUAGagcuagaaauagcaaGUUsaA | | 9 |
| | | ATGCTCT | | aAuAaggCUaGUCcGUUsAucAAcuu | | |
| | | | | NN-3′ | | |
| mcPC | GA01 | CAGGTTC | 81 | 5′csasgsGUUCCAUGGGAUGCUCU | 2810 | SpCas |
| SK9 | 381 | CATGGG | | gUUUUAGagcuagaaauagcaaGUUsaA | | 9 |
| | | ATGCTCT | | aAuAaggCUaGUCcGUUsAucAAcuu | | |
| | | | | gaaaaaguGgcaccgAgUcggugcusususu | | |
| | | | | NNN-3′ | | |
| mcPC | GA01 | CAGGTTC | 81 | 5′csasgsGUUCCAUGGGAUGCUCU | 2984 | SpCas |
| SK9 | 382 | CATGGG | | gUUUUAGagcuagaaauagcaaGUUsaA | | 9 |
| | | ATGCTCT | | aAuAaggcuaGUccGUUsAucAAcuuG | | |
| | | | | aaaaaguGgcaccgAgUCggugcuususuN | | |
| | | | | NN-3′ | | |
| mcPC | GA01 | CAGGTTC | 81 | 5′csasgsGUUCCAUGGGAUGCUCU | 2986 | SpCas |
| SK9 | 383 | CATGGG | | gUUUUAGagcuaGaaauagcaaGUUsaA | | 9 |
| | | ATGCTCT | | aAuAaggCUaGUCcGUUsAucAAcuu | | |
| | | | | gaaaaaguGgcaccgAgUCggugcuususuN | | |
| | | | | NN-3′ | | |
| mcPC | GA01 | CAGGTTC | 81 | 5′csasgsGUUCCAUGGGAUGCUCU | 2987 | SpCas |
| SK9 | 384 | CATGGG | | gUUUUAGagcuaGaaauagcaaGUUsaA | | 9 |
| | | ATGCTCT | | aAuAaggCUaGUCcGUUsAucAAcuu | | |
| | | | | gaaaaaguGgcaccgAgUcggugcuususuN | | |
| | | | | NN-3′ | | |
| mcPC | GA01 | CAGGTTC | 81 | 5′csasgsGUUCCAUGGGAUGCUCU | 2988 | SpCas |
| SK9 | 385 | CATGGG | | gUUUUAGagcuaGaaauagcaaGUUsaA | | 9 |
| | | ATGCTCT | | aAuAaggcuaGUccGUUsAucAAcuuG | | |
| | | | | aaaaaguGgcaccgAgUCggugcuususuN | | |
| | | | | NN-3′ | | |
| mPCS | GA01 | CCCATAC | 69 | 5′cscscsAUACCUUGGAGCAACGGg | 1862 | ABE |
| K9 | 386 | CTTGGA | | UUUUsAGagcuaGaaauagcaaGUUsaA | | |
| | | GCAACG | | aAuAaggCUaGUCcGUUAucAAcuuG | | |
| | | G | | aaaaaguGgcaccgAgUCggugcuususuN | | |
| | | | | NN-3′ | | |
| mPCS | GA01 | CCCATAC | 69 | 5′cscscsAUACCUUGGAGCAACGGg | 2989 | ABE |
| K9 | 387 | CTTGGA | | UUUUsAGagcuagaaauagcaaGUUsaA | | |
| | | GCAACG | | aAuAaggcuaGUccGUUAucAAcuugaa | | |
| | | G | | aaagugGcaccgagucggugcuususuNNN- | | |
| | | | | 3′ | | |
| mPCS | GA01 | CCCATAC | 69 | 5′cscscsAUACCUUGGAGCAACGGg | 2990 | ABE |
| K9 | 388 | CTTGGA | | UUUUsAGagcuaGaaauagcaaGUUsaA | | |
| | | GCAACG | | aAuAaggcuaGUccGUUAucAAcuuGa | | |
| | | G | | aaaagugGcaccgagucggugcuususuNNN | | |
| | | | | -3′ | | |
| mAN | GA01 | GAGATA | 241 | 5′gsasgsAUACCUGAGUAACUUUC | 1863 | ABE |
| GPTL | 389 | CCTGAGT | | gUUUUsAGagcuaGaaauagcaaGUUsa | | |
| 3 | | AACTTTC | | AaAuAaggCUaGUCcGUUAucAAcuu | | |
| | | | | GaaaaaguGgcaccgAgUCggugcuususu | | |
| | | | | NNN-3′ | | |
| mAN | GA01 | GAGATA | 241 | 5′gsasgsAUACCUGAGUAACUUUC | 2991 | ABE |
| GPTL | 390 | CCTGAGT | | gUUUUsAGagcuagaaauagcaaGUUsa | | |
| 3 | | AACTTTC | | AaAuAaggcuaGUccGUUAucAAcuug | | |
| | | | | aaaaagugGcaccgagucggugcuususuNN | | |
| | | | | N-3′ | | |
| mAN | GA01 | GAGATA | 241 | 5′gsasgsAUACCUGAGUAACUUUC | 2992 | ABE |
| GPTL | 391 | CCTGAGT | | gUUUUsAGagcuaGaaauagcaaGUUsa | | |
| 3 | | AACTTTC | | AaAuAaggcuaGUccGUUAucAAcuuG | | |
| | | | | aaaaagugGcaccgagucggugcuususuNN | | |
| | | | | N-3′ | | |
| mcPC | GA01 | CAGGTTC | 81 | 5′csasgsGUUCCAUGGGAUGCUCU | 1864 | SpCas |
| SK9 | 392 | CATGGG | | gUUUUsAGagcuaGaaauagcaaGUUsa | | 9 |
| | | ATGCTCT | | AaAuAaggcuaGUccGUUAucAAcuuG | | |
| | | | | aaaaagugGcaccgagucggugcuususuNN | | |
| | | | | N-3′ | | |
| mcPC | GA01 | CAGGTTC | 81 | 5′csasgsGUUCCAUGGGAUGCUCU | 2993 | SpCas |
| SK9 | 393 | CATGGG | | gUUUUsAGagcuagaaauagcaaGUUsa | | 9 |
| | | ATGCTCT | | AaAuAaggCUaGUCcGUUAucAAcuu | | |
| | | | | GaaaaaguGgcaccgAgUCggugcuususu | | |
| | | | | NNN-3′ | | |
| mcPC | GA01 | CAGGTTC | 81 | 5′csasgsGUUCCAUGGGAUGCUCU | 2994 | SpCas |
| SK9 | 394 | CATGGG | | gUUUUsAGagcuagaaauagcaaGUUsa | | 9 |
| | | ATGCTCT | | AaAuAaggcuaGUccGUUAucAAcuuG | | |
| | | | | aaaaaguGgcaccgAgUCggugcuususuN | | |
| | | | | NN-3′ | | |
| mcPC | GA01 | CAGGTTC | 81 | 5′csasgsGUUCCAUGGGAUGCUCU | 2995 | SpCas |
| SK9 | 395 | CATGGG | | gUUUUsAGagcuagaaauagcaaGUUsa | | 9 |
| | | ATGCTCT | | AaAuAaggCUaGUCcGUUAucAAcuu | | |
| | | | | gaaaaaguGgcaccgAgUCggugcuususuN | | |
| | | | | NN-3′ | | |
| mcPC | GA01 | CAGGTTC | 81 | 5′csasgsGUUCCAUGGGAUGCUCU | 2996 | SpCas |
| SK9 | 396 | CATGGG | | gUUUUsAGagcuagaaauagcaaGUUsa | | 9 |
| | | ATGCTCT | | AaAuAaggCUaGUCcGUUAucAAcuu | | |
| | | | | gaaaaaguGgcaccgAgUcggugcuususuN | | |
| | | | | NN-3′ | | |
| mcPC | GA01 | CAGGTTC | 81 | 5′csasgsGUUCCAUGGGAUGCUCU | 2819 | SpCas |
| SK9 | 397 | CATGGG | | gUUUUsAGagcuagaaauagcaaGUUsa | | 9 |
| | | ATGCTCT | | AaAuAaggcuaGUccGUUAucAAcuuG | | |
| | | | | aaaaaguGgcaccgAgUCggugcusususuN | | |
| | | | | NN-3′ | | |
| mcPC | GA01 | CAGGTTC | 81 | 5′csasgsGUUCCAUGGGAUGCUCU | 2997 | SpCas |
| SK9 | 398 | CATGGG | | gUUUUsAGagcuaGaaauagcaaGUUsa | | 9 |
| | | ATGCTCT | | AaAuAaggCUaGUCcGUUAucAAcuu | | |
| | | | | gaaaaaguGgcaccgAgUCggugcuususuN | | |
| | | | | NN-3′ | | |
| mcPC | GA01 | CAGGTTC | 81 | 5′csasgsGUUCCAUGGGAUGCUCU | 2998 | SpCas |
| SK9 | 399 | CATGGG | | gUUUUsAGagcuaGaaauagcaaGUUsa | | 9 |
| | | ATGCTCT | | AaAuAaggCUaGUCcGUUAucAAcuu | | |
| | | | | gaaaaaguGgcaccgAgUcggugcuususuN | | |
| | | | | NN-3′ | | |
| mcPC | GA01 | CAGGTTC | 81 | 5′csasgsGUUCCAUGGGAUGCUCU | 2999 | SpCas |
| SK9 | 400 | CATGGG | | gUUUUsAGagcuaGaaauagcaaGUUsa | | 9 |
| | | ATGCTCT | | AaAuAaggcuaGUccGUUAucAAcuuG | | |
| | | | | aaaaaguGgcaccgAgUCggugcuususuN | | |
| | | | | NN-3′ | | |
| mPCS | GA01 | CCCATAC | 69 | 5′cscscsAUACCUUGGAGCAACGGg | 1865 | ABE |
| K9 | 401 | CTTGGA | | UUUUsAGagcuaGaaauagcaaGUUaAa | | |
| | | GCAACG | | AuAaggCUaGUCcGUUsAucAAcuuG | | |
| | | G | | aaaaaguGgcaccgAgUCggugcuususuN | | |
| | | | | NN-3′ | | |
| mPCS | GA01 | CCCATAC | 69 | 5′cscscsAUACCUUGGAGCAACGGg | 3000 | ABE |
| K9 | 402 | CTTGGA | | UUUUsAGagcuagaaauagcaaGUUaAa | | |
| | | GCAACG | | AuAaggcuaGUccGUUsAucAAcuugaa | | |
| | | G | | aaagugGcaccgagucggugcuususuNNN- | | |
| | | | | 3′ | | |
| mPCS | GA01 | CCCATAC | 69 | 5′cscscsAUACCUUGGAGCAACGGg | 3001 | ABE |
| K9 | 403 | CTTGGA | | UUUUsAGagcuaGaaauagcaaGUUaAa | | |
| | | GCAACG | | AuAaggcuaGUccGUUsAucAAcuuGa | | |
| | | G | | aaaagugGcaccgagucggugcuususuNNN | | |
| | | | | -3′ | | |
| mAN | GA01 | GAGATA | 241 | 5′gsasgsAUACCUGAGUAACUUUC | 1866 | ABE |
| GPTL | 404 | CCTGAGT | | gUUUUsAGagcuaGaaauagcaaGUUaA | | |
| 3 | | AACTTTC | | aAuAaggCUaGUCcGUUsAucAAcuu | | |
| | | | | GaaaaaguGgcaccgAgUCggugcuususu | | |
| | | | | NNN-3′ | | |
| mAN | GA01 | GAGATA | 241 | 5′gsasgsAUACCUGAGUAACUUUC | 3002 | ABE |
| GPTL | 405 | CCTGAGT | | gUUUUsAGagcuagaaauagcaaGUUaA | | |
| 3 | | AACTTTC | | aAuAaggcuaGUccGUUsAucAAcuuga | | |
| | | | | aaaagugGcaccgagucggugcuususuNNN | | |
| | | | | -3′ | | |
| mAN | GA01 | GAGATA | 241 | 5′gsasgsAUACCUGAGUAACUUUC | 3003 | ABE |
| GPTL | 406 | CCTGAGT | | gUUUUsAGagcuaGaaauagcaaGUUaA | | |
| 3 | | AACTTTC | | aAuAaggcuaGUccGUUsAucAAcuuG | | |
| | | | | aaaaagugGcaccgagucggugcuususuNN | | |
| | | | | N-3′ | | |
| mcPC | GA01 | CAGGTTC | 81 | 5′csasgsGUUCCAUGGGAUGCUCU | 1867 | SpCas |
| SK9 | 407 | CATGGG | | gUUUUsAGagcuaGaaauagcaaGUUaA | | 9 |
| | | ATGCTCT | | aAuAaggcuaGUccGUUsAucAAcuuG | | |
| | | | | aaaaagugGcaccgagucggugcuususuNN | | |
| | | | | N-3′ | | |
| mcPC | GA01 | CAGGTTC | 81 | 5′csasgsGUUCCAUGGGAUGCUCU | 3004 | SpCas |
| SK9 | 408 | CATGGG | | gUUUUsAGagcuagaaauagcaaGUUaA | | 9 |
| | | ATGCTCT | | aAuAaggCUaGUCcGUUsAucAAcuu | | |
| | | | | GaaaaaguGgcaccgAgUCggugcuususu | | |
| | | | | NNN-3′ | | |
| mcPC | GA01 | CAGGTTC | 81 | 5′csasgsGUUCCAUGGGAUGCUCU | 3005 | SpCas |
| SK9 | 409 | CATGGG | | gUUUUsAGagcuagaaauagcaaGUUaA | | 9 |
| | | ATGCTCT | | aAuAaggcuaGUccGUUsAucAAcuuG | | |
| | | | | aaaaaguGgcaccgAgUCggugcuususuN | | |
| | | | | NN-3′ | | |
| mcPC | GA01 | CAGGTTC | 81 | 5′csasgsGUUCCAUGGGAUGCUCU | 3006 | SpCas |
| SK9 | 410 | CATGGG | | gUUUUsAGagcuagaaauagcaaGUUaA | | 9 |
| | | ATGCTCT | | aAuAaggCUaGUCcGUUsAucAAcuu | | |
| | | | | gaaaaaguGgcaccgAgUCggugcuususuN | | |
| | | | | NN-3′ | | |
| mcPC | GA01 | CAGGTTC | 81 | 5′csasgsGUUCCAUGGGAUGCUCU | 3007 | SpCas |
| SK9 | 411 | CATGGG | | gUUUUsAGagcuagaaauagcaaGUUaA | | 9 |
| | | ATGCTCT | | aAuAaggCUaGUCcGUUsAucAAcuu | | |
| | | | | gaaaaaguGgcaccgAgUcggugcuususuN | | |
| | | | | NN-3′ | | |
| mcPC | GA01 | CAGGTTC | 81 | 5′csasgsGUUCCAUGGGAUGCUCU | 3005 | SpCas |
| SK9 | 412 | CATGGG | | gUUUUsAGagcuagaaauagcaaGUUaA | | 9 |
| | | ATGCTCT | | aAuAaggcuaGUccGUUsAucAAcuuG | | |
| | | | | aaaaaguGgcaccgAgUCggugcuususuN | | |
| | | | | NN-3′ | | |
| mcPC | GA01 | CAGGTTC | 81 | 5′csasgsGUUCCAUGGGAUGCUCU | 3008 | SpCas |
| SK9 | 413 | CATGGG | | gUUUUsAGagcuaGaaauagcaaGUUaA | | 9 |
| | | ATGCTCT | | aAuAaggCUaGUCcGUUsAucAAcuu | | |
| | | | | gaaaaaguGgcaccgAgUCggugcuususuN | | |
| | | | | NN-3′ | | |
| mcPC | GA01 | CAGGTTC | 81 | 5′csasgsGUUCCAUGGGAUGCUCU | 3009 | SpCas |
| SK9 | 414 | CATGGG | | gUUUUsAGagcuaGaaauagcaaGUUaA | | 9 |
| | | ATGCTCT | | aAuAaggCUaGUCcGUUsAucAAcuu | | |
| | | | | gaaaaaguGgcaccgAgUcggugcuususuN | | |
| | | | | NN-3′ | | |
| mcPC | GA01 | CAGGTTC | 81 | 5′csasgsGUUCCAUGGGAUGCUCU | 3010 | SpCas |
| SK9 | 415 | CATGGG | | gUUUUsAGagcuaGaaauagcaaGUUaA | | 9 |
| | | ATGCTCT | | aAuAaggcuaGUccGUUsAucAAcuuG | | |
| | | | | aaaaaguGgcaccgAgUCggugcuususuN | | |
| | | | | NN-3′ | | |
| mPCS | GA01 | CCCATAC | 69 | 5′cscscsAUACCUUGGAGCAACGGg | 1868 | ABE |
| K9 | 416 | CTTGGA | | UUUUsAGagcuaGaaauagcaaGUUsaA | | |
| | | GCAACG | | aAuAaggCUaGUCcGUUsAucAAcuu | | |
| | | G | | GaaaaaguGgcaccgAgUCggugcuususu | | |
| | | | | NNN-3′ | | |
| mPCS | GA01 | CCCATAC | 69 | 5′cscscsAUACCUUGGAGCAACGGg | 3011 | ABE |
| K9 | 417 | CTTGGA | | UUUUsAGagcuagaaauagcaaGUUsaA | | |
| | | GCAACG | | aAuAaggcuaGUccGUUsAucAAcuuga | | |
| | | G | | aaaagugGcaccgagucggugcuususuNNN | | |
| | | | | -3′ | | |
| mPCS | GA01 | CCCATAC | 69 | 5′cscscsAUACCUUGGAGCAACGGg | 3012 | ABE |
| K9 | 418 | CTTGGA | | UUUUsAGagcuaGaaauagcaaGUUsaA | | |
| | | GCAACG | | aAuAaggcuaGUccGUUsAucAAcuuG | | |
| | | G | | aaaaagugGcaccgagucggugcuususuNN | | |
| | | | | N-3′ | | |
| mAN | GA01 | GAGATA | 241 | 5′gsasgsAUACCUGAGUAACUUUC | 1869 | ABE |
| GPTL | 419 | CCTGAGT | | gUUUUsAGagcuaGaaauagcaaGUUsa | | |
| 3 | | AACTTTC | | AaAuAaggCUaGUCcGUUsAucAAcu | | |
| | | | | uGaaaaaguGgcaccgAgUCggugcuususu | | |
| | | | | NNN-3′ | | |
| mAN | GA01 | GAGATA | 241 | 5′gsasgsAUACCUGAGUAACUUUC | 3013 | ABE |
| GPTL | 420 | CCTGAGT | | gUUUUsAGagcuagaaauagcaaGUUsa | | |
| 3 | | AACTTTC | | AaAuAaggcuaGUccGUUsAucAAcuu | | |
| | | | | N-3′ | | |
| mAN | GA01 | GAGATA | 241 | 5′gsasgsAUACCUGAGUAACUUUC | 3014 | ABE |
| GPTL | 421 | CCTGAGT | | gUUUUsAGagcuaGaaauagcaaGUUsa | | |
| 3 | | AACTTTC | | AaAuAaggcuaGUccGUUsAucAAcuu | | |
| | | | | NN-3′ | | |
| mcPC | GA01 | CAGGTTC | 81 | 5′csasgsGUUCCAUGGGAUGCUCU | 1870 | SpCas |
| SK9 | 422 | CATGGG | | gUUUUsAGagcuaGaaauagcaaGUUsa | | 9 |
| | | ATGCTCT | | AaAuAaggcuaGUccGUUsAucAAcuu | | |
| | | | | GaaaaagugGcaccgagucggugcuususuN | | |
| | | | | NN-3′ | | |
| mcPC | GA01 | CAGGTTC | 81 | 5′csasgsGUUCCAUGGGAUGCUCU | 3015 | SpCas |
| SK9 | 423 | CATGGG | | gUUUUsAGagcuagaaauagcaaGUUsa | | 9 |
| | | ATGCTCT | | AaAuAaggCUaGUCcGUUsAucAAcu | | |
| | | | | uGaaaaaguGgcaccgAgUCggugcuususu | | |
| | | | | NNN-3′ | | |
| mcPC | GA01 | CAGGTTC | 81 | 5′csasgsGUUCCAUGGGAUGCUCU | 3016 | SpCas |
| SK9 | 424 | CATGGG | | gUUUUsAGagcuagaaauagcaaGUUsa | | 9 |
| | | ATGCTCT | | AaAuAaggcuaGUccGUUsAucAAcuu | | |
| | | | | GaaaaaguGgcaccgAgUCggugcuususu | | |
| | | | | NNN-3′ | | |
| mcPC | GA01 | CAGGTTC | 81 | 5′csasgsGUUCCAUGGGAUGCUCU | 3017 | SpCas |
| SK9 | 425 | CATGGG | | gUUUUsAGagcuagaaauagcaaGUUsa | | 9 |
| | | ATGCTCT | | AaAuAaggCUaGUCcGUUsAucAAcu | | |
| | | | | ugaaaaaguGgcaccgAgUCggugcuususu | | |
| | | | | NNN-3′ | | |
| mcPC | GA01 | CAGGTTC | 81 | 5′csasgsGUUCCAUGGGAUGCUCU | 3018 | SpCas |
| SK9 | 426 | CATGGG | | gUUUUsAGagcuagaaauagcaaGUUsa | | 9 |
| | | ATGCTCT | | AaAuAaggCUaGUCcGUUsAucAAcu | | |
| | | | | ugaaaaaguGgcaccgAgUcggugcuususu | | |
| | | | | NNN-3′ | | |
| mcPC | GA01 | CAGGTTC | 81 | 5′csasgsGUUCCAUGGGAUGCUCU | 3016 | SpCas |
| SK9 | 427 | CATGGG | | gUUUUsAGagcuagaaauagcaaGUUsa | | 9 |
| | | ATGCTCT | | AaAuAaggcuaGUccGUUsAucAAcuu | | |
| | | | | GaaaaaguGgcaccgAgUCggugcuususu | | |
| | | | | NNN-3′ | | |
| mcPC | GA01 | CAGGTTC | 81 | 5′csasgsGUUCCAUGGGAUGCUCU | 3019 | SpCas |
| SK9 | 428 | CATGGG | | gUUUUsAGagcuaGaaauagcaaGUUsa | | 9 |
| | | ATGCTCT | | AaAuAaggCUaGUCcGUUsAucAAcu | | |
| | | | | ugaaaaaguGgcaccgAgUCggugcuususu | | |
| | | | | NNN-3′ | | |
| mcPC | GA01 | CAGGTTC | 81 | 5′csasgsGUUCCAUGGGAUGCUCU | 3020 | SpCas |
| SK9 | 429 | CATGGG | | gUUUUsAGagcuaGaaauagcaaGUUsa | | 9 |
| | | ATGCTCT | | AaAuAaggCUaGUCcGUUsAucAAcu | | |
| | | | | ugaaaaaguGgcaccgAgUcggugcuususu | | |
| | | | | NNN-3′ | | |
| mcPC | GA01 | CAGGTTC | 81 | 5′csasgsGUUCCAUGGGAUGCUCU | 3021 | SpCas |
| SK9 | 430 | CATGGG | | gUUUUsAGagcuaGaaauagcaaGUUsa | | 9 |
| | | ATGCTCT | | AaAuAaggcuaGUccGUUsAucAAcuu | | |
| | | | | GaaaaaguGgcaccgAgUCggugcuususu | | |
| | | | | NNN-3′ | | |
| mcPC | GA01 | CAGGTTC | 81 | 5′csasgGUUCCAUGGGAUGCUCUg | 1871 | SpCas |
| SK9 | 431 | CATGGG | | UUUUAGagcuaGaaauagcaaGUUaAa | | 9 |
| | | ATGCTCT | | AuAaggCUaGUCcGUUAucAAcuuGa | | |
| | | | | aaaaguGgcaccgAgUCggugcuususuNN | | |
| | | | | N-3 | | |
| mcPC | GA01 | CAGGTTC | 81 | 5′csasgGUUCCAUGGGAUGCUCUg | 1872 | SpCas |
| SK9 | 432 | CATGGG | | UUUUAGagcuagaaauagcaaGUUaAaA | | 9 |
| | | ATGCTCT | | uAaggcuaGUccGUUAucAAcuugaaaa | | |
| | | | | agugGcaccgagucggugcuususuNNN-3′ | | |
| mPCS | GA01 | CCCATAC | 69 | 5′cscscAUACCUUGGAGCAACGGg | 1873 | ABE |
| K9 | 433 | CTTGGA | | UUUUAGagcuaGaaauagcaaGUUaAa | | |
| | | GCAACG | | AuAaggCUaGUCcGUUAucAAcuuGa | | |
| | | G | | aaaaguGgcaccgAgUCggugcuususuNN | | |
| | | | | N-3′ | | |
| mPCS | GA01 | CCCATAC | 69 | 5′cscscAUACCUUGGAGCAACGGg | 3022 | ABE |
| K9 | 434 | CTTGGA | | UUUUAGagcuagaaauagcaaGUUaAaA | | |
| | | GCAACG | | uAaggcuaGUccGUUAucAAcuugaaaa | | |
| | | G | | agugGcaccgagucggugcuususuNNN-3′ | | |
| mPCS | GA01 | CCCATAC | 69 | 5′cscscAUACCUUGGAGCAACGGg | 3023 | ABE |
| K9 | 435 | CTTGGA | | UUUUAGagcuaGaaauagcaaGUUaAa | | |
| | | GCAACG | | AuAaggcuaGUccGUUAucAAcuuGaa | | |
| | | G | | aaagugGcaccgagucggugcuususuNNN- | | |
| | | | | 3′ | | |
| mAN | GA01 | GAGATA | 241 | 5′gsasgAUACCUGAGUAACUUUCg | 1874 | ABE |
| GPTL | 436 | CCTGAGT | | UUUUAGagcuaGaaauagcaaGUUaAa | | |
| 3 | | AACTTTC | | AuAaggCUaGUCcGUUAucAAcuuGa | | |
| | | | | aaaaguGgcaccgAgUCggugcuususuNN | | |
| | | | | N-3′ | | |
| mAN | GA01 | GAGATA | 241 | 5′gsasgAUACCUGAGUAACUUUCg | 3024 | ABE |
| GPTL | 437 | CCTGAGT | | UUUUAGagcuagaaauagcaaGUUaAaA | | |
| 3 | | AACTTTC | | uAaggcuaGUccGUUAucAAcuugaaaa | | |
| | | | | agugGcaccgagucggugcuususuNNN-3′ | | |
| mAN | GA01 | GAGATA | 241 | 5′gsasgAUACCUGAGUAACUUUCg | 3025 | ABE |
| GPTL | 438 | CCTGAGT | | UUUUAGagcuaGaaauagcaaGUUaAa | | |
| 3 | | AACTTTC | | AuAaggcuaGUccGUUAucAAcuuGaa | | |
| | | | | aaagugGcaccgagucggugcuususuNNN- | | |
| | | | | 3′ | | |
| mcPC | GA01 | CAGGTTC | 81 | 5′csasgGUUCCAUGGGAUGCUCUg | 3026 | SpCas |
| SK9 | 439 | CATGGG | | UUUUAGagcuaGaaauagcaaGUUaAa | | 9 |
| | | ATGCTCT | | AuAaggcuaGUccGUUAucAAcuuGaa | | |
| | | | | aaagugGcaccgagucggugcuususuNNN- | | |
| | | | | 3′ | | |
| mcPC | GA01 | CAGGTTC | 81 | 5′csasgGUUCCAUGGGAUGCUCUg | 3027 | SpCas |
| SK9 | 440 | CATGGG | | UUUUAGagcuagaaauagcaaGUUaAaA | | 9 |
| | | ATGCTCT | | uAaggCUaGUCcGUUAucAAcuuGaa | | |
| | | | | aaaguGgcaccgAgUCggugcuususuNN | | |
| | | | | N-3′ | | |
| mcPC | GA01 | CAGGTTC | 81 | 5′csasgGUUCCAUGGGAUGCUCUg | 3028 | SpCas |
| SK9 | 441 | CATGGG | | UUUUAGagcuagaaauagcaaGUUaAaA | | 9 |
| | | ATGCTCT | | uAaggcuaGUccGUUAucAAcuuGaaaa | | |
| | | | | aguGgcaccgAgUCggugcuususuNNN- | | |
| | | | | 3′ | | |
| mcPC | GA01 | CAGGTTC | 81 | 5′csasgGUUCCAUGGGAUGCUCUg | 3029 | SpCas |
| SK9 | 442 | CATGGG | | UUUUAGagcuagaaauagcaaGUUaAaA | | 9 |
| | | ATGCTCT | | uAaggCUaGUCcGUUAucAAcuugaaa | | |
| | | | | aaguGgcaccgAgUCggugcuususuNNN- | | |
| | | | | 3′ | | |
| mcPC | GA01 | CAGGTTC | 81 | 5′csasgGUUCCAUGGGAUGCUCUg | 3030 | SpCas |
| SK9 | 443 | CATGGG | | UUUUAGagcuagaaauagcaaGUUaAaA | | 9 |
| | | ATGCTCT | | uAaggCUaGUCcGUUAucAAcuugaaa | | |
| | | | | aaguGgcaccgAgUcggugcuususuNNN- | | |
| | | | | 3′ | | |
| mcPC | GA01 | CAGGTTC | 81 | 5′csasgGUUCCAUGGGAUGCUCUg | 3028 | SpCas |
| SK9 | 444 | CATGGG | | UUUUAGagcuagaaauagcaaGUUaAaA | | 9 |
| | | ATGCTCT | | uAaggcuaGUccGUUAucAAcuuGaaaa | | |
| | | | | aguGgcaccgAgUCggugcuususuNNN- | | |
| | | | | 3′ | | |
| mcPC | GA01 | CAGGTTC | 81 | 5′csasgGUUCCAUGGGAUGCUCUg | 3031 | SpCas |
| SK9 | 445 | CATGGG | | UUUUAGagcuaGaaauagcaaGUUaAa | | 9 |
| | | ATGCTCT | | AuAaggCUaGUCcGUUAucAAcuuga | | |
| | | | | aaaaguGgcaccgAgUCggugcuususuNN | | |
| | | | | N-3′ | | |
| mcPC | GA01 | CAGGTTC | 81 | 5′csasgGUUCCAUGGGAUGCUCUg | 3032 | SpCas |
| SK9 | 446 | CATGGG | | UUUUAGagcuaGaaauagcaaGUUaAa | | 9 |
| | | ATGCTCT | | AuAaggCUaGUCcGUUAucAAcuuga | | |
| | | | | aaaaguGgcaccgAgUcggugcuususuNN | | |
| | | | | N-3′ | | |
| mcPC | GA01 | CAGGTTC | 81 | 5′csasgGUUCCAUGGGAUGCUCUg | 3033 | SpCas |
| SK9 | 447 | CATGGG | | UUUUAGagcuaGaaauagcaaGUUaAa | | 9 |
| | | ATGCTCT | | AuAaggcuaGUccGUUAucAAcuuGaa | | |
| | | | | aaaguGgcaccgAgUCggugcuususuNN | | |
| | | | | N-3′ | | |
| mPCS | GA01 | CCCATAC | 69 | 5′cscscAUACCUUGGAGCAACGGg | 1875 | ABE |
| K9 | 448 | CTTGGA | | UUUUAGagcuaGaaauagcaaGUUaAa | | |
| | | GCAACG | | AuAaggCUaGUCcGUUsAucAAcuuG | | |
| | | G | | aaaaaguGgcaccgAgUCggugcuususuN | | |
| | | | | NN-3′ | | |
| mPCS | GA01 | CCCATAC | 69 | 5′cscscAUACCUUGGAGCAACGGg | 3034 | ABE |
| K9 | 449 | CTTGGA | | UUUUAGagcuagaaauagcaaGUUaAaA | | |
| | | GCAACG | | uAaggcuaGUccGUUsAucAAcuugaaaa | | |
| | | G | | agugGcaccgagucggugcuususuNNN-3′ | | |
| mPCS | GA01 | CCCATAC | 69 | 5′cscscAUACCUUGGAGCAACGGg | 3035 | ABE |
| K9 | 450 | CTTGGA | | UUUUAGagcuaGaaauagcaaGUUaAa | | |
| | | GCAACG | | AuAaggcuaGUccGUUsAucAAcuuGa | | |
| | | G | | aaaagugGcaccgagucggugcuususuNNN | | |
| | | | | -3′ | | |
| mAN | GA01 | GAGATA | 241 | 5′gsasgAUACCUGAGUAACUUUCg | 1876 | ABE |
| GPTL | 451 | CCTGAGT | | UUUUAGagcuaGaaauagcaaGUUaAa | | |
| 3 | | AACTTTC | | AuAaggCUaGUCcGUUsAucAAcuuG | | |
| | | | | aaaaaguGgcaccgAgUCggugcuususuN | | |
| | | | | NN-3′ | | |
| mAN | GA01 | GAGATA | 241 | 5′gsasgAUACCUGAGUAACUUUCg | 3036 | ABE |
| GPTL | 452 | CCTGAGT | | UUUUAGagcuagaaauagcaaGUUaAaA | | |
| 3 | | AACTTTC | | uAaggcuaGUccGUUsAucAAcuugaaaa | | |
| | | | | agugGcaccgagucggugcuususuNNN-3′ | | |
| mAN | GA01 | GAGATA | 241 | 5′gsasgAUACCUGAGUAACUUUCg | 3037 | ABE |
| GPTL | 453 | CCTGAGT | | UUUUAGagcuaGaaauagcaaGUUaAa | | |
| 3 | | AACTTTC | | AuAaggcuaGUccGUUsAucAAcuuGa | | |
| | | | | aaaagugGcaccgagucggugcuususuNNN | | |
| | | | | -3′ | | |
| mcPC | GA01 | CAGGTTC | 81 | 5′csasgGUUCCAUGGGAUGCUCUg | 1877 | SpCas |
| SK9 | 454 | CATGGG | | UUUUAGagcuaGaaauagcaaGUUaAa | | 9 |
| | | ATGCTCT | | AuAaggcuaGUccGUUsAucAAcuuGa | | |
| | | | | aaaagugGcaccgagucggugcuususuNNN | | |
| | | | | -3′ | | |
| mcPC | GA01 | CAGGTTC | 81 | 5′csasgGUUCCAUGGGAUGCUCUg | 3038 | SpCas |
| SK9 | 455 | CATGGG | | UUUUAGagcuagaaauagcaaGUUaAaA | | 9 |
| | | ATGCTCT | | uAaggCUaGUCcGUUsAucAAcuuGaa | | |
| | | | | aaaguGgcaccgAgUCggugcuususuNN | | |
| | | | | N-3′ | | |
| mcPC | GA01 | CAGGTTC | 81 | 5′csasgGUUCCAUGGGAUGCUCUg | 3039 | SpCas |
| SK9 | 456 | CATGGG | | UUUUAGagcuagaaauagcaaGUUaAaA | | 9 |
| | | ATGCTCT | | uAaggcuaGUccGUUsAucAAcuuGaaa | | |
| | | | | aaguGgcaccgAgUCggugcuususuNNN- | | |
| | | | | 3′ | | |
| mcPC | GA01 | CAGGTTC | 81 | 5′csasgGUUCCAUGGGAUGCUCUg | 3040 | SpCas |
| SK9 | 457 | CATGGG | | UUUUAGagcuagaaauagcaaGUUaAaA | | 9 |
| | | ATGCTCT | | uAaggCUaGUCcGUUsAucAAcuugaa | | |
| | | | | aaaguGgcaccgAgUCggugcuususuNN | | |
| | | | | N-3′ | | |
| mcPC | GA01 | CAGGTTC | 81 | 5′csasgGUUCCAUGGGAUGCUCUg | 3041 | SpCas |
| SK9 | 458 | CATGGG | | UUUUAGagcuagaaauagcaaGUUaAaA | | 9 |
| | | ATGCTCT | | uAaggCUaGUCcGUUsAucAAcuugaa | | |
| | | | | aaaguGgcaccgAgUcggugcuususuNNN | | |
| | | | | -3′ | | |
| mcPC | GA01 | CAGGTTC | 81 | 5′csasgGUUCCAUGGGAUGCUCUg | 3039 | SpCas |
| SK9 | 459 | CATGGG | | UUUUAGagcuagaaauagcaaGUUaAaA | | 9 |
| | | ATGCTCT | | uAaggcuaGUccGUUsAucAAcuuGaaa | | |
| | | | | aaguGgcaccgAgUCggugcuususuNNN- | | |
| | | | | 3′ | | |
| mcPC | GA01 | CAGGTTC | 81 | 5′csasgGUUCCAUGGGAUGCUCUg | 3042 | SpCas |
| SK9 | 460 | CATGGG | | UUUUAGagcuaGaaauagcaaGUUaAa | | 9 |
| | | ATGCTCT | | AuAaggCUaGUCcGUUsAucAAcuug | | |
| | | | | aaaaaguGgcaccgAgUCggugcuususuN | | |
| | | | | NN-3′ | | |
| mcPC | GA01 | CAGGTTC | 81 | 5′csasgGUUCCAUGGGAUGCUCUg | 3043 | SpCas |
| SK9 | 461 | CATGGG | | UUUUAGagcuaGaaauagcaaGUUaAa | | 9 |
| | | ATGCTCT | | AuAaggCUaGUCcGUUsAucAAcuug | | |
| | | | | aaaaaguGgcaccgAgUcggugcuususuNN | | |
| | | | | N-3′ | | |
| mcPC | GA01 | CAGGTTC | 81 | 5′csasgGUUCCAUGGGAUGCUCUg | 3044 | SpCas |
| SK9 | 462 | CATGGG | | UUUUAGagcuaGaaauagcaaGUUaAa | | 9 |
| | | ATGCTCT | | AuAaggcuaGUccGUUsAucAAcuuGa | | |
| | | | | aaaaguGgcaccgAgUCggugcuususuNN | | |
| | | | | N-3′ | | |
| mPCS | GA01 | CCCATAC | 69 | 5′cscscAUACCUUGGAGCAACGGg | 1878 | ABE |
| K9 | 463 | CTTGGA | | UUUUAGagcuaGaaauagcaaGUUsaAa | | |
| | | GCAACG | | AuAaggCUaGUCcGUUAucAAcuuGa | | |
| | | G | | aaaaguGgcaccgAgUCggugcuususuNN | | |
| | | | | N-3′ | | |
| mPCS | GA01 | CCCATAC | 69 | 5′cscscAUACCUUGGAGCAACGGg | 3045 | ABE |
| K9 | 464 | CTTGGA | | UUUUAGagcuagaaauagcaaGUUsaAa | | |
| | | GCAACG | | AuAaggcuaGUccGUUAucAAcuugaaa | | |
| | | G | | aagugGcaccgagucggugcuususuNNN-3′ | | |
| mPCS | GA01 | CCCATAC | 69 | 5′cscscAUACCUUGGAGCAACGGg | 3046 | ABE |
| K9 | 465 | CTTGGA | | UUUUAGagcuaGaaauagcaaGUUsaAa | | |
| | | GCAACG | | AuAaggcuaGUccGUUAucAAcuuGaa | | |
| | | G | | aaagugGcaccgagucggugcuususuNNN- | | |
| | | | | 3′ | | |
| mAN | GA01 | GAGATA | 241 | 5′gsasgAUACCUGAGUAACUUUCg | 1879 | ABE |
| GPTL | 466 | CCTGAGT | | UUUUAGagcuaGaaauagcaaGUUsaAa | | |
| 3 | | AACTTTC | | AuAaggCUaGUCcGUUAucAAcuuGa | | |
| | | | | aaaaguGgcaccgAgUCggugcuususuNN | | |
| | | | | N-3′ | | |
| mAN | GA01 | GAGATA | 241 | 5′gsasgAUACCUGAGUAACUUUCg | 3047 | ABE |
| GPTL | 467 | CCTGAGT | | UUUUAGagcuagaaauagcaaGUUsaAa | | |
| 3 | | AACTTTC | | AuAaggcuaGUccGUUAucAAcuugaaa | | |
| | | | | aagugGcaccgagucggugcuususuNNN-3′ | | |
| mAN | GA01 | GAGATA | 241 | 5′gsasgAUACCUGAGUAACUUUCg | 3048 | ABE |
| GPTL | 468 | CCTGAGT | | UUUUAGagcuaGaaauagcaaGUUsaAa | | |
| 3 | | AACTTTC | | AuAaggcuaGUccGUUAucAAcuuGaa | | |
| | | | | aaagugGcaccgagucggugcuususuNNN- | | |
| | | | | 3′ | | |
| mcPC | GA01 | CAGGTTC | 81 | 5′csasgGUUCCAUGGGAUGCUCUg | 1880 | SpCas |
| SK9 | 469 | CATGGG | | UUUUAGagcuaGaaauagcaaGUUsaAa | | 9 |
| | | ATGCTCT | | AuAaggcuaGUccGUUAucAAcuuGaa | | |
| | | | | aaagugGcaccgagucggugcuususuNNN- | | |
| | | | | 3′ | | |
| mcPC | GA01 | CAGGTTC | 81 | 5′csasgGUUCCAUGGGAUGCUCUg | 3049 | SpCas |
| SK9 | 470 | CATGGG | | UUUUAGagcuagaaauagcaaGUUsaAa | | 9 |
| | | ATGCTCT | | AuAaggCUaGUCcGUUAucAAcuuGa | | |
| | | | | aaaaguGgcaccgAgUCggugcuususuNN | | |
| | | | | N-3′ | | |
| mcPC | GA01 | CAGGTTC | 81 | 5′csasgGUUCCAUGGGAUGCUCUg | 3050 | SpCas |
| SK9 | 471 | CATGGG | | UUUUAGagcuagaaauagcaaGUUsaAa | | 9 |
| | | ATGCTCT | | AuAaggcuaGUccGUUAucAAcuuGaa | | |
| | | | | aaaguGgcaccgAgUCggugcuususuNN | | |
| | | | | N-3′ | | |
| mcPC | GA01 | CAGGTTC | 81 | 5′csasgGUUCCAUGGGAUGCUCUg | 2877 | SpCas |
| SK9 | 472 | CATGGG | | UUUUAGagcuagaaauagcaaGUUsaAa | | 9 |
| | | ATGCTCT | | AuAaggCUaGUCcGUUAucAAcuuga | | |
| | | | | aaaaguGgcaccgAgUCggugcusususuN | | |
| | | | | NN-3′ | | |
| mcPC | GA01 | CAGGTTC | 81 | 5′csasgGUUCCAUGGGAUGCUCUg | 3051 | SpCas |
| SK9 | 473 | CATGGG | | UUUUAGagcuagaaauagcaaGUUsaAa | | 9 |
| | | ATGCTCT | | AuAaggCUaGUCcGUUAucAAcuuga | | |
| | | | | aaaaguGgcaccgAgUcggugcuususuNN | | |
| | | | | N-3′ | | |
| mcPC | GA01 | CAGGTTC | 81 | 5′csasgGUUCCAUGGGAUGCUCUg | 3050 | SpCas |
| SK9 | 474 | CATGGG | | UUUUAGagcuagaaauagcaaGUUsaAa | | 9 |
| | | ATGCTCT | | AuAaggcuaGUccGUUAucAAcuuGaa | | |
| | | | | aaaguGgcaccgAgUCggugcuususuNN | | |
| | | | | N-3′ | | |
| mcPC | GA01 | CAGGTTC | 81 | 5′csasgGUUCCAUGGGAUGCUCUg | 3052 | SpCas |
| SK9 | 475 | CATGGG | | UUUUAGagcuaGaaauagcaaGUUsaAa | | 9 |
| | | ATGCTCT | | AuAaggCUaGUCcGUUAucAAcuuga | | |
| | | | | aaaaguGgcaccgAgUCggugcuususuNN | | |
| | | | | N-3′ | | |
| mcPC | GA01 | CAGGTTC | 81 | 5′csasgGUUCCAUGGGAUGCUCUg | 3053 | SpCas |
| SK9 | 476 | CATGGG | | UUUUAGagcuaGaaauagcaaGUUsaAa | | 9 |
| | | ATGCTCT | | AuAaggCUaGUCcGUUAucAAcuuga | | |
| | | | | aaaaguGgcaccgAgUcggugcuususuNN | | |
| | | | | N-3′ | | |
| mcPC | GA01 | CAGGTTC | 81 | 5′csasgGUUCCAUGGGAUGCUCUg | 3054 | SpCas |
| SK9 | 477 | CATGGG | | UUUUAGagcuaGaaauagcaaGUUsaAa | | 9 |
| | | ATGCTCT | | AuAaggcuaGUccGUUAucAAcuuGaa | | |
| | | | | aaaguGgcaccgAgUCggugcuususuNN | | |
| | | | | N-3′ | | |
| mPCS | GA01 | CCCATAC | 69 | 5′cscscAUACCUUGGAGCAACGGg | 1881 | ABE |
| K9 | 478 | CTTGGA | | UUUUsAGagcuaGaaauagcaaGUUaAa | | |
| | | GCAACG | | AuAaggCUaGUCcGUUAucAAcuuGa | | |
| | | G | | aaaaguGgcaccgAgUCggugcuususuNN | | |
| | | | | N-3′ | | |
| mPCS | GA01 | CCCATAC | 69 | 5′cscscAUACCUUGGAGCAACGGg | 3055 | ABE |
| K9 | 479 | CTTGGA | | UUUUsAGagcuagaaauagcaaGUUaAa | | |
| | | GCAACG | | AuAaggcuaGUccGUUAucAAcuugaaa | | |
| | | G | | aagugGcaccgagucggugcuususuNNN-3′ | | |
| mPCS | GA01 | CCCATAC | 69 | 5′cscscAUACCUUGGAGCAACGGg | 3056 | ABE |
| K9 | 480 | CTTGGA | | UUUUsAGagcuaGaaauagcaaGUUaAa | | |
| | | GCAACG | | AuAaggcuaGUccGUUAucAAcuuGaa | | |
| | | G | | aaagugGcaccgagucggugcuususuNNN- | | |
| | | | | 3′ | | |
| mAN | GA01 | GAGATA | 241 | 5′gsasgAUACCUGAGUAACUUUCg | 1882 | ABE |
| GPTL | 481 | CCTGAGT | | UUUUsAGagcuaGaaauagcaaGUUaAa | | |
| 3 | | AACTTTC | | AuAaggCUaGUCcGUUAucAAcuuGa | | |
| | | | | aaaaguGgcaccgAgUCggugcuususuNN | | |
| | | | | N-3′ | | |
| mAN | GA01 | GAGATA | 241 | 5′gsasgAUACCUGAGUAACUUUCg | 3057 | ABE |
| GPTL | 482 | CCTGAGT | | UUUUsAGagcuagaaauagcaaGUUaAa | | |
| 3 | | AACTTTC | | AuAaggcuaGUccGUUAucAAcuugaaa | | |
| | | | | aagugGcaccgagucggugcuususuNNN-3′ | | |
| mAN | GA01 | GAGATA | 241 | 5′gsasgAUACCUGAGUAACUUUCg | 3058 | ABE |
| GPTL | 483 | CCTGAGT | | UUUUsAGagcuaGaaauagcaaGUUaAa | | |
| 3 | | AACTTTC | | AuAaggcuaGUccGUUAucAAcuuGaa | | |
| | | | | aaagugGcaccgagucggugcuususuNNN- | | |
| | | | | 3′ | | |
| mcPC | GA01 | CAGGTTC | 81 | 5′csasgGUUCCAUGGGAUGCUCUg | 1883 | SpCas |
| SK9 | 484 | CATGGG | | UUUUsAGagcuaGaaauagcaaGUUaAa | | 9 |
| | | ATGCTCT | | AuAaggcuaGUccGUUAucAAcuuGaa | | |
| | | | | aaagugGcaccgagucggugcuususuNNN- | | |
| | | | | 3′ | | |
| mcPC | GA01 | CAGGTTC | 81 | 5′csasgGUUCCAUGGGAUGCUCUg | 3059 | SpCas |
| SK9 | 485 | CATGGG | | UUUUsAGagcuagaaauagcaaGUUaAa | | 9 |
| | | ATGCTCT | | AuAaggCUaGUCcGUUAucAAcuuGa | | |
| | | | | aaaaguGgcaccgAgUCggugcuususuNN | | |
| | | | | N-3′ | | |
| mcPC | GA01 | CAGGTTC | 81 | 5′csasgGUUCCAUGGGAUGCUCUg | 3060 | SpCas |
| SK9 | 486 | CATGGG | | UUUUsAGagcuagaaauagcaaGUUaAa | | 9 |
| | | ATGCTCT | | AuAaggcuaGUccGUUAucAAcuuGaa | | |
| | | | | aaaguGgcaccgAgUCggugcuususuNN | | |
| | | | | N-3′ | | |
| mcPC | GA01 | CAGGTTC | 81 | 5′csasgGUUCCAUGGGAUGCUCUg | 3061 | SpCas |
| SK9 | 487 | CATGGG | | UUUUsAGagcuagaaauagcaaGUUaAa | | 9 |
| | | ATGCTCT | | AuAaggCUaGUCcGUUAucAAcuuga | | |
| | | | | aaaaguGgcaccgAgUCggugcuususuNN | | |
| | | | | N-3′ | | |
| mcPC | GA01 | CAGGTTC | 81 | 5′csasgGUUCCAUGGGAUGCUCUg | 3062 | SpCas |
| SK9 | 488 | CATGGG | | UUUUsAGagcuagaaauagcaaGUUaAa | | 9 |
| | | ATGCTCT | | AuAaggCUaGUCcGUUAucAAcuuga | | |
| | | | | aaaaguGgcaccgAgUcggugcuususuNN | | |
| | | | | N-3′ | | |
| mcPC | GA01 | CAGGTTC | 81 | 5′csasgGUUCCAUGGGAUGCUCUg | 3060 | SpCas |
| SK9 | 489 | CATGGG | | UUUUsAGagcuagaaauagcaaGUUaAa | | 9 |
| | | ATGCTCT | | AuAaggcuaGUccGUUAucAAcuuGaa | | |
| | | | | aaaguGgcaccgAgUCggugcuususuNN | | |
| | | | | N-3′ | | |
| mcPC | GA01 | CAGGTTC | 81 | 5′csasgGUUCCAUGGGAUGCUCUg | 2890 | SpCas |
| SK9 | 490 | CATGGG | | UUUUsAGagcuaGaaauagcaaGUUaAa | | 9 |
| | | ATGCTCT | | AuAaggCUaGUCcGUUAucAAcuuga | | |
| | | | | aaaaguGgcaccgAgUCggugcusususuN | | |
| | | | | NN-3′ | | |
| mcPC | GA01 | CAGGTTC | 81 | 5′csasgGUUCCAUGGGAUGCUCUg | 3063 | SpCas |
| SK9 | 491 | CATGGG | | UUUUsAGagcuaGaaauagcaaGUUaAa | | 9 |
| | | ATGCTCT | | AuAaggCUaGUCcGUUAucAAcuuga | | |
| | | | | aaaaguGgcaccgAgUcggugcuususuNN | | |
| | | | | N-3′ | | |
| mcPC | GA01 | CAGGTTC | 81 | 5′csasgGUUCCAUGGGAUGCUCUg | 3064 | SpCas |
| SK9 | 492 | CATGGG | | UUUUsAGagcuaGaaauagcaaGUUaAa | | 9 |
| | | ATGCTCT | | AuAaggcuaGUccGUUAucAAcuuGaa | | |
| | | | | aaaguGgcaccgAgUCggugcuususuNN | | |
| | | | | N-3′ | | |
| mPCS | GA01 | CCCATAC | 69 | 5′cscscAUACCUUGGAGCAACGGg | 1884 | ABE |
| K9 | 493 | CTTGGA | | UUUUAGagcuaGaaauagcaaGUUsaAa | | |
| | | GCAACG | | AuAaggCUaGUCcGUUsAucAAcuuG | | |
| | | G | | aaaaaguGgcaccgAgUCggugcuususuN | | |
| | | | | NN-3′ | | |
| mPCS | GA01 | CCCATAC | 69 | 5′cscscAUACCUUGGAGCAACGGg | 3065 | ABE |
| K9 | 494 | CTTGGA | | UUUUAGagcuagaaauagcaaGUUsaAa | | |
| | | GCAACG | | AuAaggcuaGUccGUUsAucAAcuugaa | | |
| | | G | | aaagugGcaccgagucggugcuususuNNN- | | |
| | | | | 3 | | |
| mPCS | GA01 | CCCATAC | 69 | 5′cscscAUACCUUGGAGCAACGGg | 3066 | ABE |
| K9 | 495 | CTTGGA | | UUUUAGagcuaGaaauagcaaGUUsaAa | | |
| | | GCAACG | | AuAaggcuaGUccGUUsAucAAcuuGa | | |
| | | G | | aaaagugGcaccgagucggugcuususuNNN | | |
| | | | | -3′ | | |
| mAN | GA01 | GAGATA | 241 | 5′gsasgAUACCUGAGUAACUUUCg | 1885 | ABE |
| GPTL | 496 | CCTGAGT | | UUUUAGagcuaGaaauagcaaGUUsaAa | | |
| 3 | | AACTTTC | | AuAaggCUaGUCcGUUsAucAAcuuG | | |
| | | | | NN-3′ | | |
| mAN | GA01 | GAGATA | 241 | 5′gsasgAUACCUGAGUAACUUUCg | 3067 | ABE |
| GPTL | 497 | CCTGAGT | | UUUUAGagcuagaaauagcaaGUUsaAa | | |
| 3 | | AACTTTC | | AuAaggcuaGUccGUUsAucAAcuugaa | | |
| | | | | aaagugGcaccgagucggugcuususuNNN- | | |
| | | | | 3′ | | |
| mAN | GA01 | GAGATA | 241 | 5′gsasgAUACCUGAGUAACUUUCg | 3068 | ABE |
| GPTL | 498 | CCTGAGT | | UUUUAGagcuaGaaauagcaaGUUsaAa | | |
| 3 | | AACTTTC | | AuAaggcuaGUccGUUsAucAAcuuGa | | |
| | | | | aaaagugGcaccgagucggugcuususuNNN | | |
| | | | | -3′ | | |
| mcPC | GA01 | CAGGTTC | 81 | 5′csasgGUUCCAUGGGAUGCUCUg | 1886 | SpCas |
| SK9 | 499 | CATGGG | | UUUUAGagcuaGaaauagcaaGUUsaAa | | 9 |
| | | ATGCTCT | | AuAaggcuaGUccGUUsAucAAcuuGa | | |
| | | | | aaaagugGcaccgagucggugcuususuNNN | | |
| | | | | -3′ | | |
| mcPC | GA01 | CAGGTTC | 81 | 5′csasgGUUCCAUGGGAUGCUCUg | 3069 | SpCas |
| SK9 | 500 | CATGGG | | UUUUAGagcuagaaauagcaaGUUsaAa | | 9 |
| | | ATGCTCT | | AuAaggCUaGUCcGUUsAucAAcuuG | | |
| | | | | NN-3′ | | |
| mcPC | GA01 | CAGGTTC | 81 | 5′csasgGUUCCAUGGGAUGCUCUg | 3070 | SpCas |
| SK9 | 501 | CATGGG | | UUUUAGagcuagaaauagcaaGUUsaAa | | 9 |
| | | ATGCTCT | | AuAaggcuaGUccGUUsAucAAcuuGa | | |
| | | | | aaaaguGgcaccgAgUCggugcuususuNN | | |
| | | | | N-3′ | | |
| mcPC | GA01 | CAGGTTC | 81 | 5′csasgGUUCCAUGGGAUGCUCUg | 3071 | SpCas |
| SK9 | 502 | CATGGG | | UUUUAGagcuagaaauagcaaGUUsaAa | | 9 |
| | | ATGCTCT | | AuAaggCUaGUCcGUUsAucAAcuug | | |
| | | | | aaaaaguGgcaccgAgUCggugcuususuN | | |
| | | | | NN-3′ | | |
| mcPC | GA01 | CAGGTTC | 81 | 5′csasgGUUCCAUGGGAUGCUCUg | 2900 | SpCas |
| SK9 | 503 | CATGGG | | UUUUAGagcuagaaauagcaaGUUsaAa | | 9 |
| | | ATGCTCT | | AuAaggCUaGUCcGUUsAucAAcuug | | |
| | | | | aaaaaguGgcaccgAgUcggugcusususuN | | |
| | | | | NN-3′ | | |
| mcPC | GA01 | CAGGTTC | 81 | 5′csasgGUUCCAUGGGAUGCUCUg | 3070 | SpCas |
| SK9 | 504 | CATGGG | | UUUUAGagcuagaaauagcaaGUUsaAa | | 9 |
| | | ATGCTCT | | AuAaggcuaGUccGUUsAucAAcuuGa | | |
| | | | | aaaaguGgcaccgAgUCggugcuususuNN | | |
| | | | | N-3′ | | |
| mcPC | GA01 | CAGGTTC | 81 | 5′csasgGUUCCAUGGGAUGCUCUg | 3072 | SpCas |
| SK9 | 505 | CATGGG | | UUUUAGagcuaGaaauagcaaGUUsaAa | | 9 |
| | | ATGCTCT | | AuAaggCUaGUCcGUUsAucAAcuug | | |
| | | | | aaaaaguGgcaccgAgUCggugcuususuN | | |
| | | | | NN-3′ | | |
| mcPC | GA01 | CAGGTTC | 81 | 5′csasgGUUCCAUGGGAUGCUCUg | 3073 | SpCas |
| SK9 | 506 | CATGGG | | UUUUAGagcuaGaaauagcaaGUUsaAa | | 9 |
| | | ATGCTCT | | AuAaggCUaGUCcGUUsAucAAcuug | | |
| | | | | aaaaaguGgcaccgAgUcggugcuususuNN | | |
| | | | | N-3′ | | |
| mcPC | GA01 | CAGGTTC | 81 | 5′csasgGUUCCAUGGGAUGCUCUg | 3074 | SpCas |
| SK9 | 507 | CATGGG | | UUUUAGagcuaGaaauagcaaGUUsaAa | | 9 |
| | | ATGCTCT | | AuAaggcuaGUccGUUsAucAAcuuGa | | |
| | | | | aaaaguGgcaccgAgUCggugcuususuNN | | |
| | | | | N-3′ | | |
| mPCS | GA01 | CCCATAC | 69 | 5′cscscAUACCUUGGAGCAACGGg | 1887 | ABE |
| K9 | 508 | CTTGGA | | UUUUsAGagcuaGaaauagcaaGUUsaA | | |
| | | GCAACG | | aAuAaggCUaGUCcGUUAucAAcuuG | | |
| | | G | | aaaaaguGgcaccgAgUCggugcuususuN | | |
| | | | | NN-3′ | | |
| mPCS | GA01 | CCCATAC | 69 | 5′cscscAUACCUUGGAGCAACGGg | 3075 | ABE |
| K9 | 509 | CTTGGA | | UUUUsAGagcuagaaauagcaaGUUsaA | | |
| | | GCAACG | | aAuAaggcuaGUccGUUAucAAcuugaa | | |
| | | G | | aaagugGcaccgagucggugcuususuNNN- | | |
| | | | | 3 | | |
| mPCS | GA01 | CCCATAC | 69 | 5′cscscAUACCUUGGAGCAACGGg | 3076 | ABE |
| K9 | 510 | CTTGGA | | UUUUsAGagcuaGaaauagcaaGUUsaA | | |
| | | GCAACG | | aAuAaggcuaGUccGUUAucAAcuuGa | | |
| | | G | | aaaagugGcaccgagucggugcuususuNNN | | |
| | | | | -3′ | | |
| mAN | GA01 | GAGATA | 241 | 5′gsasgAUACCUGAGUAACUUUCg | 1888 | ABE |
| GPTL | 511 | CCTGAGT | | UUUUsAGagcuaGaaauagcaaGUUsaA | | |
| 3 | | AACTTTC | | aAuAaggCUaGUCcGUUAucAAcuuG | | |
| | | | | aaaaaguGgcaccgAgUCggugcuususuN | | |
| | | | | NN-3′ | | |
| mAN | GA01 | GAGATA | 241 | 5′gsasgAUACCUGAGUAACUUUCg | 3077 | ABE |
| GPTL | 512 | CCTGAGT | | UUUUsAGagcuagaaauagcaaGUUsaA | | |
| 3 | | AACTTTC | | aAuAaggcuaGUccGUUAucAAcuugaa | | |
| | | | | aaagugGcaccgagucggugcuususuNNN- | | |
| | | | | 3′ | | |
| mAN | GA01 | GAGATA | 241 | 5′gsasgAUACCUGAGUAACUUUCg | 3078 | ABE |
| GPTL | 513 | CCTGAGT | | UUUUsAGagcuaGaaauagcaaGUUsaA | | |
| 3 | | AACTTTC | | aAuAaggcuaGUccGUUAucAAcuuGa | | |
| | | | | aaaagugGcaccgagucggugcuususuNNN | | |
| | | | | -3′ | | |
| mcPC | GA01 | CAGGTTC | 81 | 5′csasgGUUCCAUGGGAUGCUCUg | 1889 | SpCas |
| SK9 | 514 | CATGGG | | UUUUsAGagcuaGaaauagcaaGUUsaA | | 9 |
| | | ATGCTCT | | aAuAaggcuaGUccGUUAucAAcuuGa | | |
| | | | | aaaagugGcaccgagucggugcuususuNNN | | |
| | | | | -3′ | | |
| mcPC | GA01 | CAGGTTC | 81 | 5′csasgGUUCCAUGGGAUGCUCUg | 3079 | SpCas |
| SK9 | 515 | CATGGG | | UUUUsAGagcuagaaauagcaaGUUsaA | | 9 |
| | | ATGCTCT | | aAuAaggCUaGUCcGUUAucAAcuuG | | |
| | | | | aaaaaguGgcaccgAgUCggugcuususuN | | |
| | | | | NN-3′ | | |
| mcPC | GA01 | CAGGTTC | 81 | 5′csasgGUUCCAUGGGAUGCUCUg | 3080 | SpCas |
| SK9 | 516 | CATGGG | | UUUUsAGagcuagaaauagcaaGUUsaA | | 9 |
| | | ATGCTCT | | aAuAaggcuaGUccGUUAucAAcuuGa | | |
| | | | | aaaaguGgcaccgAgUCggugcuususuNN | | |
| | | | | N-3′ | | |
| mcPC | GA01 | CAGGTTC | 81 | 5′csasgGUUCCAUGGGAUGCUCUg | 3081 | SpCas |
| SK9 | 517 | CATGGG | | UUUUsAGagcuagaaauagcaaGUUsaA | | 9 |
| | | ATGCTCT | | aAuAaggCUaGUCcGUUAucAAcuug | | |
| | | | | aaaaaguGgcaccgAgUCggugcuususuN | | |
| | | | | NN-3′ | | |
| mcPC | GA01 | CAGGTTC | 81 | 5′csasgGUUCCAUGGGAUGCUCUg | 3082 | SpCas |
| SK9 | 518 | CATGGG | | UUUUsAGagcuagaaauagcaaGUUsaA | | 9 |
| | | ATGCTCT | | aAuAaggCUaGUCcGUUAucAAcuug | | |
| | | | | aaaaaguGgcaccgAgUcggugcuususuNN | | |
| | | | | N-3′ | | |
| mcPC | GA01 | CAGGTTC | 81 | 5′csasgGUUCCAUGGGAUGCUCUg | 2909 | SpCas |
| SK9 | 519 | CATGGG | | UUUUsAGagcuagaaauagcaaGUUsaA | | 9 |
| | | ATGCTCT | | aAuAaggcuaGUccGUUAucAAcuuGa | | |
| | | | | aaaaguGgcaccgAgUCggugcusususuN | | |
| | | | | NN-3′ | | |
| mcPC | GA01 | CAGGTTC | 81 | 5′csasgGUUCCAUGGGAUGCUCUg | 3083 | SpCas |
| SK9 | 520 | CATGGG | | UUUUsAGagcuaGaaauagcaaGUUsaA | | 9 |
| | | ATGCTCT | | aAuAaggCUaGUCcGUUAucAAcuug | | |
| | | | | NN-3′ | | |
| mcPC | GA01 | CAGGTTC | 81 | 5′csasgGUUCCAUGGGAUGCUCUg | 3084 | SpCas |
| SK9 | 521 | CATGGG | | UUUUsAGagcuaGaaauagcaaGUUsaA | | 9 |
| | | ATGCTCT | | aAuAaggCUaGUCcGUUAucAAcuug | | |
| | | | | aaaaaguGgcaccgAgUcggugcuususuNN | | |
| | | | | N-3′ | | |
| mcPC | GA01 | CAGGTTC | 81 | 5′csasgGUUCCAUGGGAUGCUCUg | 3085 | SpCas |
| SK9 | 522 | CATGGG | | UUUUsAGagcuaGaaauagcaaGUUsaA | | 9 |
| | | ATGCTCT | | aAuAaggcuaGUccGUUAucAAcuuGa | | |
| | | | | aaaaguGgcaccgAgUCggugcuususuNN | | |
| | | | | N-3′ | | |
| mPCS | GA01 | CCCATAC | 69 | 5′cscscAUACCUUGGAGCAACGGg | 1890 | ABE |
| K9 | 523 | CTTGGA | | UUUUsAGagcuaGaaauagcaaGUUaAa | | |
| | | GCAACG | | AuAaggCUaGUCcGUUsAucAAcuuG | | |
| | | G | | aaaaaguGgcaccgAgUCggugcuususuN | | |
| | | | | NN-3′ | | |
| mPCS | GA01 | CCCATAC | 69 | 5′cscscAUACCUUGGAGCAACGGg | 3086 | ABE |
| K9 | 524 | CTTGGA | | UUUUsAGagcuagaaauagcaaGUUaAa | | |
| | | GCAACG | | AuAaggcuaGUccGUUsAucAAcuugaa | | |
| | | G | | aaagugGcaccgagucggugcuususuNNN- | | |
| | | | | 3′ | | |
| mPCS | GA01 | CCCATAC | 69 | 5′cscscAUACCUUGGAGCAACGGg | 3087 | ABE |
| K9 | 525 | CTTGGA | | UUUUsAGagcuaGaaauagcaaGUUaAa | | |
| | | GCAACG | | AuAaggcuaGUccGUUsAucAAcuuGa | | |
| | | G | | aaaagugGcaccgagucggugcuususuNNN | | |
| | | | | -3′ | | |
| mAN | GA01 | GAGATA | 241 | 5′gsasgAUACCUGAGUAACUUUCg | 1891 | ABE |
| GPTL | 526 | CCTGAGT | | UUUUsAGagcuaGaaauagcaaGUUaAa | | |
| 3 | | AACTTTC | | AuAaggCUaGUCcGUUsAucAAcuuG | | |
| | | | | aaaaaguGgcaccgAgUCggugcuususuN | | |
| | | | | NN-3′ | | |
| mAN | GA01 | GAGATA | 241 | 5′gsasgAUACCUGAGUAACUUUCg | 3088 | ABE |
| GPTL | 527 | CCTGAGT | | UUUUsAGagcuagaaauagcaaGUUaAa | | |
| 3 | | AACTTTC | | AuAaggcuaGUccGUUsAucAAcuugaa | | |
| | | | | aaagugGcaccgagucggugcuususuNNN- | | |
| | | | | 3′ | | |
| mAN | GA01 | GAGATA | 241 | 5′gsasgAUACCUGAGUAACUUUCg | 3089 | ABE |
| GPTL | 528 | CCTGAGT | | UUUUsAGagcuaGaaauagcaaGUUaAa | | |
| 3 | | AACTTTC | | AuAaggcuaGUccGUUsAucAAcuuGa | | |
| | | | | aaaagugGcaccgagucggugcuususuNNN | | |
| | | | | -3′ | | |
| mcPC | GA01 | CAGGTTC | 81 | 5′csasgGUUCCAUGGGAUGCUCUg | 1892 | SpCas |
| SK9 | 529 | CATGGG | | UUUUsAGagcuaGaaauagcaaGUUaAa | | 9 |
| | | ATGCTCT | | AuAaggcuaGUccGUUsAucAAcuuGa | | |
| | | | | aaaagugGcaccgagucggugcuususuNNN | | |
| | | | | -3′ | | |
| mcPC | GA01 | CAGGTTC | 81 | 5′csasgGUUCCAUGGGAUGCUCUg | 3090 | SpCas |
| SK9 | 530 | CATGGG | | UUUUsAGagcuagaaauagcaaGUUaAa | | 9 |
| | | ATGCTCT | | AuAaggCUaGUCcGUUsAucAAcuuG | | |
| | | | | aaaaaguGgcaccgAgUCggugcuususuN | | |
| | | | | NN-3′ | | |
| mcPC | GA01 | CAGGTTC | 81 | 5′csasgGUUCCAUGGGAUGCUCUg | 3091 | SpCas |
| SK9 | 531 | CATGGG | | UUUUsAGagcuagaaauagcaaGUUaAa | | 9 |
| | | ATGCTCT | | AuAaggcuaGUccGUUsAucAAcuuGa | | |
| | | | | aaaaguGgcaccgAgUCggugcuususuNN | | |
| | | | | N-3′ | | |
| mcPC | GA01 | CAGGTTC | 81 | 5′csasgGUUCCAUGGGAUGCUCUg | 3092 | SpCas |
| SK9 | 532 | CATGGG | | UUUUsAGagcuagaaauagcaaGUUaAa | | 9 |
| | | ATGCTCT | | AuAaggCUaGUCcGUUsAucAAcuug | | |
| | | | | aaaaaguGgcaccgAgUCggugcuususuN | | |
| | | | | NN-3′ | | |
| mcPC | GA01 | CAGGTTC | 81 | 5′csasgGUUCCAUGGGAUGCUCUg | 3093 | SpCas |
| SK9 | 533 | CATGGG | | UUUUsAGagcuagaaauagcaaGUUaAa | | 9 |
| | | ATGCTCT | | AuAaggCUaGUCcGUUsAucAAcuug | | |
| | | | | aaaaaguGgcaccgAgUcggugcuususuNN | | |
| | | | | N-3′ | | |
| mcPC | GA01 | CAGGTTC | 81 | 5′csasgGUUCCAUGGGAUGCUCUg | 3091 | SpCas |
| SK9 | 534 | CATGGG | | UUUUsAGagcuagaaauagcaaGUUaAa | | 9 |
| | | ATGCTCT | | AuAaggcuaGUccGUUsAucAAcuuGa | | |
| | | | | aaaaguGgcaccgAgUCggugcuususuNN | | |
| | | | | N-3′ | | |
| mcPC | GA01 | CAGGTTC | 81 | 5′csasgGUUCCAUGGGAUGCUCUg | 3094 | SpCas |
| SK9 | 535 | CATGGG | | UUUUsAGagcuaGaaauagcaaGUUaAa | | 9 |
| | | ATGCTCT | | AuAaggCUaGUCcGUUsAucAAcuug | | |
| | | | | NN-3′ | | |
| mcPC | GA01 | CAGGTTC | 81 | 5′csasgGUUCCAUGGGAUGCUCUg | 3095 | SpCas |
| SK9 | 536 | CATGGG | | UUUUsAGagcuaGaaauagcaaGUUaAa | | 9 |
| | | ATGCTCT | | AuAaggCUaGUCcGUUsAucAAcuug | | |
| | | | | aaaaaguGgcaccgAgUcggugcuususuNN | | |
| | | | | N-3′ | | |
| mcPC | GA01 | CAGGTTC | 81 | 5′csasgGUUCCAUGGGAUGCUCUg | 3096 | SpCas |
| SK9 | 537 | CATGGG | | UUUUsAGagcuaGaaauagcaaGUUaAa | | 9 |
| | | ATGCTCT | | AuAaggcuaGUccGUUsAucAAcuuGa | | |
| | | | | aaaaguGgcaccgAgUCggugcuususuNN | | |
| | | | | N-3′ | | |
| mPCS | GA01 | CCCATAC | 69 | 5′cscscAUACCUUGGAGCAACGGg | 1893 | ABE |
| K9 | 538 | CTTGGA | | UUUUsAGagcuaGaaauagcaaGUUsaA | | |
| | | GCAACG | | aAuAaggCUaGUCcGUUsAucAAcuu | | |
| | | G | | GaaaaaguGgcaccgAgUCggugcuususu | | |
| | | | | NNN-3′ | | |
| mPCS | GA01 | CCCATAC | 69 | 5′cscscAUACCUUGGAGCAACGGg | 3097 | ABE |
| K9 | 539 | CTTGGA | | UUUUsAGagcuagaaauagcaaGUUsaA | | |
| | | GCAACG | | aAuAaggcuaGUccGUUsAucAAcuuga | | |
| | | G | | aaaagugGcaccgagucggugcuususuNNN | | |
| | | | | -3′ | | |
| mPCS | GA01 | CCCATAC | 69 | 5′cscscAUACCUUGGAGCAACGGg | 3098 | ABE |
| K9 | 540 | CTTGGA | | UUUUsAGagcuaGaaauagcaaGUUsaA | | |
| | | GCAACG | | aAuAaggcuaGUccGUUsAucAAcuuG | | |
| | | G | | aaaaagugGcaccgagucggugcuususuNN | | |
| | | | | N-3′ | | |
| mAN | GA01 | GAGATA | 241 | 5′gsasgAUACCUGAGUAACUUUCg | 1894 | ABE |
| GPTL | 541 | CCTGAGT | | UUUUsAGagcuaGaaauagcaaGUUsaA | | |
| 3 | | AACTTTC | | aAuAaggCUaGUCcGUUsAucAAcuu | | |
| | | | | GaaaaaguGgcaccgAgUCggugcuususu | | |
| | | | | NNN-3′ | | |
| mAN | GA01 | GAGATA | 241 | 5′gsasgAUACCUGAGUAACUUUCg | 3099 | ABE |
| GPTL | 542 | CCTGAGT | | UUUUsAGagcuagaaauagcaaGUUsaA | | |
| 3 | | AACTTTC | | aAuAaggcuaGUccGUUsAucAAcuuga | | |
| | | | | aaaagugGcaccgagucggugcuususuNNN | | |
| | | | | -3′ | | |
| mAN | GA01 | GAGATA | 241 | 5′gsasgAUACCUGAGUAACUUUCg | 3100 | ABE |
| GPTL | 543 | CCTGAGT | | UUUUsAGagcuaGaaauagcaaGUUsaA | | |
| 3 | | AACTTTC | | aAuAaggcuaGUccGUUsAucAAcuuG | | |
| | | | | aaaaagugGcaccgagucggugcuususuNN | | |
| | | | | N-3′ | | |
| mcPC | GA01 | CAGGTTC | 81 | 5′csasgGUUCCAUGGGAUGCUCUg | 1895 | SpCas |
| SK9 | 544 | CATGGG | | UUUUsAGagcuaGaaauagcaaGUUsaA | | 9 |
| | | ATGCTCT | | aAuAaggcuaGUccGUUsAucAAcuuG | | |
| | | | | aaaaagugGcaccgagucggugcuususuNN | | |
| | | | | N-3′ | | |
| mcPC | GA01 | CAGGTTC | 81 | 5′csasgGUUCCAUGGGAUGCUCUg | 3101 | SpCas |
| SK9 | 545 | CATGGG | | UUUUsAGagcuagaaauagcaaGUUsaA | | 9 |
| | | ATGCTCT | | aAuAaggCUaGUCcGUUsAucAAcuu | | |
| | | | | GaaaaaguGgcaccgAgUCggugcuususu | | |
| | | | | NNN-3′ | | |
| mcPC | GA01 | CAGGTTC | 81 | 5′csasgGUUCCAUGGGAUGCUCUg | 3102 | SpCas |
| SK9 | 546 | CATGGG | | UUUUsAGagcuagaaauagcaaGUUsaA | | 9 |
| | | ATGCTCT | | aAuAaggcuaGUccGUUsAucAAcuuG | | |
| | | | | aaaaaguGgcaccgAgUCggugcuususuN | | |
| | | | | NN-3′ | | |
| mcPC | GA01 | CAGGTTC | 81 | 5′csasgGUUCCAUGGGAUGCUCUg | 3103 | SpCas |
| SK9 | 547 | CATGGG | | UUUUsAGagcuagaaauagcaaGUUsaA | | 9 |
| | | ATGCTCT | | aAuAaggCUaGUCcGUUsAucAAcuu | | |
| | | | | gaaaaaguGgcaccgAgUCggugcuususuN | | |
| | | | | NN-3′ | | |
| mcPC | GA01 | CAGGTTC | 81 | 5′csasgGUUCCAUGGGAUGCUCUg | 3104 | SpCas |
| SK9 | 548 | CATGGG | | UUUUsAGagcuagaaauagcaaGUUsaA | | 9 |
| | | ATGCTCT | | aAuAaggCUaGUCcGUUsAucAAcuu | | |
| | | | | gaaaaaguGgcaccgAgUcggugcuususuN | | |
| | | | | NN-3′ | | |
| mcPC | GA01 | CAGGTTC | 81 | 5′csasgGUUCCAUGGGAUGCUCUg | 3102 | SpCas |
| SK9 | 549 | CATGGG | | UUUUsAGagcuagaaauagcaaGUUsaA | | 9 |
| | | ATGCTCT | | aAuAaggcuaGUccGUUsAucAAcuuG | | |
| | | | | NN-3′ | | |
| mcPC | GA01 | CAGGTTC | 81 | 5′csasgGUUCCAUGGGAUGCUCUg | 3105 | SpCas |
| SK9 | 550 | CATGGG | | UUUUsAGagcuaGaaauagcaaGUUsaA | | 9 |
| | | ATGCTCT | | aAuAaggCUaGUCcGUUsAucAAcuu | | |
| | | | | gaaaaaguGgcaccgAgUCggugcuususuN | | |
| | | | | NN-3′ | | |
| mcPC | GA01 | CAGGTTC | 81 | 5′csasgGUUCCAUGGGAUGCUCUg | 3106 | SpCas |
| SK9 | 551 | CATGGG | | UUUUsAGagcuaGaaauagcaaGUUsaA | | 9 |
| | | ATGCTCT | | aAuAaggCUaGUCcGUUsAucAAcuu | | |
| | | | | gaaaaaguGgcaccgAgUcggugcuususuN | | |
| | | | | NN-3′ | | |
| mcPC | GA01 | CAGGTTC | 81 | 5′csasgGUUCCAUGGGAUGCUCUg | 3107 | SpCas |
| SK9 | 552 | CATGGG | | UUUUsAGagcuaGaaauagcaaGUUsaA | | 9 |
| | | ATGCTCT | | aAuAaggcuaGUccGUUsAucAAcuuG | | |
| | | | | aaaaaguGgcaccgAgUCggugcuususuN | | |
| | | | | NN-3′ | | |
| mcPC | GA01 | CAGGTTC | 81 | 5′csasgsGUUCCXUGGGXUGCUCU | 1896 | SpCas |
| SK9 | 553 | CATGGG | | gUUUUAGagcuagaaauagcaaGUUaAa | | 9 |
| | | ATGCTCT | | AuAaggcuaGUccGUUAucAAcuugaaa | | |
| | | | | aagugGcaccgagucggugcusususu-3′ | | |
| mcPC | GA01 | CAGGTTC | 81 | 5′csasgsGUUCCXUGGGAUGCUCU | 1897 | SpCas |
| SK9 | 554 | CATGGG | | gUUUUAGagcuagaaauagcaaGUUaAa | | 9 |
| | | ATGCTCT | | AuAaggcuaGUccGUUAucAAcuugaaa | | |
| | | | | aagugGcaccgagucggugcusususu-3′ | | |
| mcPC | GA01 | CAGGTTC | 81 | 5′csasgsGUUCCAUGGGXUGCUCU | 1898 | SpCas |
| SK9 | 555 | CATGGG | | gUUUUAGagcuagaaauagcaaGUUaAa | | 9 |
| | | ATGCTCT | | AuAaggcuaGUccGUUAucAAcuugaaa | | |
| | | | | aagugGcaccgagucggugcusususu-3′ | | |
| mcPC | GA01 | CAGGTTC | 81 | 5′csasgsGUUCCAUGGGAUGCUCU | 1899 | SpCas |
| SK9 | 556 | CATGGG | | gUUUUAGagcuagXaauagcaaGUUaA | | 9 |
| | | ATGCTCT | | aAuAaggcuaGUccGUUAucAAcuugaa | | |
| | | | | aaagugGcaccgagucggugcusususu-3′ | | |
| mcPC | GA01 | CAGGTTC | 81 | 5′csasgsGUUCCAUGGGAUGCUCU | 1900 | SpCas |
| SK9 | 557 | CATGGG | | gUUUUAGagcuagXaauagcaaGUUaA | | 9 |
| | | ATGCTCT | | aAuAaggcuXGUccGUUAucAAcuuga | | |
| | | | | aaaagugGcaccgagucggugcusususu-3′ | | |
| mcPC | GA01 | CAGGTTC | 81 | 5′csasgsGUUCCAUGGGAUGCUCU | 1901 | SpCas |
| SK9 | 558 | CATGGG | | gUUUUAGagcuagaaauagcaaGUUaAa | | 9 |
| | | ATGCTCT | | AuAaggcuXGUccGUUAucAAcuugaa | | |
| | | | | aaagugGcaccgagucggugcusususu-3′ | | |
| mcPC | GA01 | CAGGTTC | 81 | 5′csasgsGUUCCAUGGGAUGCUCU | 1902 | SpCas |
| SK9 | 559 | CATGGG | | gUUUUAGagcuagaaauagcaaGUUaAa | | 9 |
| | | ATGCTCT | | AuAaggcuaGUccGUUXucAAcuugaaa | | |
| | | | | aagugGcaccgagucggugcusususu-3′ | | |
| mcPC | GA01 | CAGGTTC | 81 | 5′csasgsGUUCCAUGGGAUGCUCU | 1903 | SpCas |
| SK9 | 560 | CATGGG | | gUUUUAGagcuagXaauagcaaGUUaA | | 9 |
| | | ATGCTCT | | aAuAaggcuXGUccGUUXucAAcuuga | | |
| | | | | aaaagugGcaccgagucggugcusususu-3′ | | |
| mcPC | GA01 | CAGGTTC | 81 | 5′csasgsGUUCCAUGGGAUGCUCU | 1904 | SpCas |
| SK9 | 561 | CATGGG | | gUUUUAGXgcuagXaauagcaXGUUa | | 9 |
| | | ATGCTCT | | AaAuAaggcuXGUccGUUXucAAcuug | | |
| | | | | aaaaagugGcaccgagucggugcusususu-3′ | | |
| mcPC | GA01 | CAGGTTC | 81 | 5′csasgsGUUCCXUGGGXUGCUCU | 1905 | SpCas |
| SK9 | 562 | CATGGG | | gUUUUAGagcuagXaauagcaaGUUaA | | 9 |
| | | ATGCTCT | | aAuAaggcuaGUccGUUAucAAcuugaa | | |
| | | | | aaagugGcaccgagucggugcusususu-3′ | | |
| mcPC | GA01 | CAGGTTC | 81 | 5′csasgsGUUCCXUGGGXUGCUCU | 1906 | SpCas |
| SK9 | 563 | CATGGG | | gUUUUAGagcuagXaauagcaaGUUaA | | 9 |
| | | ATGCTCT | | aAuAaggcuXGUccGUUAucAAcuuga | | |
| | | | | aaaagugGcaccgagucggugcusususu-3′ | | |
| mcPC | GA01 | CAGGTTC | 81 | 5′csasgsGUUCCXUGGGXUGCUCU | 1907 | SpCas |
| SK9 | 564 | CATGGG | | gUUUUAGagcuagaaauagcaaGUUaAa | | 9 |
| | | ATGCTCT | | AuAaggcuaGUccGUUXucAAcuugaaa | | |
| | | | | aagugGcaccgagucggugcusususu-3′ | | |
| mcPC | GA01 | CAGGTTC | 81 | 5′csasgsGUUCCXUGGGXUGCUCU | 1908 | SpCas |
| SK9 | 565 | CATGGG | | gUUUUAGagcuagXaauagcaaGUUaA | | 9 |
| | | ATGCTCT | | aAuAaggcuXGUccGUUXucAAcuuga | | |
| | | | | aaaagugGcaccgagucggugcusususu-3′ | | |
| mcPC | GA01 | CAGGTTC | 81 | 5′csasgsGUUCCXUGGGXUGCUCU | 1909 | SpCas |
| SK9 | 566 | CATGGG | | gUUUUAGXgcuagXaauagcaXGUUa | | 9 |
| | | ATGCTCT | | AaAuAaggcuXGUccGUUXucAAcuug | | |
| | | | | aaaaagugGcaccgagucggugcusususu-3′ | | |
| mcPC | GA01 | CAGGTTC | 81 | 5′csasgsGUUCCAUGGGAUGCUCU | 1899 | SpCas |
| SK9 | 567 | CATGGG | | gUUUUAGagcuagXaauagcaaGUUaA | | 9 |
| | | ATGCTCT | | aAuAaggcuaGUccGUUAucAAcuugaa | | |
| | | | | aaagugGcaccgagucggugcusususu-3′ | | |
| mcPC | GA01 | CAGGTTC | 81 | 5′csasgsGUUCCXUGGGAUGCUCU | 1910 | SpCas |
| SK9 | 568 | CATGGG | | gUUUUAGagcuagXaauagcaaGUUaA | | 9 |
| | | ATGCTCT | | aAuAaggcuXGUccGUUAucAAcuuga | | |
| | | | | aaaagugGcaccgagucggugcusususu-3′ | | |
| mcPC | GA01 | CAGGTTC | 81 | 5′csasgsGUUCCXUGGGAUGCUCU | 1911 | SpCas |
| SK9 | 569 | CATGGG | | gUUUUAGagcuagaaauagcaaGUUaAa | | 9 |
| | | ATGCTCT | | AuAaggcuXGUccGUUAucAAcuugaa | | |
| | | | | aaagugGcaccgagucggugcusususu-3′ | | |
| mcPC | GA01 | CAGGTTC | 81 | 5′csasgsGUUCCXUGGGAUGCUCU | 1912 | SpCas |
| SK9 | 570 | CATGGG | | gUUUUAGagcuagaaauagcaaGUUaAa | | 9 |
| | | ATGCTCT | | AuAaggcuaGUccGUUXucAAcuugaaa | | |
| | | | | aagugGcaccgagucggugcusususu-3′ | | |
| mcPC | GA01 | CAGGTTC | 81 | 5′csasgsGUUCCXUGGGAUGCUCU | 1913 | SpCas |
| SK9 | 571 | CATGGG | | gUUUUAGagcuagXaauagcaaGUUaA | | 9 |
| | | ATGCTCT | | aAuAaggcuXGUccGUUXucAAcuuga | | |
| | | | | aaaagugGcaccgagucggugcusususu-3′ | | |
| mcPC | GA01 | CAGGTTC | 81 | 5′csasgsGUUCCXUGGGAUGCUCU | 1914 | SpCas |
| SK9 | 572 | CATGGG | | gUUUUAGXgcuagXaauagcaXGUUa | | 9 |
| | | ATGCTCT | | AaAuAaggcuXGUccGUUXucAAcuug | | |
| | | | | aaaaagugGcaccgagucggugcusususu-3′ | | |
| mcPC | GA01 | CAGGTTC | 81 | 5′csasgsGUUCCAUGGGXUGCUCU | 1915 | SpCas |
| SK9 | 573 | CATGGG | | gUUUUAGagcuagXaauagcaaGUUaA | | 9 |
| | | ATGCTCT | | aAuAaggcuaGUccGUUAucAAcuugaa | | |
| | | | | aaagugGcaccgagucggugcusususu-3′ | | |
| mcPC | GA01 | CAGGTTC | 81 | 5′csasgsGUUCCAUGGGXUGCUCU | 1916 | SpCas |
| SK9 | 574 | CATGGG | | gUUUUAGagcuagXaauagcaaGUUaA | | 9 |
| | | ATGCTCT | | aAuAaggcuXGUccGUUAucAAcuuga | | |
| | | | | aaaagugGcaccgagucggugcusususu-3′ | | |
| mcPC | GA01 | CAGGTTC | 81 | 5′csasgsGUUCCAUGGGXUGCUCU | 1917 | SpCas |
| SK9 | 575 | CATGGG | | gUUUUAGagcuagaaauagcaaGUUaAa | | 9 |
| | | ATGCTCT | | AuAaggcuXGUccGUUAucAAcuugaa | | |
| | | | | aaagugGcaccgagucggugcusususu-3′ | | |
| mcPC | GA01 | CAGGTTC | 81 | 5′csasgsGUUCCAUGGGXUGCUCU | 1918 | SpCas |
| SK9 | 576 | CATGGG | | gUUUUAGagcuagaaauagcaaGUUaAa | | 9 |
| | | ATGCTCT | | AuAaggcuaGUccGUUXucAAcuugaaa | | |
| | | | | aagugGcaccgagucggugcusususu-3′ | | |
| mcPC | GA01 | CAGGTTC | 81 | 5′csasgsGUUCCAUGGGXUGCUCU | 1919 | SpCas |
| SK9 | 577 | CATGGG | | gUUUUAGagcuagXaauagcaaGUUaA | | 9 |
| | | ATGCTCT | | aAuAaggcuXGUccGUUXucAAcuuga | | |
| | | | | aaaagugGcaccgagucggugcusususu-3′ | | |
| mcPC | GA01 | CAGGTTC | 81 | 5′csasgsGUUCCAUGGGXUGCUCU | 1920 | SpCas |
| SK9 | 578 | CATGGG | | gUUUUAGXgcuagXaauagcaXGUUa | | 9 |
| | | ATGCTCT | | AaAuAaggcuXGUccGUUXucAAcuug | | |
| | | | | aaaaagugGcaccgagucggugcusususu-3′ | | |
| mcPC | GA01 | CAGGTTC | 81 | 5′csasgsGUUCCXUGGGXUGCUCU | 1921 | SpCas |
| SK9 | 579 | CATGGG | | gUUUUAGxgcuagxaauagcaxGUUaAa | | 9 |
| | | ATGCTCT | | AuAaggcuxGUccGUUAucAAcuugaaa | | |
| | | | | aagugGcaccgagucggugcusususu-3′ | | |
| mcPC | GA01 | CAGGTTC | 81 | 5′csasgsGUUCCXUGGGXUGCUCU | 1922 | SpCas |
| SK9 | 580 | CATGGG | | gUUUUAGagcuagxaauagcaxGUUaAa | | 9 |
| | | ATGCTCT | | AuAaggcuxGUccGUUAucAAcuugaaa | | |
| | | | | aagugGcaccgagucggugcusususu-3′ | | |
| mcPC | GA01 | CAGGTTC | 81 | 5′csasgsGUUCCXUGGGXUGCUCU | 1923 | SpCas |
| SK9 | 581 | CATGGG | | gUUUUAGagcuagaaauagcaxGUUaAa | | 9 |
| | | ATGCTCT | | AuAaggcuxGUccGUUAucAAcuugaaa | | |
| | | | | aagugGcaccgagucggugcusususu-3′ | | |
| mcPC | GA01 | CAGGTTC | 81 | 5′csasgsGUUCCXUGGGXUGCUCU | 1924 | SpCas |
| SK9 | 582 | CATGGG | | gUUUUAGagcuagaaauagcaaGUUaAa | | 9 |
| | | ATGCTCT | | AuAaggcuxGUccGUUAucAAcuugaaa | | |
| | | | | aagugGcaccgagucggugcusususu-3′ | | |
| mcPC | GA01 | CAGGTTC | 81 | 5′csasgsGUUCCXUGGGXUGCUCU | 1925 | SpCas |
| SK9 | 583 | CATGGG | | gUUUUAGxgcuagaaauagcaaGUUaAa | | 9 |
| | | ATGCTCT | | AuAaggcuaGUccGUUAucAAcuugaaa | | |
| | | | | aagugGcaccgagucggugcusususu-3′ | | |
| mcPC | GA01 | CAGGTTC | 81 | 5′csasgsGUUCCXUGGGXUGCUCU | 1926 | SpCas |
| SK9 | 584 | CATGGG | | gUUUUAGagcuagaaauagcaxGUUaAa | | 9 |
| | | ATGCTCT | | AuAaggcuaGUccGUUAucAAcuugaaa | | |
| | | | | aagugGcaccgagucggugcusususu-3′ | | |
| mcPC | GA01 | CAGGTTC | 81 | 5′csasgsGUUCCXUGGGXUGCUCU | 1927 | SpCas |
| SK9 | 585 | CATGGG | | gUUUUAGagcuagxaauagcaxGUUaAa | | 9 |
| | | ATGCTCT | | AuAaggcuaGUccGUUAucAAcuugaaa | | |
| | | | | aagugGcaccgagucggugcusususu-3′ | | |
| mcPC | GA01 | CAGGTTC | 81 | 5′csasgsGUUCCXUGGGXUGCUCU | 3108 | SpCas |
| SK9 | 586 | CATGGG | | gUUUUAGagcuagxaauagcaaGUUaAa | | 9 |
| | | ATGCTCT | | AuAaggcuaGUccGUUAucAAcuugaaa | | |
| | | | | aagugGcaccgagucggugcusususu-3′ | | |
| mcPC | GA01 | CAGGTTC | 81 | 5′csasgsGUUCCAUGGGXUGCUCU | 1928 | SpCas |
| SK9 | 587 | CATGGG | | gUUUUAGxgcuagxaauagcaxGUUaAa | | 9 |
| | | ATGCTCT | | AuAaggcuxGUccGUUAucAAcuugaaa | | |
| | | | | aagugGcaccgagucggugcusususu-3′ | | |
| mcPC | GA01 | CAGGTTC | 81 | 5′csasgsGUUCCAUGGGXUGCUCU | 1929 | SpCas |
| SK9 | 588 | CATGGG | | gUUUUAGagcuagxaauagcaxGUUaAa | | 9 |
| | | ATGCTCT | | AuAaggcuxGUccGUUAucAAcuugaaa | | |
| | | | | aagugGcaccgagucggugcusususu-3′ | | |
| mcPC | GA01 | CAGGTTC | 81 | 5′csasgsGUUCCAUGGGXUGCUCU | 1930 | SpCas |
| SK9 | 589 | CATGGG | | gUUUUAGagcuagaaauagcaxGUUaAa | | 9 |
| | | ATGCTCT | | AuAaggcuxGUccGUUAucAAcuugaaa | | |
| | | | | aagugGcaccgagucggugcusususu-3′ | | |
| mcPC | GA01 | CAGGTTC | 81 | 5′csasgsGUUCCAUGGGXUGCUCU | 3109 | SpCas |
| SK9 | 590 | CATGGG | | gUUUUAGagcuagaaauagcaaGUUaAa | | 9 |
| | | ATGCTCT | | AuAaggcuxGUccGUUAucAAcuugaaa | | |
| | | | | aagugGcaccgagucggugcusususu-3′ | | |
| mcPC | GA01 | CAGGTTC | 81 | 5′csasgsGUUCCAUGGGXUGCUCU | 1931 | SpCas |
| SK9 | 591 | CATGGG | | gUUUUAGxgcuagaaauagcaaGUUaAa | | 9 |
| | | ATGCTCT | | AuAaggcuaGUccGUUAucAAcuugaaa | | |
| | | | | aagugGcaccgagucggugcusususu-3′ | | |
| mcPC | GA01 | CAGGTTC | 81 | 5′csasgsGUUCCAUGGGXUGCUCU | 1932 | SpCas |
| SK9 | 592 | CATGGG | | gUUUUAGagcuagaaauagcaxGUUaAa | | 9 |
| | | ATGCTCT | | AuAaggcuaGUccGUUAucAAcuugaaa | | |
| | | | | aagugGcaccgagucggugcusususu-3′ | | |
| mcPC | GA01 | CAGGTTC | 81 | 5′csasgsGUUCCAUGGGXUGCUCU | 1933 | SpCas |
| SK9 | 593 | CATGGG | | gUUUUAGagcuagxaauagcaxGUUaAa | | 9 |
| | | ATGCTCT | | AuAaggcuaGUccGUUAucAAcuugaaa | | |
| | | | | aagugGcaccgagucggugcusususu-3′ | | |
| mcPC | GA01 | CAGGTTC | 81 | 5′csasgsGUUCCAUGGGXUGCUCU | 3110 | SpCas |
| SK9 | 594 | CATGGG | | gUUUUAGagcuagxaauagcaaGUUaAa | | 9 |
| | | ATGCTCT | | AuAaggcuaGUccGUUAucAAcuugaaa | | |
| | | | | aagugGcaccgagucggugcusususu-3′ | | |
| mcPC | GA01 | CAGGTTC | 81 | 5′csasgsGUUCCXUGGGAUGCUCU | 1934 | SpCas |
| SK9 | 595 | CATGGG | | gUUUUAGxgcuagxaauagcaxGUUaAa | | 9 |
| | | ATGCTCT | | AuAaggcuxGUccGUUAucAAcuugaaa | | |
| | | | | aagugGcaccgagucggugcusususu-3′ | | |
| mcPC | GA01 | CAGGTTC | 81 | 5′csasgsGUUCCXUGGGAUGCUCU | 1935 | SpCas |
| SK9 | 596 | CATGGG | | gUUUUAGagcuagxaauagcaxGUUaAa | | 9 |
| | | ATGCTCT | | AuAaggcuxGUccGUUAucAAcuugaaa | | |
| | | | | aagugGcaccgagucggugcusususu-3′ | | |
| mcPC | GA01 | CAGGTTC | 81 | 5′csasgsGUUCCXUGGGAUGCUCU | 1936 | SpCas |
| SK9 | 597 | CATGGG | | gUUUUAGagcuagaaauagcaxGUUaAa | | 9 |
| | | ATGCTCT | | AuAaggcuxGUccGUUAucAAcuugaaa | | |
| | | | | aagugGcaccgagucggugcusususu-3′ | | |
| mcPC | GA01 | CAGGTTC | 81 | 5′csasgsGUUCCXUGGGAUGCUCU | 3111 | SpCas |
| SK9 | 598 | CATGGG | | gUUUUAGagcuagaaauagcaaGUUaAa | | 9 |
| | | ATGCTCT | | AuAaggcuxGUccGUUAucAAcuugaaa | | |
| | | | | aagugGcaccgagucggugcusususu-3′ | | |
| mcPC | GA01 | CAGGTTC | 81 | 5′csasgsGUUCCXUGGGAUGCUCU | 1937 | SpCas |
| SK9 | 599 | CATGGG | | gUUUUAGxgcuagaaauagcaaGUUaAa | | 9 |
| | | ATGCTCT | | AuAaggcuaGUccGUUAucAAcuugaaa | | |
| | | | | aagugGcaccgagucggugcusususu-3′ | | |
| mcPC | GA01 | CAGGTTC | 81 | 5′csasgsGUUCCXUGGGAUGCUCU | 1938 | SpCas |
| SK9 | 600 | CATGGG | | gUUUUAGagcuagaaauagcaxGUUaAa | | 9 |
| | | ATGCTCT | | AuAaggcuaGUccGUUAucAAcuugaaa | | |
| | | | | aagugGcaccgagucggugcusususu-3′ | | |
| mcPC | GA01 | CAGGTTC | 81 | 5′csasgsGUUCCXUGGGAUGCUCU | 1939 | SpCas |
| SK9 | 601 | CATGGG | | gUUUUAGagcuagxaauagcaxGUUaAa | | 9 |
| | | ATGCTCT | | AuAaggcuaGUccGUUAucAAcuugaaa | | |
| | | | | aagugGcaccgagucggugcusususu-3′ | | |
| mcPC | GA01 | CAGGTTC | 81 | 5′csasgsGUUCCXUGGGAUGCUCU | 1940 | SpCas |
| SK9 | 602 | CATGGG | | gUUUUAGagcuagxaauagcaaGUUaAa | | 9 |
| | | ATGCTCT | | AuAaggcuaGUccGUUAucAAcuugaaa | | |
| | | | | aagugGcaccgagucggugcusususu-3′ | | |
| mcPC | GA01 | CAGGTTC | 81 | 5′csasgsGUUCCdXUGGGdXUGCUC | 1941 | SpCas |
| SK9 | 603 | CATGGG | | UgUUUUAGagcuagaaauagcaaGUUa | | 9 |
| | | ATGCTCT | | AaAuAaggcuaGUccGUUAucAAcuug | | |
| | | | | aaaaagugGcaccgagucggugcusususu-3′ | | |
| mcPC | GA01 | CAGGTTC | 81 | 5′csasgsGUUCCdXUGGGAUGCUC | 1942 | SpCas |
| SK9 | 604 | CATGGG | | UgUUUUAGagcuagaaauagcaaGUUa | | 9 |
| | | ATGCTCT | | AaAuAaggcuaGUccGUUAucAAcuug | | |
| | | | | aaaaagugGcaccgagucggugcusususu-3′ | | |
| mcPC | GA01 | CAGGTTC | 81 | 5′csasgsGUUCCAUGGGdXUGCUC | 1943 | SpCas |
| SK9 | 605 | CATGGG | | UgUUUUAGagcuagaaauagcaaGUUa | | 9 |
| | | ATGCTCT | | AaAuAaggcuaGUccGUUAucAAcuug | | |
| | | | | aaaaagugGcaccgagucggugcusususu-3′ | | |
| mcPC | GA01 | CAGGTTC | 81 | 5′csasgsGUUCCAUGGGAUGCUCU | 1944 | SpCas |
| SK9 | 606 | CATGGG | | gUUUUAGagcuagdXaauagcaaGUUa | | 9 |
| | | ATGCTCT | | AaAuAaggcuaGUccGUUAucAAcuug | | |
| | | | | aaaaagugGcaccgagucggugcusususu-3′ | | |
| mcPC | GA01 | CAGGTTC | 81 | 5′csasgsGUUCCAUGGGAUGCUCU | 1945 | SpCas |
| SK9 | 607 | CATGGG | | gUUUUAGagcuagdXaauagcaaGUUa | | 9 |
| | | ATGCTCT | | AaAuAaggcudXGUccGUUAucAAcuu | | |
| | | | | gaaaaagugGcaccgagucggugcusususu-3′ | | |
| mcPC | GA01 | CAGGTTC | 81 | 5′csasgsGUUCCAUGGGAUGCUCU | 1946 | SpCas |
| SK9 | 608 | CATGGG | | gUUUUAGagcuagaaauagcaaGUUaAa | | 9 |
| | | ATGCTCT | | AuAaggcudXGUccGUUAucAAcuuga | | |
| | | | | aaaagugGcaccgagucggugcusususu-3′ | | |
| mcPC | GA01 | CAGGTTC | 81 | 5′csasgsGUUCCAUGGGAUGCUCU | 1947 | SpCas |
| SK9 | 609 | CATGGG | | gUUUUAGagcuagaaauagcaaGUUaAa | | 9 |
| | | ATGCTCT | | AuAaggcuaGUccGUUdXucAAcuugaa | | |
| | | | | aaagugGcaccgagucggugcusususu-3′ | | |
| mcPC | GA01 | CAGGTTC | 81 | 5′csasgsGUUCCAUGGGAUGCUCU | 1948 | SpCas |
| SK9 | 610 | CATGGG | | gUUUUAGagcuagdXaauagcaaGUUa | | 9 |
| | | ATGCTCT | | AaAuAaggcudXGUccGUUdXucAAcu | | |
| | | | | ugaaaaagugGcaccgagucggugcusususu- | | |
| | | | | 3′ | | |
| mcPC | GA01 | CAGGTTC | 81 | 5′csasgsGUUCCAUGGGAUGCUCU | 1949 | SpCas |
| SK9 | 611 | CATGGG | | gUUUUAGdXgcuagdXaauagcadXGU | | 9 |
| | | ATGCTCT | | UaAaAuAaggcudXGUccGUUdXucA | | |
| | | | | AcuugaaaaagugGcaccgagucggugcusus | | |
| | | | | usu-3′ | | |
| mcPC | GA01 | CAGGTTC | 81 | 5′csasgGUUCCXUGGGXUGCUCUg | 1950 | SpCas |
| SK9 | 612 | CATGGG | | UUUUAGagcuagaaauagcaaGUUaAaA | | 9 |
| | | ATGCTCT | | uAaggcuaGUccGUUAucAAcuugaaaa | | |
| | | | | agugGcaccgagucggugcusususu-3′ | | |
| mcPC | GA01 | CAGGTTC | 81 | 5′csasgGUUCCXUGGGAUGCUCUg | 1951 | SpCas |
| SK9 | 613 | CATGGG | | UUUUAGagcuagaaauagcaaGUUaAaA | | 9 |
| | | ATGCTCT | | uAaggcuaGUccGUUAucAAcuugaaaa | | |
| | | | | agugGcaccgagucggugcusususu-3′ | | |
| mcPC | GA01 | CAGGTTC | 81 | 5′csasgGUUCCAUGGGXUGCUCUg | 1952 | SpCas |
| SK9 | 614 | CATGGG | | UUUUAGagcuagaaauagcaaGUUaAaA | | 9 |
| | | ATGCTCT | | uAaggcuaGUccGUUAucAAcuugaaaa | | |
| | | | | agugGcaccgagucggugcusususu-3′ | | |
| mcPC | GA01 | CAGGTTC | 81 | 5′csasgGUUCCAUGGGAUGCUCUg | 1953 | SpCas |
| SK9 | 615 | CATGGG | | UUUUAGagcuagXaauagcaaGUUaAa | | 9 |
| | | ATGCTCT | | AuAaggcuaGUccGUUAucAAcuugaaa | | |
| | | | | aagugGcaccgagucggugcusususu-3′ | | |
| mcPC | GA01 | CAGGTTC | 81 | 5′csasgGUUCCAUGGGAUGCUCUg | 1954 | SpCas |
| SK9 | 616 | CATGGG | | UUUUAGagcuagXaauagcaaGUUaAa | | 9 |
| | | ATGCTCT | | AuAaggcuXGUccGUUAucAAcuugaa | | |
| | | | | aaagugGcaccgagucggugcusususu-3′ | | |
| mcPC | GA01 | CAGGTTC | 81 | 5′csasgGUUCCAUGGGAUGCUCUg | 1955 | SpCas |
| SK9 | 617 | CATGGG | | UUUUAGagcuagaaauagcaaGUUaAaA | | 9 |
| | | ATGCTCT | | uAaggcuXGUccGUUAucAAcuugaaaa | | |
| | | | | agugGcaccgagucggugcusususu-3′ | | |
| mcPC | GA01 | CAGGTTC | 81 | 5′csasgGUUCCAUGGGAUGCUCUg | 1956 | SpCas |
| SK9 | 618 | CATGGG | | UUUUAGagcuagaaauagcaaGUUaAaA | | 9 |
| | | ATGCTCT | | uAaggcuaGUccGUUXucAAcuugaaaa | | |
| | | | | agugGcaccgagucggugcusususu-3′ | | |
| mcPC | GA01 | CAGGTTC | 81 | 5′csasgGUUCCAUGGGAUGCUCUg | 1957 | SpCas |
| SK9 | 619 | CATGGG | | UUUUAGagcuagXaauagcaaGUUaAa | | 9 |
| | | ATGCTCT | | AuAaggcuXGUccGUUXucAAcuugaa | | |
| | | | | aaagugGcaccgagucggugcusususu-3′ | | |
| mcPC | GA01 | CAGGTTC | 81 | 5′csasgGUUCCAUGGGAUGCUCUg | 1958 | SpCas |
| SK9 | 620 | CATGGG | | UUUUAGXgcuagXaauagcaXGUUaA | | 9 |
| | | ATGCTCT | | aAuAaggcuXGUccGUUXucAAcuuga | | |
| | | | | aaaagugGcaccgagucggugcusususu-3′ | | |
| mcPC | GA01 | CAGGTTC | 81 | 5′csasgGUUCCXUGGGXUGCUCUg | 1959 | SpCas |
| SK9 | 621 | CATGGG | | UUUUAGagcuagXaauagcaaGUUaAa | | 9 |
| | | ATGCTCT | | AuAaggcuaGUccGUUAucAAcuugaaa | | |
| | | | | aagugGcaccgagucggugcusususu-3′ | | |
| mcPC | GA01 | CAGGTTC | 81 | 5′csasgGUUCCXUGGGXUGCUCUg | 1960 | SpCas |
| SK9 | 622 | CATGGG | | UUUUAGagcuagXaauagcaaGUUaAa | | 9 |
| | | ATGCTCT | | AuAaggcuXGUccGUUAucAAcuugaa | | |
| | | | | aaagugGcaccgagucggugcusususu-3′ | | |
| mcPC | GA01 | CAGGTTC | 81 | 5′csasgGUUCCXUGGGXUGCUCUg | 1961 | SpCas |
| SK9 | 623 | CATGGG | | UUUUAGagcuagaaauagcaaGUUaAaA | | 9 |
| | | ATGCTCT | | uAaggcuaGUccGUUXucAAcuugaaaa | | |
| | | | | agugGcaccgagucggugcusususu-3′ | | |
| mcPC | GA01 | CAGGTTC | 81 | 5′csasgGUUCCXUGGGXUGCUCUg | 1962 | SpCas |
| SK9 | 624 | CATGGG | | UUUUAGagcuagXaauagcaaGUUaAa | | 9 |
| | | ATGCTCT | | AuAaggcuXGUccGUUXucAAcuugaa | | |
| | | | | aaagugGcaccgagucggugcusususu-3′ | | |
| mcPC | GA01 | CAGGTTC | 81 | 5′csasgGUUCCXUGGGXUGCUCUg | 1963 | SpCas |
| SK9 | 625 | CATGGG | | UUUUAGXgcuagXaauagcaXGUUaA | | 9 |
| | | ATGCTCT | | aAuAaggcuXGUccGUUXucAAcuuga | | |
| | | | | aaaagugGcaccgagucggugcusususu-3′ | | |
| mcPC | GA01 | CAGGTTC | 81 | 5′csasgGUUCCAUGGGAUGCUCUg | 1953 | SpCas |
| SK9 | 626 | CATGGG | | UUUUAGagcuagXaauagcaaGUUaAa | | 9 |
| | | ATGCTCT | | AuAaggcuaGUccGUUAucAAcuugaaa | | |
| | | | | aagugGcaccgagucggugcusususu-3′ | | |
| mcPC | GA01 | CAGGTTC | 81 | 5′csasgGUUCCXUGGGAUGCUCUg | 1964 | SpCas |
| SK9 | 627 | CATGGG | | UUUUAGagcuagXaauagcaaGUUaAa | | 9 |
| | | ATGCTCT | | AuAaggcuXGUccGUUAucAAcuugaa | | |
| | | | | aaagugGcaccgagucggugcusususu-3′ | | |
| mcPC | GA01 | CAGGTTC | 81 | 5′csasgGUUCCXUGGGAUGCUCUg | 1965 | SpCas |
| SK9 | 628 | CATGGG | | UUUUAGagcuagaaauagcaaGUUaAaA | | 9 |
| | | ATGCTCT | | uAaggcuXGUccGUUAucAAcuugaaaa | | |
| | | | | agugGcaccgagucggugcusususu-3′ | | |
| mcPC | GA01 | CAGGTTC | 81 | 5′csasgGUUCCXUGGGAUGCUCUg | 1966 | SpCas |
| SK9 | 629 | CATGGG | | UUUUAGagcuagaaauagcaaGUUaAaA | | 9 |
| | | ATGCTCT | | uAaggcuaGUccGUUXucAAcuugaaaa | | |
| | | | | agugGcaccgagucggugcusususu-3′ | | |
| mcPC | GA01 | CAGGTTC | 81 | 5′csasgGUUCCXUGGGAUGCUCUg | 1967 | SpCas |
| SK9 | 630 | CATGGG | | UUUUAGagcuagXaauagcaaGUUaAa | | 9 |
| | | ATGCTCT | | AuAaggcuXGUccGUUXucAAcuugaa | | |
| | | | | aaagugGcaccgagucggugcusususu-3′ | | |
| mcPC | GA01 | CAGGTTC | 81 | 5′csasgGUUCCXUGGGAUGCUCUg | 1968 | SpCas |
| SK9 | 631 | CATGGG | | UUUUAGXgcuagXaauagcaXGUUaA | | 9 |
| | | ATGCTCT | | aAuAaggcuXGUccGUUXucAAcuuga | | |
| | | | | aaaagugGcaccgagucggugcusususu-3′ | | |
| mcPC | GA01 | CAGGTTC | 81 | 5′csasgGUUCCAUGGGXUGCUCUg | 1969 | SpCas |
| SK9 | 632 | CATGGG | | UUUUAGagcuagXaauagcaaGUUaAa | | 9 |
| | | ATGCTCT | | AuAaggcuaGUccGUUAucAAcuugaaa | | |
| | | | | aagugGcaccgagucggugcusususu-3′ | | |
| mcPC | GA01 | CAGGTTC | 81 | 5′csasgGUUCCAUGGGXUGCUCUg | 1970 | SpCas |
| SK9 | 633 | CATGGG | | UUUUAGagcuagXaauagcaaGUUaAa | | 9 |
| | | ATGCTCT | | AuAaggcuXGUccGUUAucAAcuugaa | | |
| | | | | aaagugGcaccgagucggugcusususu-3′ | | |
| mcPC | GA01 | CAGGTTC | 81 | 5′csasgGUUCCAUGGGXUGCUCUg | 1971 | SpCas |
| SK9 | 634 | CATGGG | | UUUUAGagcuagaaauagcaaGUUaAaA | | 9 |
| | | ATGCTCT | | uAaggcuXGUccGUUAucAAcuugaaaa | | |
| | | | | agugGcaccgagucggugcusususu-3′ | | |
| mcPC | GA01 | CAGGTTC | 81 | 5′csasgGUUCCAUGGGXUGCUCUg | 1972 | SpCas |
| SK9 | 635 | CATGGG | | UUUUAGagcuagaaauagcaaGUUaAaA | | 9 |
| | | ATGCTCT | | uAaggcuaGUccGUUXucAAcuugaaaa | | |
| | | | | agugGcaccgagucggugcusususu-3′ | | |
| mcPC | GA01 | CAGGTTC | 81 | 5′csasgGUUCCAUGGGXUGCUCUg | 1973 | SpCas |
| SK9 | 636 | CATGGG | | UUUUAGagcuagXaauagcaaGUUaAa | | 9 |
| | | ATGCTCT | | AuAaggcuXGUccGUUXucAAcuugaa | | |
| | | | | aaagugGcaccgagucggugcusususu-3′ | | |
| mcPC | GA01 | CAGGTTC | 81 | 5′csasgGUUCCAUGGGXUGCUCUg | 1974 | SpCas |
| SK9 | 637 | CATGGG | | UUUUAGXgcuagXaauagcaXGUUaA | | 9 |
| | | ATGCTCT | | aAuAaggcuXGUccGUUXucAAcuuga | | |
| | | | | aaaagugGcaccgagucggugcusususu-3′ | | |
| mcPC | GA01 | CAGGTTC | 81 | 5′csasgGUUCCXUGGGXUGCUCUg | 1975 | SpCas |
| SK9 | 638 | CATGGG | | UUUUAGxgcuagxaauagcaxGUUaAa | | 9 |
| | | ATGCTCT | | AuAaggcuxGUccGUUAucAAcuugaaa | | |
| | | | | aagugGcaccgagucggugcusususu-3′ | | |
| mcPC | GA01 | CAGGTTC | 81 | 5′csasgGUUCCXUGGGXUGCUCUg | 1976 | SpCas |
| SK9 | 639 | CATGGG | | UUUUAGagcuagxaauagcaxGUUaAa | | 9 |
| | | ATGCTCT | | AuAaggcuxGUccGUUAucAAcuugaaa | | |
| | | | | aagugGcaccgagucggugcusususu-3′ | | |
| mcPC | GA01 | CAGGTTC | 81 | 5′csasgGUUCCXUGGGXUGCUCUg | 1977 | SpCas |
| SK9 | 640 | CATGGG | | UUUUAGagcuagaaauagcaxGUUaAa | | 9 |
| | | ATGCTCT | | AuAaggcuxGUccGUUAucAAcuugaaa | | |
| | | | | aagugGcaccgagucggugcusususu-3′ | | |
| mcPC | GA01 | CAGGTTC | 81 | 5′csasgGUUCCXUGGGXUGCUCUg | 1978 | SpCas |
| SK9 | 641 | CATGGG | | UUUUAGagcuagaaauagcaaGUUaAaA | | 9 |
| | | ATGCTCT | | uAaggcuxGUccGUUAucAAcuugaaaa | | |
| | | | | agugGcaccgagucggugcusususu-3′ | | |
| mcPC | GA01 | CAGGTTC | 81 | 5′csasgGUUCCXUGGGXUGCUCUg | 1979 | SpCas |
| SK9 | 642 | CATGGG | | UUUUAGxgcuagaaauagcaaGUUaAa | | 9 |
| | | ATGCTCT | | AuAaggcuaGUccGUUAucAAcuugaaa | | |
| | | | | aagugGcaccgagucggugcusususu-3′ | | |
| mcPC | GA01 | CAGGTTC | 81 | 5′csasgGUUCCXUGGGXUGCUCUg | 1980 | SpCas |
| SK9 | 643 | CATGGG | | UUUUAGagcuagaaauagcaxGUUaAa | | 9 |
| | | ATGCTCT | | AuAaggcuaGUccGUUAucAAcuugaaa | | |
| | | | | aagugGcaccgagucggugcusususu-3′ | | |
| mcPC | GA01 | CAGGTTC | 81 | 5′csasgGUUCCXUGGGXUGCUCUg | 1981 | SpCas |
| SK9 | 644 | CATGGG | | UUUUAGagcuagxaauagcaxGUUaAa | | 9 |
| | | ATGCTCT | | AuAaggcuaGUccGUUAucAAcuugaaa | | |
| | | | | aagugGcaccgagucggugcusususu-3′ | | |
| mcPC | GA01 | CAGGTTC | 81 | 5′csasgGUUCCXUGGGXUGCUCUg | 3112 | SpCas |
| SK9 | 645 | CATGGG | | UUUUAGagcuagxaauagcaaGUUaAa | | 9 |
| | | ATGCTCT | | AuAaggcuaGUccGUUAucAAcuugaaa | | |
| | | | | aagugGcaccgagucggugcusususu-3′ | | |
| mcPC | GA01 | CAGGTTC | 81 | 5′csasgGUUCCAUGGGXUGCUCUg | 1982 | SpCas |
| SK9 | 646 | CATGGG | | UUUUAGxgcuagxaauagcaxGUUaAa | | 9 |
| | | ATGCTCT | | AuAaggcuxGUccGUUAucAAcuugaaa | | |
| | | | | aagugGcaccgagucggugcusususu-3′ | | |
| mcPC | GA01 | CAGGTTC | 81 | 5′csasgsGUUCCAUGGGXUGCUCU | 1929 | SpCas |
| SK9 | 647 | CATGGG | | gUUUUAGagcuagxaauagcaxGUUaAa | | 9 |
| | | ATGCTCT | | AuAaggcuxGUccGUUAucAAcuugaaa | | |
| | | | | aagugGcaccgagucggugcusususu-3′ | | |
| mcPC | GA01 | CAGGTTC | 81 | 5′csasgGUUCCAUGGGXUGCUCUg | 1983 | SpCas |
| SK9 | 648 | CATGGG | | UUUUAGagcuagaaauagcaxGUUaAa | | 9 |
| | | ATGCTCT | | AuAaggcuxGUccGUUAucAAcuugaaa | | |
| | | | | aagugGcaccgagucggugcusususu-3′ | | |
| mcPC | GA01 | CAGGTTC | 81 | 5′csasgGUUCCAUGGGXUGCUCUg | 3113 | SpCas |
| SK9 | 649 | CATGGG | | UUUUAGagcuagaaauagcaaGUUaAaA | | 9 |
| | | ATGCTCT | | uAaggcuxGUccGUUAucAAcuugaaaa | | |
| | | | | agugGcaccgagucggugcusususu-3′ | | |
| mcPC | GA01 | CAGGTTC | 81 | 5′csasgGUUCCAUGGGXUGCUCUg | 1984 | SpCas |
| SK9 | 650 | CATGGG | | UUUUAGxgcuagaaauagcaaGUUaAa | | 9 |
| | | ATGCTCT | | AuAaggcuaGUccGUUAucAAcuugaaa | | |
| | | | | aagugGcaccgagucggugcusususu-3′ | | |
| mcPC | GA01 | CAGGTTC | 81 | 5′csasgGUUCCAUGGGXUGCUCUg | 1985 | SpCas |
| SK9 | 651 | CATGGG | | UUUUAGagcuagaaauagcaxGUUaAa | | 9 |
| | | ATGCTCT | | AuAaggcuaGUccGUUAucAAcuugaaa | | |
| | | | | aagugGcaccgagucggugcusususu-3′ | | |
| mcPC | GA01 | CAGGTTC | 81 | 5′csasgGUUCCAUGGGXUGCUCUg | 1986 | SpCas |
| SK9 | 652 | CATGGG | | UUUUAGagcuagxaauagcaxGUUaAa | | 9 |
| | | ATGCTCT | | AuAaggcuaGUccGUUAucAAcuugaaa | | |
| | | | | aagugGcaccgagucggugcusususu-3′ | | |
| mcPC | GA01 | CAGGTTC | 81 | 5′csasgGUUCCAUGGGXUGCUCUg | 3114 | SpCas |
| SK9 | 653 | CATGGG | | UUUUAGagcuagxaauagcaaGUUaAa | | 9 |
| | | ATGCTCT | | AuAaggcuaGUccGUUAucAAcuugaaa | | |
| | | | | aagugGcaccgagucggugcusususu-3′ | | |
| mcPC | GA01 | CAGGTTC | 81 | 5′csasgGUUCCXUGGGAUGCUCUg | 1987 | SpCas |
| SK9 | 654 | CATGGG | | UUUUAGxgcuagxaauagcaxGUUaAa | | 9 |
| | | ATGCTCT | | AuAaggcuxGUccGUUAucAAcuugaaa | | |
| | | | | aagugGcaccgagucggugcusususu-3′ | | |
| mcPC | GA01 | CAGGTTC | 81 | 5′csasgGUUCCXUGGGAUGCUCUg | 1988 | SpCas |
| SK9 | 655 | CATGGG | | UUUUAGagcuagxaauagcaxGUUaAa | | 9 |
| | | ATGCTCT | | AuAaggcuxGUccGUUAucAAcuugaaa | | |
| | | | | aagugGcaccgagucggugcusususu-3′ | | |
| mcPC | GA01 | CAGGTTC | 81 | 5′csasgGUUCCXUGGGAUGCUCUg | 1989 | SpCas |
| SK9 | 656 | CATGGG | | UUUUAGagcuagaaauagcaxGUUaAa | | 9 |
| | | ATGCTCT | | AuAaggcuxGUccGUUAucAAcuugaaa | | |
| | | | | aagugGcaccgagucggugcusususu-3′ | | |
| mcPC | GA01 | CAGGTTC | 81 | 5′csasgGUUCCXUGGGAUGCUCUg | 3115 | SpCas |
| SK9 | 657 | CATGGG | | UUUUAGagcuagaaauagcaaGUUaAaA | | 9 |
| | | ATGCTCT | | uAaggcuxGUccGUUAucAAcuugaaaa | | |
| | | | | agugGcaccgagucggugcusususu-3′ | | |
| mcPC | GA01 | CAGGTTC | 81 | 5′csasgGUUCCXUGGGAUGCUCUg | 1990 | SpCas |
| SK9 | 658 | CATGGG | | UUUUAGxgcuagaaauagcaaGUUaAa | | 9 |
| | | ATGCTCT | | AuAaggcuaGUccGUUAucAAcuugaaa | | |
| | | | | aagugGcaccgagucggugcusususu-3′ | | |
| mcPC | GA01 | CAGGTTC | 81 | 5′csasgGUUCCXUGGGAUGCUCUg | 1991 | SpCas |
| SK9 | 659 | CATGGG | | UUUUAGagcuagaaauagcaxGUUaAa | | 9 |
| | | ATGCTCT | | AuAaggcuaGUccGUUAucAAcuugaaa | | |
| | | | | aagugGcaccgagucggugcusususu-3′ | | |
| mcPC | GA01 | CAGGTTC | 81 | 5′csasgGUUCCXUGGGAUGCUCUg | 1992 | SpCas |
| SK9 | 660 | CATGGG | | UUUUAGagcuagxaauagcaxGUUaAa | | 9 |
| | | ATGCTCT | | AuAaggcuaGUccGUUAucAAcuugaaa | | |
| | | | | aagugGcaccgagucggugcusususu-3′ | | |
| mcPC | GA01 | CAGGTTC | 81 | 5′csasgGUUCCXUGGGAUGCUCUg | 1993 | SpCas |
| SK9 | 661 | CATGGG | | UUUUAGagcuagxaauagcaaGUUaAa | | 9 |
| | | ATGCTCT | | AuAaggcuaGUccGUUAucAAcuugaaa | | |
| | | | | aagugGcaccgagucggugcusususu-3′ | | |
| mcPC | GA01 | CAGGTTC | 81 | 5′csasgGUUCCdXUGGGdXUGCUC | 1994 | SpCas |
| SK9 | 662 | CATGGG | | UgUUUUAGagcuagaaauagcaaGUUa | | 9 |
| | | ATGCTCT | | AaAuAaggcuaGUccGUUAucAAcuug | | |
| | | | | aaaaagugGcaccgagucggugcusususu-3′ | | |
| mcPC | GA01 | CAGGTTC | 81 | 5′csasgGUUCCdXUGGGAUGCUCU | 1995 | SpCas |
| SK9 | 663 | CATGGG | | gUUUUAGagcuagaaauagcaaGUUaAa | | 9 |
| | | ATGCTCT | | AuAaggcuaGUccGUUAucAAcuugaaa | | |
| | | | | aagugGcaccgagucggugcusususu-3′ | | |
| mcPC | GA01 | CAGGTTC | 81 | 5′csasgGUUCCAUGGGdXUGCUCU | 1996 | SpCas |
| SK9 | 664 | CATGGG | | gUUUUAGagcuagaaauagcaaGUUaAa | | 9 |
| | | ATGCTCT | | AuAaggcuaGUccGUUAucAAcuugaaa | | |
| | | | | aagugGcaccgagucggugcusususu-3′ | | |
| mcPC | GA01 | CAGGTTC | 81 | 5′csasgGUUCCAUGGGAUGCUCUg | 1997 | SpCas |
| SK9 | 665 | CATGGG | | UUUUAGagcuagdXaauagcaaGUUaA | | 9 |
| | | ATGCTCT | | aAuAaggcuaGUccGUUAucAAcuugaa | | |
| | | | | aaagugGcaccgagucggugcusususu-3′ | | |
| mcPC | GA01 | CAGGTTC | 81 | 5′csasgGUUCCAUGGGAUGCUCUg | 1998 | SpCas |
| SK9 | 666 | CATGGG | | UUUUAGagcuagdXaauagcaaGUUaA | | 9 |
| | | ATGCTCT | | aAuAaggcudXGUccGUUAucAAcuug | | |
| | | | | aaaaagugGcaccgagucggugcusususu-3′ | | |
| mcPC | GA01 | CAGGTTC | 81 | 5′csasgGUUCCAUGGGAUGCUCUg | 1999 | SpCas |
| SK9 | 667 | CATGGG | | UUUUAGagcuagaaauagcaaGUUaAaA | | 9 |
| | | ATGCTCT | | uAaggcudXGUccGUUAucAAcuugaaa | | |
| | | | | aagugGcaccgagucggugcusususu-3′ | | |
| mcPC | GA01 | CAGGTTC | 81 | 5′csasgGUUCCAUGGGAUGCUCUg | 2000 | SpCas |
| SK9 | 668 | CATGGG | | UUUUAGagcuagaaauagcaaGUUaAaA | | 9 |
| | | ATGCTCT | | uAaggcuaGUccGUUdXucAAcuugaaa | | |
| | | | | aagugGcaccgagucggugcusususu-3′ | | |
| mcPC | GA01 | CAGGTTC | 81 | 5′csasgGUUCCAUGGGAUGCUCUg | 2001 | SpCas |
| SK9 | 669 | CATGGG | | UUUUAGagcuagdXaauagcaaGUUaA | | 9 |
| | | ATGCTCT | | aAuAaggcudXGUccGUUdXucAAcuu | | |
| | | | | gaaaaagugGcaccgagucggugcusususu-3′ | | |
| mcPC | GA01 | CAGGTTC | 81 | 5′csasgGUUCCAUGGGAUGCUCUg | 2002 | SpCas |
| SK9 | 670 | CATGGG | | UUUUAGdXgcuagdXaauagcadXGUU | | 9 |
| | | ATGCTCT | | aAaAuAaggcudXGUccGUUdXucAAc | | |
| | | | | uugaaaaagugGcaccgagucggugcusususu | | |
| | | | | -3′ | | |
| mcPC | GA01 | CAGGTTC | 81 | 5′csasgsGUUCCXUGGGXUGCUCU | 2003 | SpCas |
| SK9 | 671 | CATGGG | | gUUUUAGagcuagaaauagcaaGUUaAa | | 9 |
| | | ATGCTCT | | AuAaggcuaGUccGUUAucAAcuugaaa | | |
| | | | | aagugGcaccgagucggugcuususu-3′ | | |
| mcPC | GA01 | CAGGTTC | 81 | 5′csasgsGUUCCXUGGGAUGCUCU | 2004 | SpCas |
| SK9 | 672 | CATGGG | | gUUUUAGagcuagaaauagcaaGUUaAa | | 9 |
| | | ATGCTCT | | AuAaggcuaGUccGUUAucAAcuugaaa | | |
| | | | | aagugGcaccgagucggugcuususu-3′ | | |
| mcPC | GA01 | CAGGTTC | 81 | 5′csasgsGUUCCAUGGGXUGCUCU | 2005 | SpCas |
| SK9 | 673 | CATGGG | | gUUUUAGagcuagaaauagcaaGUUaAa | | 9 |
| | | ATGCTCT | | AuAaggcuaGUccGUUAucAAcuugaaa | | |
| | | | | aagugGcaccgagucggugcuususu-3′ | | |
| mcPC | GA01 | CAGGTTC | 81 | 5′csasgsGUUCCAUGGGAUGCUCU | 2006 | SpCas |
| SK9 | 674 | CATGGG | | gUUUUAGagcuagXaauagcaaGUUaA | | 9 |
| | | ATGCTCT | | aAuAaggcuaGUccGUUAucAAcuugaa | | |
| | | | | aaagugGcaccgagucggugcuususu-3′ | | |
| mcPC | GA01 | CAGGTTC | 81 | 5′csasgsGUUCCAUGGGAUGCUCU | 2007 | SpCas |
| SK9 | 675 | CATGGG | | gUUUUAGagcuagXaauagcaaGUUaA | | 9 |
| | | ATGCTCT | | aAuAaggcuXGUccGUUAucAAcuuga | | |
| | | | | aaaagugGcaccgagucggugcuususu-3′ | | |
| mcPC | GA01 | CAGGTTC | 81 | 5′csasgsGUUCCAUGGGAUGCUCU | 2008 | SpCas |
| SK9 | 676 | CATGGG | | gUUUUAGagcuagaaauagcaaGUUaAa | | 9 |
| | | ATGCTCT | | AuAaggcuXGUccGUUAucAAcuugaa | | |
| | | | | aaagugGcaccgagucggugcuususu-3′ | | |
| mcPC | GA01 | CAGGTTC | 81 | 5′csasgsGUUCCAUGGGAUGCUCU | 2009 | SpCas |
| SK9 | 677 | CATGGG | | gUUUUAGagcuagaaauagcaaGUUaAa | | 9 |
| | | ATGCTCT | | AuAaggcuaGUccGUUXucAAcuugaaa | | |
| | | | | aagugGcaccgagucggugcuususu-3′ | | |
| mcPC | GA01 | CAGGTTC | 81 | 5′csasgsGUUCCAUGGGAUGCUCU | 2010 | SpCas |
| SK9 | 678 | CATGGG | | gUUUUAGagcuagXaauagcaaGUUaA | | 9 |
| | | ATGCTCT | | aAuAaggcuXGUccGUUXucAAcuuga | | |
| | | | | aaaagugGcaccgagucggugcuususu-3′ | | |
| mcPC | GA01 | CAGGTTC | 81 | 5′csasgsGUUCCAUGGGAUGCUCU | 2011 | SpCas |
| SK9 | 679 | CATGGG | | gUUUUAGXgcuagXaauagcaXGUUa | | 9 |
| | | ATGCTCT | | AaAuAaggcuXGUccGUUXucAAcuug | | |
| | | | | aaaaagugGcaccgagucggugcuususu-3′ | | |
| mcPC | GA01 | CAGGTTC | 81 | 5′csasgsGUUCCXUGGGXUGCUCU | 2012 | SpCas |
| SK9 | 680 | CATGGG | | gUUUUAGagcuagXaauagcaaGUUaA | | 9 |
| | | ATGCTCT | | aAuAaggcuaGUccGUUAucAAcuugaa | | |
| | | | | aaagugGcaccgagucggugcuususu-3′ | | |
| mcPC | GA01 | CAGGTTC | 81 | 5′csasgsGUUCCXUGGGXUGCUCU | 2013 | SpCas |
| SK9 | 681 | CATGGG | | gUUUUAGagcuagXaauagcaaGUUaA | | 9 |
| | | ATGCTCT | | aAuAaggcuXGUccGUUAucAAcuuga | | |
| | | | | aaaagugGcaccgagucggugcuususu-3′ | | |
| mcPC | GA01 | CAGGTTC | 81 | 5′csasgsGUUCCXUGGGXUGCUCU | 2014 | SpCas |
| SK9 | 682 | CATGGG | | gUUUUAGagcuagaaauagcaaGUUaAa | | 9 |
| | | ATGCTCT | | AuAaggcuaGUccGUUXucAAcuugaaa | | |
| | | | | aagugGcaccgagucggugcuususu-3′ | | |
| mcPC | GA01 | CAGGTTC | 81 | 5′csasgsGUUCCXUGGGXUGCUCU | 2015 | SpCas |
| SK9 | 683 | CATGGG | | gUUUUAGagcuagXaauagcaaGUUaA | | 9 |
| | | ATGCTCT | | aAuAaggcuXGUccGUUXucAAcuuga | | |
| | | | | aaaagugGcaccgagucggugcuususu-3′ | | |
| mcPC | GA01 | CAGGTTC | 81 | 5′csasgsGUUCCXUGGGXUGCUCU | 2016 | SpCas |
| SK9 | 684 | CATGGG | | gUUUUAGXgcuagXaauagcaXGUUa | | 9 |
| | | ATGCTCT | | AaAuAaggcuXGUccGUUXucAAcuug | | |
| | | | | aaaaagugGcaccgagucggugcuususu-3′ | | |
| mcPC | GA01 | CAGGTTC | 81 | 5′csasgsGUUCCAUGGGAUGCUCU | 2006 | SpCas |
| SK9 | 685 | CATGGG | | gUUUUAGagcuagXaauagcaaGUUaA | | 9 |
| | | ATGCTCT | | aAuAaggcuaGUccGUUAucAAcuugaa | | |
| | | | | aaagugGcaccgagucggugcuususu-3′ | | |
| mcPC | GA01 | CAGGTTC | 81 | 5′csasgsGUUCCXUGGGAUGCUCU | 2017 | SpCas |
| SK9 | 686 | CATGGG | | gUUUUAGagcuagXaauagcaaGUUaA | | 9 |
| | | ATGCTCT | | aAuAaggcuXGUccGUUAucAAcuuga | | |
| | | | | aaaagugGcaccgagucggugcuususu-3′ | | |
| mcPC | GA01 | CAGGTTC | 81 | 5′csasgsGUUCCXUGGGAUGCUCU | 2018 | SpCas |
| SK9 | 687 | CATGGG | | gUUUUAGagcuagaaauagcaaGUUaAa | | 9 |
| | | ATGCTCT | | AuAaggcuXGUccGUUAucAAcuugaa | | |
| | | | | aaagugGcaccgagucggugcuususu-3′ | | |
| mcPC | GA01 | CAGGTTC | 81 | 5′csasgsGUUCCXUGGGAUGCUCU | 2019 | SpCas |
| SK9 | 688 | CATGGG | | gUUUUAGagcuagaaauagcaaGUUaAa | | 9 |
| | | ATGCTCT | | AuAaggcuaGUccGUUXucAAcuugaaa | | |
| | | | | aagugGcaccgagucggugcuususu-3′ | | |
| mcPC | GA01 | CAGGTTC | 81 | 5′csasgsGUUCCXUGGGAUGCUCU | 2020 | SpCas |
| SK9 | 689 | CATGGG | | gUUUUAGagcuagXaauagcaaGUUaA | | 9 |
| | | ATGCTCT | | aAuAaggcuXGUccGUUXucAAcuuga | | |
| | | | | aaaagugGcaccgagucggugcuususu-3′ | | |
| mcPC | GA01 | CAGGTTC | 81 | 5′csasgsGUUCCXUGGGAUGCUCU | 2021 | SpCas |
| SK9 | 690 | CATGGG | | gUUUUAGXgcuagXaauagcaXGUUa | | 9 |
| | | ATGCTCT | | AaAuAaggcuXGUccGUUXucAAcuug | | |
| | | | | aaaaagugGcaccgagucggugcuususu-3′ | | |
| mcPC | GA01 | CAGGTTC | 81 | 5′csasgsGUUCCAUGGGXUGCUCU | 2022 | SpCas |
| SK9 | 691 | CATGGG | | gUUUUAGagcuagXaauagcaaGUUaA | | 9 |
| | | ATGCTCT | | aAuAaggcuaGUccGUUAucAAcuugaa | | |
| | | | | aaagugGcaccgagucggugcuususu-3′ | | |
| mcPC | GA01 | CAGGTTC | 81 | 5′csasgsGUUCCAUGGGXUGCUCU | 2023 | SpCas |
| SK9 | 692 | CATGGG | | gUUUUAGagcuagXaauagcaaGUUaA | | 9 |
| | | ATGCTCT | | aAuAaggcuXGUccGUUAucAAcuuga | | |
| | | | | aaaagugGcaccgagucggugcuususu-3′ | | |
| mcPC | GA01 | CAGGTTC | 81 | 5′csasgsGUUCCAUGGGXUGCUCU | 2024 | SpCas |
| SK9 | 693 | CATGGG | | gUUUUAGagcuagaaauagcaaGUUaAa | | 9 |
| | | ATGCTCT | | AuAaggcuXGUccGUUAucAAcuugaa | | |
| | | | | aaagugGcaccgagucggugcuususu-3′ | | |
| mcPC | GA01 | CAGGTTC | 81 | 5′csasgsGUUCCAUGGGXUGCUCU | 2025 | SpCas |
| SK9 | 694 | CATGGG | | gUUUUAGagcuagaaauagcaaGUUaAa | | 9 |
| | | ATGCTCT | | AuAaggcuaGUccGUUXucAAcuugaaa | | |
| | | | | aagugGcaccgagucggugcuususu-3′ | | |
| mcPC | GA01 | CAGGTTC | 81 | 5′csasgsGUUCCAUGGGXUGCUCU | 2026 | SpCas |
| SK9 | 695 | CATGGG | | gUUUUAGagcuagXaauagcaaGUUaA | | 9 |
| | | ATGCTCT | | aAuAaggcuXGUccGUUXucAAcuuga | | |
| | | | | aaaagugGcaccgagucggugcuususu-3′ | | |
| mcPC | GA01 | CAGGTTC | 81 | 5′csasgsGUUCCAUGGGXUGCUCU | 2027 | SpCas |
| SK9 | 696 | CATGGG | | gUUUUAGXgcuagXaauagcaXGUUa | | 9 |
| | | ATGCTCT | | AaAuAaggcuXGUccGUUXucAAcuug | | |
| | | | | aaaaagugGcaccgagucggugcuususu-3′ | | |
| mcPC | GA01 | CAGGTTC | 81 | 5′csasgsGUUCCXUGGGXUGCUCU | 2028 | SpCas |
| SK9 | 697 | CATGGG | | gUUUUAGxgcuagxaauagcaxGUUaAa | | 9 |
| | | ATGCTCT | | AuAaggcuxGUccGUUAucAAcuugaaa | | |
| | | | | aagugGcaccgagucggugcuususu-3′ | | |
| mcPC | GA01 | CAGGTTC | 81 | 5′csasgsGUUCCXUGGGXUGCUCU | 2029 | SpCas |
| SK9 | 698 | CATGGG | | gUUUUAGagcuagxaauagcaxGUUaAa | | 9 |
| | | ATGCTCT | | AuAaggcuxGUccGUUAucAAcuugaaa | | |
| | | | | aagugGcaccgagucggugcuususu-3′ | | |
| mcPC | GA01 | CAGGTTC | 81 | 5′csasgsGUUCCXUGGGXUGCUCU | 2030 | SpCas |
| SK9 | 699 | CATGGG | | gUUUUAGagcuagaaauagcaxGUUaAa | | 9 |
| | | ATGCTCT | | AuAaggcuxGUccGUUAucAAcuugaaa | | |
| | | | | aagugGcaccgagucggugcuususu-3′ | | |
| mcPC | GA01 | CAGGTTC | 81 | 5′csasgsGUUCCXUGGGXUGCUCU | 2031 | SpCas |
| SK9 | 700 | CATGGG | | gUUUUAGagcuagaaauagcaaGUUaAa | | 9 |
| | | ATGCTCT | | AuAaggcuxGUccGUUAucAAcuugaaa | | |
| | | | | aagugGcaccgagucggugcuususu-3′ | | |
| mcPC | GA01 | CAGGTTC | 81 | 5′csasgsGUUCCXUGGGXUGCUCU | 2032 | SpCas |
| SK9 | 701 | CATGGG | | gUUUUAGxgcuagaaauagcaaGUUaAa | | 9 |
| | | ATGCTCT | | AuAaggcuaGUccGUUAucAAcuugaaa | | |
| | | | | aagugGcaccgagucggugcuususu-3′ | | |
| mcPC | GA01 | CAGGTTC | 81 | 5′csasgsGUUCCXUGGGXUGCUCU | 2033 | SpCas |
| SK9 | 702 | CATGGG | | gUUUUAGagcuagaaauagcaxGUUaAa | | 9 |
| | | ATGCTCT | | AuAaggcuaGUccGUUAucAAcuugaaa | | |
| | | | | aagugGcaccgagucggugcuususu-3′ | | |
| mcPC | GA01 | CAGGTTC | 81 | 5′csasgsGUUCCXUGGGXUGCUCU | 2034 | SpCas |
| SK9 | 703 | CATGGG | | gUUUUAGagcuagxaauagcaxGUUaAa | | 9 |
| | | ATGCTCT | | AuAaggcuaGUccGUUAucAAcuugaaa | | |
| | | | | aagugGcaccgagucggugcuususu-3′ | | |
| mcPC | GA01 | CAGGTTC | 81 | 5′csasgsGUUCCXUGGGXUGCUCU | 3116 | SpCas |
| SK9 | 704 | CATGGG | | gUUUUAGagcuagxaauagcaaGUUaAa | | 9 |
| | | ATGCTCT | | AuAaggcuaGUccGUUAucAAcuugaaa | | |
| | | | | aagugGcaccgagucggugcuususu-3′ | | |
| mcPC | GA01 | CAGGTTC | 81 | 5′csasgsGUUCCAUGGGXUGCUCU | 2035 | SpCas |
| SK9 | 705 | CATGGG | | gUUUUAGxgcuagxaauagcaxGUUaAa | | 9 |
| | | ATGCTCT | | AuAaggcuxGUccGUUAucAAcuugaaa | | |
| | | | | aagugGcaccgagucggugcuususu-3′ | | |
| mcPC | GA01 | CAGGTTC | 81 | 5′csasgsGUUCCAUGGGXUGCUCU | 2036 | SpCas |
| SK9 | 706 | CATGGG | | gUUUUAGagcuagxaauagcaxGUUaAa | | 9 |
| | | ATGCTCT | | AuAaggcuxGUccGUUAucAAcuugaaa | | |
| | | | | aagugGcaccgagucggugcuususu-3′ | | |
| mcPC | GA01 | CAGGTTC | 81 | 5′csasgsGUUCCAUGGGXUGCUCU | 2037 | SpCas |
| SK9 | 707 | CATGGG | | gUUUUAGagcuagaaauagcaxGUUaAa | | 9 |
| | | ATGCTCT | | AuAaggcuxGUccGUUAucAAcuugaaa | | |
| | | | | aagugGcaccgagucggugcuususu-3′ | | |
| mcPC | GA01 | CAGGTTC | 81 | 5′csasgsGUUCCAUGGGXUGCUCU | 3117 | SpCas |
| SK9 | 708 | CATGGG | | gUUUUAGagcuagaaauagcaaGUUaAa | | 9 |
| | | ATGCTCT | | AuAaggcuxGUccGUUAucAAcuugaaa | | |
| | | | | aagugGcaccgagucggugcuususu-3′ | | |
| mcPC | GA01 | CAGGTTC | 81 | 5′csasgsGUUCCAUGGGXUGCUCU | 2038 | SpCas |
| SK9 | 709 | CATGGG | | gUUUUAGxgcuagaaauagcaaGUUaAa | | 9 |
| | | ATGCTCT | | AuAaggcuaGUccGUUAucAAcuugaaa | | |
| | | | | aagugGcaccgagucggugcuususu-3′ | | |
| mcPC | GA01 | CAGGTTC | 81 | 5′csasgsGUUCCAUGGGXUGCUCU | 2039 | SpCas |
| SK9 | 710 | CATGGG | | gUUUUAGagcuagaaauagcaxGUUaAa | | 9 |
| | | ATGCTCT | | AuAaggcuaGUccGUUAucAAcuugaaa | | |
| | | | | aagugGcaccgagucggugcuususu-3′ | | |
| mcPC | GA01 | CAGGTTC | 81 | 5′csasgsGUUCCAUGGGXUGCUCU | 2040 | SpCas |
| SK9 | 711 | CATGGG | | gUUUUAGagcuagxaauagcaxGUUaAa | | 9 |
| | | ATGCTCT | | AuAaggcuaGUccGUUAucAAcuugaaa | | |
| | | | | aagugGcaccgagucggugcuususu-3′ | | |
| mcPC | GA01 | CAGGTTC | 81 | 5′csasgsGUUCCAUGGGXUGCUCU | 3118 | SpCas |
| SK9 | 712 | CATGGG | | gUUUUAGagcuagxaauagcaaGUUaAa | | 9 |
| | | ATGCTCT | | AuAaggcuaGUccGUUAucAAcuugaaa | | |
| | | | | aagugGcaccgagucggugcuususu-3′ | | |
| mcPC | GA01 | CAGGTTC | 81 | 5′csasgsGUUCCXUGGGAUGCUCU | 2041 | SpCas |
| SK9 | 713 | CATGGG | | gUUUUAGxgcuagxaauagcaxGUUaAa | | 9 |
| | | ATGCTCT | | AuAaggcuxGUccGUUAucAAcuugaaa | | |
| | | | | aagugGcaccgagucggugcuususu-3′ | | |
| mcPC | GA01 | CAGGTTC | 81 | 5′csasgsGUUCCXUGGGAUGCUCU | 2042 | SpCas |
| SK9 | 714 | CATGGG | | gUUUUAGagcuagxaauagcaxGUUaAa | | 9 |
| | | ATGCTCT | | AuAaggcuxGUccGUUAucAAcuugaaa | | |
| | | | | aagugGcaccgagucggugcuususu-3′ | | |
| mcPC | GA01 | CAGGTTC | 81 | 5′csasgsGUUCCXUGGGAUGCUCU | 2043 | SpCas |
| SK9 | 715 | CATGGG | | gUUUUAGagcuagaaauagcaxGUUaAa | | 9 |
| | | ATGCTCT | | AuAaggcuxGUccGUUAucAAcuugaaa | | |
| | | | | aagugGcaccgagucggugcuususu-3′ | | |
| mcPC | GA01 | CAGGTTC | 81 | 5′csasgsGUUCCXUGGGAUGCUCU | 3119 | SpCas |
| SK9 | 716 | CATGGG | | gUUUUAGagcuagaaauagcaaGUUaAa | | 9 |
| | | ATGCTCT | | AuAaggcuxGUccGUUAucAAcuugaaa | | |
| | | | | aagugGcaccgagucggugcuususu-3′ | | |
| mcPC | GA01 | CAGGTTC | 81 | 5′csasgsGUUCCXUGGGAUGCUCU | 2044 | SpCas |
| SK9 | 717 | CATGGG | | gUUUUAGxgcuagaaauagcaaGUUaAa | | 9 |
| | | ATGCTCT | | AuAaggcuaGUccGUUAucAAcuugaaa | | |
| | | | | aagugGcaccgagucggugcuususu-3′ | | |
| mcPC | GA01 | CAGGTTC | 81 | 5′csasgsGUUCCXUGGGAUGCUCU | 2045 | SpCas |
| SK9 | 718 | CATGGG | | gUUUUAGagcuagaaauagcaxGUUaAa | | 9 |
| | | ATGCTCT | | AuAaggcuaGUccGUUAucAAcuugaaa | | |
| | | | | aagugGcaccgagucggugcuususu-3′ | | |
| mcPC | GA01 | CAGGTTC | 81 | 5′csasgsGUUCCXUGGGAUGCUCU | 2046 | SpCas |
| SK9 | 719 | CATGGG | | gUUUUAGagcuagxaauagcaxGUUaAa | | 9 |
| | | ATGCTCT | | AuAaggcuaGUccGUUAucAAcuugaaa | | |
| | | | | aagugGcaccgagucggugcuususu-3′ | | |
| mcPC | GA01 | CAGGTTC | 81 | 5′csasgsGUUCCXUGGGAUGCUCU | 2047 | SpCas |
| SK9 | 720 | CATGGG | | gUUUUAGagcuagxaauagcaaGUUaAa | | 9 |
| | | ATGCTCT | | AuAaggcuaGUccGUUAucAAcuugaaa | | |
| | | | | aagugGcaccgagucggugcuususu-3′ | | |
| mcPC | GA01 | CAGGTTC | 81 | 5′csasgsGUUCCdXUGGGdXUGCUC | 2048 | SpCas |
| SK9 | 721 | CATGGG | | UgUUUUAGagcuagaaauagcaaGUUa | | 9 |
| | | ATGCTCT | | AaAuAaggcuaGUccGUUAucAAcuug | | |
| | | | | aaaaagugGcaccgagucggugcuususu-3′ | | |
| mcPC | GA01 | CAGGTTC | 81 | 5′csasgsGUUCCdXUGGGAUGCUC | 2049 | SpCas |
| SK9 | 722 | CATGGG | | UgUUUUAGagcuagaaauagcaaGUUa | | 9 |
| | | ATGCTCT | | AaAuAaggcuaGUccGUUAucAAcuug | | |
| | | | | aaaaagugGcaccgagucggugcuususu-3′ | | |
| mcPC | GA01 | CAGGTTC | 81 | 5′csasgsGUUCCAUGGGdXUGCUC | 2050 | SpCas |
| SK9 | 723 | CATGGG | | UgUUUUAGagcuagaaauagcaaGUUa | | 9 |
| | | ATGCTCT | | AaAuAaggcuaGUccGUUAucAAcuug | | |
| | | | | aaaaagugGcaccgagucggugcuususu-3′ | | |
| mcPC | GA01 | CAGGTTC | 81 | 5′csasgsGUUCCAUGGGAUGCUCU | 2051 | SpCas |
| SK9 | 724 | CATGGG | | gUUUUAGagcuagdXaauagcaaGUUa | | 9 |
| | | ATGCTCT | | AaAuAaggcuaGUccGUUAucAAcuug | | |
| | | | | aaaaagugGcaccgagucggugcuususu-3′ | | |
| mcPC | GA01 | CAGGTTC | 81 | 5′csasgsGUUCCAUGGGAUGCUCU | 2052 | SpCas |
| SK9 | 725 | CATGGG | | gUUUUAGagcuagdXaauagcaaGUUa | | 9 |
| | | ATGCTCT | | AaAuAaggcudXGUccGUUAucAAcuu | | |
| | | | | gaaaaagugGcaccgagucggugcuususu-3′ | | |
| mcPC | GA01 | CAGGTTC | 81 | 5′csasgsGUUCCAUGGGAUGCUCU | 2053 | SpCas |
| SK9 | 726 | CATGGG | | gUUUUAGagcuagaaauagcaaGUUaAa | | 9 |
| | | ATGCTCT | | AuAaggcudXGUccGUUAucAAcuuga | | |
| | | | | aaaagugGcaccgagucggugcuususu-3′ | | |
| mcPC | GA01 | CAGGTTC | 81 | 5′csasgsGUUCCAUGGGAUGCUCU | 2054 | SpCas |
| SK9 | 727 | CATGGG | | gUUUUAGagcuagaaauagcaaGUUaAa | | 9 |
| | | ATGCTCT | | AuAaggcuaGUccGUUdXucAAcuugaa | | |
| | | | | aaagugGcaccgagucggugcuususu-3′ | | |
| mcPC | GA01 | CAGGTTC | 81 | 5′csasgsGUUCCAUGGGAUGCUCU | 2055 | SpCas |
| SK9 | 728 | CATGGG | | gUUUUAGagcuagdXaauagcaaGUUa | | 9 |
| | | ATGCTCT | | AaAuAaggcudXGUccGUUdXucAAcu | | |
| | | | | ugaaaaagugGcaccgagucggugcuususu- | | |
| | | | | 3′ | | |
| mcPC | GA01 | CAGGTTC | 81 | 5′csasgsGUUCCAUGGGAUGCUCU | 2056 | SpCas |
| SK9 | 729 | CATGGG | | gUUUUAGdXgcuagdXaauagcadXGU | | 9 |
| | | ATGCTCT | | UaAaAuAaggcudXGUccGUUdXucA | | |
| | | | | AcuugaaaaagugGcaccgagucggugcuusu | | |
| | | | | su-3′ | | |
| mcPC | GA01 | CAGGTTC | 81 | 5′csasgGUUCCXUGGGXUGCUCUg | 2057 | SpCas |
| SK9 | 730 | CATGGG | | UUUUAGagcuagaaauagcaaGUUaAaA | | 9 |
| | | ATGCTCT | | uAaggcuaGUccGUUAucAAcuugaaaa | | |
| | | | | agugGcaccgagucggugcuususu-3′ | | |
| mcPC | GA01 | CAGGTTC | 81 | 5′csasgGUUCCXUGGGAUGCUCUg | 2058 | SpCas |
| SK9 | 731 | CATGGG | | UUUUAGagcuagaaauagcaaGUUaAaA | | 9 |
| | | ATGCTCT | | uAaggcuaGUccGUUAucAAcuugaaaa | | |
| | | | | agugGcaccgagucggugcuususu-3′ | | |
| mcPC | GA01 | CAGGTTC | 81 | 5′csasgGUUCCAUGGGXUGCUCUg | 2059 | SpCas |
| SK9 | 732 | CATGGG | | UUUUAGagcuagaaauagcaaGUUaAaA | | 9 |
| | | ATGCTCT | | uAaggcuaGUccGUUAucAAcuugaaaa | | |
| | | | | agugGcaccgagucggugcuususu-3′ | | |
| mcPC | GA01 | CAGGTTC | 81 | 5′csasgGUUCCAUGGGAUGCUCUg | 2060 | SpCas |
| SK9 | 733 | CATGGG | | UUUUAGagcuagXaauagcaaGUUaAa | | 9 |
| | | ATGCTCT | | AuAaggcuaGUccGUUAucAAcuugaaa | | |
| | | | | aagugGcaccgagucggugcuususu-3′ | | |
| mcPC | GA01 | CAGGTTC | 81 | 5′csasgGUUCCAUGGGAUGCUCUg | 2061 | SpCas |
| SK9 | 734 | CATGGG | | UUUUAGagcuagXaauagcaaGUUaAa | | 9 |
| | | ATGCTCT | | AuAaggcuXGUccGUUAucAAcuugaa | | |
| | | | | aaagugGcaccgagucggugcuususu-3′ | | |
| mcPC | GA01 | CAGGTTC | 81 | 5′csasgGUUCCAUGGGAUGCUCUg | 2062 | SpCas |
| SK9 | 735 | CATGGG | | UUUUAGagcuagaaauagcaaGUUaAaA | | 9 |
| | | ATGCTCT | | uAaggcuXGUccGUUAucAAcuugaaaa | | |
| | | | | agugGcaccgagucggugcuususu-3′ | | |
| mcPC | GA01 | CAGGTTC | 81 | 5′csasgGUUCCAUGGGAUGCUCUg | 2063 | SpCas |
| SK9 | 736 | CATGGG | | UUUUAGagcuagaaauagcaaGUUaAaA | | 9 |
| | | ATGCTCT | | uAaggcuaGUccGUUXucAAcuugaaaa | | |
| | | | | agugGcaccgagucggugcuususu-3′ | | |
| mcPC | GA01 | CAGGTTC | 81 | 5′csasgGUUCCAUGGGAUGCUCUg | 2064 | SpCas |
| SK9 | 737 | CATGGG | | UUUUAGagcuagXaauagcaaGUUaAa | | 9 |
| | | ATGCTCT | | AuAaggcuXGUccGUUXucAAcuugaa | | |
| | | | | aaagugGcaccgagucggugcuususu-3′ | | |
| mcPC | GA01 | CAGGTTC | 81 | 5′csasgGUUCCAUGGGAUGCUCUg | 2065 | SpCas |
| SK9 | 738 | CATGGG | | UUUUAGXgcuagXaauagcaXGUUaA | | 9 |
| | | ATGCTCT | | aAuAaggcuXGUccGUUXucAAcuuga | | |
| | | | | aaaagugGcaccgagucggugcuususu-3′ | | |
| mcPC | GA01 | CAGGTTC | 81 | 5′csasgGUUCCXUGGGXUGCUCUg | 2066 | SpCas |
| SK9 | 739 | CATGGG | | UUUUAGagcuagXaauagcaaGUUaAa | | 9 |
| | | ATGCTCT | | AuAaggcuaGUccGUUAucAAcuugaaa | | |
| | | | | aagugGcaccgagucggugcuususu-3′ | | |
| mcPC | GA01 | CAGGTTC | 81 | 5′csasgGUUCCXUGGGXUGCUCUg | 2067 | SpCas |
| SK9 | 740 | CATGGG | | UUUUAGagcuagXaauagcaaGUUaAa | | 9 |
| | | ATGCTCT | | AuAaggcuXGUccGUUAucAAcuugaa | | |
| | | | | aaagugGcaccgagucggugcuususu-3′ | | |
| mcPC | GA01 | CAGGTTC | 81 | 5′csasgGUUCCXUGGGXUGCUCUg | 2068 | SpCas |
| SK9 | 741 | CATGGG | | UUUUAGagcuagaaauagcaaGUUaAaA | | 9 |
| | | ATGCTCT | | uAaggcuaGUccGUUXucAAcuugaaaa | | |
| | | | | agugGcaccgagucggugcuususu-3′ | | |
| mcPC | GA01 | CAGGTTC | 81 | 5′csasgGUUCCXUGGGXUGCUCUg | 2069 | SpCas |
| SK9 | 742 | CATGGG | | UUUUAGagcuagXaauagcaaGUUaAa | | 9 |
| | | ATGCTCT | | AuAaggcuXGUccGUUXucAAcuugaa | | |
| | | | | aaagugGcaccgagucggugcuususu-3′ | | |
| mcPC | GA01 | CAGGTTC | 81 | 5′csasgGUUCCXUGGGXUGCUCUg | 2070 | SpCas |
| SK9 | 743 | CATGGG | | UUUUAGXgcuagXaauagcaXGUUaA | | 9 |
| | | ATGCTCT | | aAuAaggcuXGUccGUUXucAAcuuga | | |
| | | | | aaaagugGcaccgagucggugcuususu-3′ | | |
| mcPC | GA01 | CAGGTTC | 81 | 5′csasgGUUCCAUGGGAUGCUCUg | 2060 | SpCas |
| SK9 | 744 | CATGGG | | UUUUAGagcuagXaauagcaaGUUaAa | | 9 |
| | | ATGCTCT | | AuAaggcuaGUccGUUAucAAcuugaaa | | |
| | | | | aagugGcaccgagucggugcuususu-3′ | | |
| mcPC | GA01 | CAGGTTC | 81 | 5′csasgGUUCCXUGGGAUGCUCUg | 2071 | SpCas |
| SK9 | 745 | CATGGG | | UUUUAGagcuagXaauagcaaGUUaAa | | 9 |
| | | ATGCTCT | | AuAaggcuXGUccGUUAucAAcuugaa | | |
| | | | | aaagugGcaccgagucggugcuususu-3′ | | |
| mcPC | GA01 | CAGGTTC | 81 | 5′csasgGUUCCXUGGGAUGCUCUg | 2072 | SpCas |
| SK9 | 746 | CATGGG | | UUUUAGagcuagaaauagcaaGUUaAaA | | 9 |
| | | ATGCTCT | | uAaggcuXGUccGUUAucAAcuugaaaa | | |
| | | | | agugGcaccgagucggugcuususu-3′ | | |
| mcPC | GA01 | CAGGTTC | 81 | 5′csasgGUUCCXUGGGAUGCUCUg | 2073 | SpCas |
| SK9 | 747 | CATGGG | | UUUUAGagcuagaaauagcaaGUUaAaA | | 9 |
| | | ATGCTCT | | uAaggcuaGUccGUUXucAAcuugaaaa | | |
| | | | | agugGcaccgagucggugcuususu-3′ | | |
| mcPC | GA01 | CAGGTTC | 81 | 5′csasgGUUCCXUGGGAUGCUCUg | 2074 | SpCas |
| SK9 | 748 | CATGGG | | UUUUAGagcuagXaauagcaaGUUaAa | | 9 |
| | | ATGCTCT | | AuAaggcuXGUccGUUXucAAcuugaa | | |
| | | | | aaagugGcaccgagucggugcuususu-3′ | | |
| mcPC | GA01 | CAGGTTC | 81 | 5′csasgGUUCCXUGGGAUGCUCUg | 2075 | SpCas |
| SK9 | 749 | CATGGG | | UUUUAGXgcuagXaauagcaXGUUaA | | 9 |
| | | ATGCTCT | | aAuAaggcuXGUccGUUXucAAcuuga | | |
| | | | | aaaagugGcaccgagucggugcuususu-3′ | | |
| mcPC | GA01 | CAGGTTC | 81 | 5′csasgGUUCCAUGGGXUGCUCUg | 2076 | SpCas |
| SK9 | 750 | CATGGG | | UUUUAGagcuagXaauagcaaGUUaAa | | 9 |
| | | ATGCTCT | | AuAaggcuaGUccGUUAucAAcuugaaa | | |
| | | | | aagugGcaccgagucggugcuususu-3′ | | |
| mcPC | GA01 | CAGGTTC | 81 | 5′csasgGUUCCAUGGGXUGCUCUg | 2077 | SpCas |
| SK9 | 751 | CATGGG | | UUUUAGagcuagXaauagcaaGUUaAa | | 9 |
| | | ATGCTCT | | AuAaggcuXGUccGUUAucAAcuugaa | | |
| | | | | aaagugGcaccgagucggugcuususu-3′ | | |
| mcPC | GA01 | CAGGTTC | 81 | 5′csasgGUUCCAUGGGXUGCUCUg | 2078 | SpCas |
| SK9 | 752 | CATGGG | | UUUUAGagcuagaaauagcaaGUUaAaA | | 9 |
| | | ATGCTCT | | uAaggcuXGUccGUUAucAAcuugaaaa | | |
| | | | | agugGcaccgagucggugcuususu-3′ | | |
| mcPC | GA01 | CAGGTTC | 81 | 5′csasgGUUCCAUGGGXUGCUCUg | 2079 | SpCas |
| SK9 | 753 | CATGGG | | UUUUAGagcuagaaauagcaaGUUaAaA | | 9 |
| | | ATGCTCT | | uAaggcuaGUccGUUXucAAcuugaaaa | | |
| | | | | agugGcaccgagucggugcuususu-3′ | | |
| mcPC | GA01 | CAGGTTC | 81 | 5′csasgGUUCCAUGGGXUGCUCUg | 2080 | SpCas |
| SK9 | 754 | CATGGG | | UUUUAGagcuagXaauagcaaGUUaAa | | 9 |
| | | ATGCTCT | | AuAaggcuXGUccGUUXucAAcuugaa | | |
| | | | | aaagugGcaccgagucggugcuususu-3′ | | |
| mcPC | GA01 | CAGGTTC | 81 | 5′csasgGUUCCAUGGGXUGCUCUg | 2081 | SpCas |
| SK9 | 755 | CATGGG | | UUUUAGXgcuagXaauagcaXGUUaA | | 9 |
| | | ATGCTCT | | aAuAaggcuXGUccGUUXucAAcuuga | | |
| | | | | aaaagugGcaccgagucggugcuususu-3′ | | |
| mcPC | GA01 | CAGGTTC | 81 | 5′csasgGUUCCXUGGGXUGCUCUg | 2082 | SpCas |
| SK9 | 756 | CATGGG | | UUUUAGxgcuagxaauagcaxGUUaAa | | 9 |
| | | ATGCTCT | | AuAaggcuxGUccGUUAucAAcuugaaa | | |
| | | | | aagugGcaccgagucggugcuususu-3′ | | |
| mcPC | GA01 | CAGGTTC | 81 | 5′csasgGUUCCXUGGGXUGCUCUg | 2083 | SpCas |
| SK9 | 757 | CATGGG | | UUUUAGagcuagxaauagcaxGUUaAa | | 9 |
| | | ATGCTCT | | AuAaggcuxGUccGUUAucAAcuugaaa | | |
| | | | | aagugGcaccgagucggugcuususu-3′ | | |
| mcPC | GA01 | CAGGTTC | 81 | 5′csasgGUUCCXUGGGXUGCUCUg | 2084 | SpCas |
| SK9 | 758 | CATGGG | | UUUUAGagcuagaaauagcaxGUUaAa | | 9 |
| | | ATGCTCT | | AuAaggcuxGUccGUUAucAAcuugaaa | | |
| | | | | aagugGcaccgagucggugcuususu-3′ | | |
| mcPC | GA01 | CAGGTTC | 81 | 5′csasgGUUCCXUGGGXUGCUCUg | 2085 | SpCas |
| SK9 | 759 | CATGGG | | UUUUAGagcuagaaauagcaaGUUaAaA | | 9 |
| | | ATGCTCT | | uAaggcuxGUccGUUAucAAcuugaaaa | | |
| | | | | agugGcaccgagucggugcuususu-3′ | | |
| mcPC | GA01 | CAGGTTC | 81 | 5′csasgGUUCCXUGGGXUGCUCUg | 2086 | SpCas |
| SK9 | 760 | CATGGG | | UUUUAGxgcuagaaauagcaaGUUaAa | | 9 |
| | | ATGCTCT | | AuAaggcuaGUccGUUAucAAcuugaaa | | |
| | | | | aagugGcaccgagucggugcuususu-3′ | | |
| mcPC | GA01 | CAGGTTC | 81 | 5′csasgGUUCCXUGGGXUGCUCUg | 1980 | SpCas |
| SK9 | 761 | CATGGG | | UUUUAGagcuagaaauagcaxGUUaAa | | 9 |
| | | ATGCTCT | | AuAaggcuaGUccGUUAucAAcuugaaa | | |
| | | | | aagugGcaccgagucggugcusususu-3′ | | |
| mcPC | GA01 | CAGGTTC | 81 | 5′csasgGUUCCXUGGGXUGCUCUg | 2087 | SpCas |
| SK9 | 762 | CATGGG | | UUUUAGagcuagxaauagcaxGUUaAa | | 9 |
| | | ATGCTCT | | AuAaggcuaGUccGUUAucAAcuugaaa | | |
| | | | | aagugGcaccgagucggugcuususu-3′ | | |
| mcPC | GA01 | CAGGTTC | 81 | 5′csasgGUUCCXUGGGXUGCUCUg | 3120 | SpCas |
| SK9 | 763 | CATGGG | | UUUUAGagcuagxaauagcaaGUUaAa | | 9 |
| | | ATGCTCT | | AuAaggcuaGUccGUUAucAAcuugaaa | | |
| | | | | aagugGcaccgagucggugcuususu-3′ | | |
| mcPC | GA01 | CAGGTTC | 81 | 5′csasgGUUCCAUGGGXUGCUCUg | 2088 | SpCas |
| SK9 | 764 | CATGGG | | UUUUAGxgcuagxaauagcaxGUUaAa | | 9 |
| | | ATGCTCT | | AuAaggcuxGUccGUUAucAAcuugaaa | | |
| | | | | aagugGcaccgagucggugcuususu-3′ | | |
| mcPC | GA01 | CAGGTTC | 81 | 5′csasgsGUUCCAUGGGXUGCUCU | 2036 | SpCas |
| SK9 | 765 | CATGGG | | gUUUUAGagcuagxaauagcaxGUUaAa | | 9 |
| | | ATGCTCT | | AuAaggcuxGUccGUUAucAAcuugaaa | | |
| | | | | aagugGcaccgagucggugcuususu-3′ | | |
| mcPC | GA01 | CAGGTTC | 81 | 5′csasgGUUCCAUGGGXUGCUCUg | 2089 | SpCas |
| SK9 | 766 | CATGGG | | UUUUAGagcuagaaauagcaxGUUaAa | | 9 |
| | | ATGCTCT | | AuAaggcuxGUccGUUAucAAcuugaaa | | |
| | | | | aagugGcaccgagucggugcuususu-3′ | | |
| mcPC | GA01 | CAGGTTC | 81 | 5′csasgGUUCCAUGGGXUGCUCUg | 3121 | SpCas |
| SK9 | 767 | CATGGG | | UUUUAGagcuagaaauagcaaGUUaAaA | | 9 |
| | | ATGCTCT | | uAaggcuxGUccGUUAucAAcuugaaaa | | |
| | | | | agugGcaccgagucggugcuususu-3′ | | |
| mcPC | GA01 | CAGGTTC | 81 | 5′csasgGUUCCAUGGGXUGCUCUg | 2090 | SpCas |
| SK9 | 768 | CATGGG | | UUUUAGxgcuagaaauagcaaGUUaAa | | 9 |
| | | ATGCTCT | | AuAaggcuaGUccGUUAucAAcuugaaa | | |
| | | | | aagugGcaccgagucggugcuususu-3′ | | |
| mcPC | GA01 | CAGGTTC | 81 | 5′csasgGUUCCAUGGGXUGCUCUg | 2091 | SpCas |
| SK9 | 769 | CATGGG | | UUUUAGagcuagaaauagcaxGUUaAa | | 9 |
| | | ATGCTCT | | AuAaggcuaGUccGUUAucAAcuugaaa | | |
| | | | | aagugGcaccgagucggugcuususu-3′ | | |
| mcPC | GA01 | CAGGTTC | 81 | 5′csasgGUUCCAUGGGXUGCUCUg | 2092 | SpCas |
| SK9 | 770 | CATGGG | | UUUUAGagcuagxaauagcaxGUUaAa | | 9 |
| | | ATGCTCT | | AuAaggcuaGUccGUUAucAAcuugaaa | | |
| | | | | aagugGcaccgagucggugcuususu-3′ | | |
| mcPC | GA01 | CAGGTTC | 81 | 5′csasgGUUCCAUGGGXUGCUCUg | 3122 | SpCas |
| SK9 | 771 | CATGGG | | UUUUAGagcuagxaauagcaaGUUaAa | | 9 |
| | | ATGCTCT | | AuAaggcuaGUccGUUAucAAcuugaaa | | |
| | | | | aagugGcaccgagucggugcuususu-3′ | | |
| mcPC | GA01 | CAGGTTC | 81 | 5′csasgGUUCCXUGGGAUGCUCUg | 2093 | SpCas |
| SK9 | 772 | CATGGG | | UUUUAGxgcuagxaauagcaxGUUaAa | | 9 |
| | | ATGCTCT | | AuAaggcuxGUccGUUAucAAcuugaaa | | |
| | | | | aagugGcaccgagucggugcuususu-3′ | | |
| mcPC | GA01 | CAGGTTC | 81 | 5′csasgGUUCCXUGGGAUGCUCUg | 2094 | SpCas |
| SK9 | 773 | CATGGG | | UUUUAGagcuagxaauagcaxGUUaAa | | 9 |
| | | ATGCTCT | | AuAaggcuxGUccGUUAucAAcuugaaa | | |
| | | | | aagugGcaccgagucggugcuususu-3′ | | |
| mcPC | GA01 | CAGGTTC | 81 | 5′csasgGUUCCXUGGGAUGCUCUg | 2095 | SpCas |
| SK9 | 774 | CATGGG | | UUUUAGagcuagaaauagcaxGUUaAa | | 9 |
| | | ATGCTCT | | AuAaggcuxGUccGUUAucAAcuugaaa | | |
| | | | | aagugGcaccgagucggugcuususu-3′ | | |
| mcPC | GA01 | CAGGTTC | 81 | 5′csasgGUUCCXUGGGAUGCUCUg | 3123 | SpCas |
| SK9 | 775 | CATGGG | | UUUUAGagcuagaaauagcaaGUUaAaA | | 9 |
| | | ATGCTCT | | uAaggcuxGUccGUUAucAAcuugaaaa | | |
| | | | | agugGcaccgagucggugcuususu-3′ | | |
| mcPC | GA01 | CAGGTTC | 81 | 5′csasgGUUCCXUGGGAUGCUCUg | 2096 | SpCas |
| SK9 | 776 | CATGGG | | UUUUAGxgcuagaaauagcaaGUUaAa | | 9 |
| | | ATGCTCT | | AuAaggcuaGUccGUUAucAAcuugaaa | | |
| | | | | aagugGcaccgagucggugcuususu-3′ | | |
| mcPC | GA01 | CAGGTTC | 81 | 5′csasgGUUCCXUGGGAUGCUCUg | 2097 | SpCas |
| SK9 | 777 | CATGGG | | UUUUAGagcuagaaauagcaxGUUaAa | | 9 |
| | | ATGCTCT | | AuAaggcuaGUccGUUAucAAcuugaaa | | |
| | | | | aagugGcaccgagucggugcuususu-3′ | | |
| mcPC | GA01 | CAGGTTC | 81 | 5′csasgGUUCCXUGGGAUGCUCUg | 2098 | SpCas |
| SK9 | 778 | CATGGG | | UUUUAGagcuagxaauagcaxGUUaAa | | 9 |
| | | ATGCTCT | | AuAaggcuaGUccGUUAucAAcuugaaa | | |
| | | | | aagugGcaccgagucggugcuususu-3′ | | |
| mcPC | GA01 | CAGGTTC | 81 | 5′csasgGUUCCXUGGGAUGCUCUg | 2099 | SpCas |
| SK9 | 779 | CATGGG | | UUUUAGagcuagxaauagcaaGUUaAa | | 9 |
| | | ATGCTCT | | AuAaggcuaGUccGUUAucAAcuugaaa | | |
| | | | | aagugGcaccgagucggugcuususu-3′ | | |
| mcPC | GA01 | CAGGTTC | 81 | 5′csasgGUUCCdXUGGGdXUGCUC | 2100 | SpCas |
| SK9 | 780 | CATGGG | | UgUUUUAGagcuagaaauagcaaGUUa | | 9 |
| | | ATGCTCT | | AaAuAaggcuaGUccGUUAucAAcuug | | |
| | | | | aaaaagugGcaccgagucggugcuususu-3′ | | |
| mcPC | GA01 | CAGGTTC | 81 | 5′csasgGUUCCdXUGGGAUGCUCU | 2101 | SpCas |
| SK9 | 781 | CATGGG | | gUUUUAGagcuagaaauagcaaGUUaAa | | 9 |
| | | ATGCTCT | | AuAaggcuaGUccGUUAucAAcuugaaa | | |
| | | | | aagugGcaccgagucggugcuususu-3′ | | |
| mcPC | GA01 | CAGGTTC | 81 | 5′csasgGUUCCAUGGGdXUGCUCU | 2102 | SpCas |
| SK9 | 782 | CATGGG | | gUUUUAGagcuagaaauagcaaGUUaAa | | 9 |
| | | ATGCTCT | | AuAaggcuaGUccGUUAucAAcuugaaa | | |
| | | | | aagugGcaccgagucggugcuususu-3′ | | |
| mcPC | GA01 | CAGGTTC | 81 | 5′csasgGUUCCAUGGGAUGCUCUg | 2103 | SpCas |
| SK9 | 783 | CATGGG | | UUUUAGagcuagdXaauagcaaGUUaA | | 9 |
| | | ATGCTCT | | aAuAaggcuaGUccGUUAucAAcuugaa | | |
| | | | | aaagugGcaccgagucggugcuususu-3′ | | |
| mcPC | GA01 | CAGGTTC | 81 | 5′csasgGUUCCAUGGGAUGCUCUg | 2104 | SpCas |
| SK9 | 784 | CATGGG | | UUUUAGagcuagdXaauagcaaGUUaA | | 9 |
| | | ATGCTCT | | aAuAaggcudXGUccGUUAucAAcuug | | |
| | | | | aaaaagugGcaccgagucggugcuususu-3′ | | |
| mcPC | GA01 | CAGGTTC | 81 | 5′csasgGUUCCAUGGGAUGCUCUg | 2105 | SpCas |
| SK9 | 785 | CATGGG | | UUUUAGagcuagaaauagcaaGUUaAaA | | 9 |
| | | ATGCTCT | | uAaggcudXGUccGUUAucAAcuugaaa | | |
| | | | | aagugGcaccgagucggugcuususu-3′ | | |
| mcPC | GA01 | CAGGTTC | 81 | 5′csasgGUUCCAUGGGAUGCUCUg | 2106 | SpCas |
| SK9 | 786 | CATGGG | | UUUUAGagcuagaaauagcaaGUUaAaA | | 9 |
| | | ATGCTCT | | uAaggcuaGUccGUUdXucAAcuugaaa | | |
| | | | | aagugGcaccgagucggugcuususu-3′ | | |
| mcPC | GA01 | CAGGTTC | 81 | 5′csasgGUUCCAUGGGAUGCUCUg | 2107 | SpCas |
| SK9 | 787 | CATGGG | | UUUUAGagcuagdXaauagcaaGUUaA | | 9 |
| | | ATGCTCT | | aAuAaggcudXGUccGUUdXucAAcuu | | |
| | | | | gaaaaagugGcaccgagucggugcuususu-3′ | | |
| mcPC | GA01 | CAGGTTC | 81 | 5′csasgGUUCCAUGGGAUGCUCUg | 2108 | SpCas |
| SK9 | 788 | CATGGG | | UUUUAGdXgcuagdXaauagcadXGUU | | 9 |
| | | ATGCTCT | | aAaAuAaggcudXGUccGUUdXucAAc | | |
| | | | | uugaaaaagugGcaccgagucggugcuususu- | | |
| | | | | 3′ | | |
| mcPC | GA01 | CAGGTTC | 81 | 5′csasgsGUUCCAUGGGAUGCUCU | 2109 | SpCas |
| SK9 | 789 | CATGGG | | GUUUUAGAgcuagaaauagcAAGUUA | | 9 |
| | | ATGCTCT | | AAAUAAGGCUAGUCCGUUAUCA | | |
| | | | | acuugaaaaaguggcaccgagucggugcusxsx | | |
| | | | | sx-3′ | | |
| mcPC | GA01 | CAGGTTC | 81 | 5′csasgsGUUCCAUGGGAUGCUCU | 2110 | SpCas |
| SK9 | 790 | CATGGG | | gUUUUAGagcuaGaaauagcaaGUUaAa | | 9 |
| | | ATGCTCT | | AuAaggCUaGUCcGUUAucAAcuuGa | | |
| | | | | aaaaguGgcaccgAgUCggugcusxsxsx-- | | |
| | | | | 3′ | | |
| mcPC | GA01 | CAGGTTC | 81 | 5′csasgsGUUCCAUGGGAUGCUCU | 3124 | SpCas |
| SK9 | 791 | CATGGG | | gUUUUAGagcuagaaauagcaaGUUaAa | | 9 |
| | | ATGCTCT | | AuAaggcuaGUccGUUAucAAcuugaaa | | |
| | | | | aagugGcaccgagucggugcusxsxsx--3′ | | |
| mcPC | GA01 | CAGGTTC | 81 | 5′csasgsGUUCCAUGGGAUGCUCU | 2111 | SpCas |
| SK9 | 792 | CATGGG | | GUUUUAGAgcuagaaauagcAAGUUA | | 9 |
| | | ATGCTCT | | AAAUAAGGCUAGUCCGUUAUCA | | |
| | | | | acuugaaaaaguggcaccgagucggugcususx | | |
| | | | | sx-3′ | | |
| mcPC | GA01 | CAGGTTC | 81 | 5′csasgsGUUCCAUGGGAUGCUCU | 2112 | SpCas |
| SK9 | 793 | CATGGG | | gUUUUAGagcuaGaaauagcaaGUUaAa | | 9 |
| | | ATGCTCT | | AuAaggCUaGUCcGUUAucAAcuuGa | | |
| | | | | aaaaguGgcaccgAgUCggugcususxsx-- | | |
| | | | | 3′ | | |
| mcPC | GA01 | CAGGTTC | 81 | 5′csasgsGUUCCAUGGGAUGCUCU | 3125 | SpCas |
| SK9 | 794 | CATGGG | | gUUUUAGagcuagaaauagcaaGUUaAa | | 9 |
| | | ATGCTCT | | AuAaggcuaGUccGUUAucAAcuugaaa | | |
| | | | | aagugGcaccgagucggugcususxsx--3′ | | |
| mcPC | GA01 | CAGGTTC | 81 | 5′csasgsGUUCCAUGGGAUGCUCU | 2113 | SpCas |
| SK9 | 795 | CATGGG | | GUUUUAGAgcuagaaauagcAAGUUA | | 9 |
| | | ATGCTCT | | AAAUAAGGCUAGUCCGUUAUCA | | |
| | | | | acuugaaaaaguggcaccgagucggugcususu | | |
| | | | | sx-3′ | | |
| mcPC | GA01 | CAGGTTC | 81 | 5′csasgsGUUCCAUGGGAUGCUCU | 2114 | SpCas |
| SK9 | 796 | CATGGG | | gUUUUAGagcuaGaaauagcaaGUUaAa | | 9 |
| | | ATGCTCT | | AuAaggCUaGUCcGUUAucAAcuuGa | | |
| | | | | aaaaguGgcaccgAgUCggugcusususx-- | | |
| | | | | 3′ | | |
| mcPC | GA01 | CAGGTTC | 81 | 5′csasgsGUUCCAUGGGAUGCUCU | 3126 | SpCas |
| SK9 | 797 | CATGGG | | gUUUUAGagcuagaaauagcaaGUUaAa | | 9 |
| | | ATGCTCT | | AuAaggcuaGUccGUUAucAAcuugaaa | | |
| | | | | aagugGcaccgagucggugcusususx--3′ | | |
| mcPC | GA01 | CAGGTTC | 81 | 5′csasgsGUUCCAUGGGAUGCUCU | 3127 | SpCas |
| SK9 | 798 | CATGGG | | GUUUUAGAgcuagaaauagcAAGUUA | | 9 |
| | | ATGCTCT | | AAAUAAGGCUAGUCCGUUAUCA | | |
| | | | | acuugaaaaaguggcaccgagucggugcusXs | | |
| | | | | XsX-3′ | | |
| mcPC | GA01 | CAGGTTC | 81 | 5′csasgsGUUCCAUGGGAUGCUCU | 3128 | SpCas |
| SK9 | 799 | CATGGG | | gUUUUAGagcuaGaaauagcaaGUUaAa | | 9 |
| | | ATGCTCT | | AuAaggCUaGUCcGUUAucAAcuuGa | | |
| | | | | aaaaguGgcaccgAgUCggugcusXsXsX- | | |
| | | | | -3′ | | |
| mcPC | GA01 | CAGGTTC | 81 | 5′csasgsGUUCCAUGGGAUGCUCU | 3129 | SpCas |
| SK9 | 800 | CATGGG | | gUUUUAGagcuagaaauagcaaGUUaAa | | 9 |
| | | ATGCTCT | | AuAaggcuaGUccGUUAucAAcuugaaa | | |
| | | | | aagugGcaccgagucggugcusXsXsX--3′ | | |
| mcPC | GA01 | CAGGTTC | 81 | 5′csasgsGUUCCAUGGGAUGCUCU | 3130 | SpCas |
| SK9 | 801 | CATGGG | | GUUUUAGAgcuagaaauagcAAGUUA | | 9 |
| | | ATGCTCT | | AAAUAAGGCUAGUCCGUUAUCA | | |
| | | | | acuugaaaaaguggcaccgagucggugcususX | | |
| | | | | SX-3′ | | |
| mcPC | GA01 | CAGGTTC | 81 | 5′csasgsGUUCCAUGGGAUGCUCU | 3131 | SpCas |
| SK9 | 802 | CATGGG | | gUUUUAGagcuaGaaauagcaaGUUaAa | | 9 |
| | | ATGCTCT | | AuAaggCUaGUCcGUUAucAAcuuGa | | |
| | | | | aaaaguGgcaccgAgUCggugcususXsX-- | | |
| | | | | 3′ | | |
| mcPC | GA01 | CAGGTTC | 81 | 5′csasgsGUUCCAUGGGAUGCUCU | 3132 | SpCas |
| SK9 | 803 | CATGGG | | gUUUUAGagcuagaaauagcaaGUUaAa | | 9 |
| | | ATGCTCT | | AuAaggcuaGUccGUUAucAAcuugaaa | | |
| | | | | aagugGcaccgagucggugcususXsX--3′ | | |
| mcPC | GA01 | CAGGTTC | 81 | 5′csasgsGUUCCAUGGGAUGCUCU | 3133 | SpCas |
| SK9 | 804 | CATGGG | | GUUUUAGAgcuagaaauagcAAGUUA | | 9 |
| | | ATGCTCT | | AAAUAAGGCUAGUCCGUUAUCA | | |
| | | | | acuugaaaaaguggcaccgagucggugcususu | | |
| | | | | SX-3′ | | |
| mcPC | GA01 | CAGGTTC | 81 | 5′csasgsGUUCCAUGGGAUGCUCU | 3134 | SpCas |
| SK9 | 805 | CATGGG | | gUUUUAGagcuaGaaauagcaaGUUaAa | | 9 |
| | | ATGCTCT | | AuAaggCUaGUCcGUUAucAAcuuGa | | |
| | | | | aaaaguGgcaccgAgUCggugcusususX-- | | |
| | | | | 3′ | | |
| mcPC | GA01 | CAGGTTC | 81 | 5′csasgsGUUCCAUGGGAUGCUCU | 3135 | SpCas |
| SK9 | 806 | CATGGG | | gUUUUAGagcuagaaauagcaaGUUaAa | | 9 |
| | | ATGCTCT | | AuAaggcuaGUccGUUAucAAcuugaaa | | |
| | | | | aagugGcaccgagucggugcusususX--3′ | | |
| mcPC | GA01 | CAGGTTC | 81 | 5′csasgsGUUCCAUGGGAUGCUCU | 3136 | SpCas |
| SK9 | 807 | CATGGG | | GUUUUAGAgcuagaaauagcAAGUUA | | 9 |
| | | ATGCTCT | | AAAUAAGGCUAGUCCGUUAUCA | | |
| | | | | acuugaaaaaguggcaccgagucggugcususu | | |
| | | | | suNNN-3′ | | |
| mcPC | GA01 | CAGGTTC | 81 | 5′csasgsGUUCCAUGGGAUGCUCU | 3137 | SpCas |
| SK9 | 808 | CATGGG | | gUUUUAGagcuaGaaauagcaaGUUaAa | | 9 |
| | | ATGCTCT | | AuAaggCUaGUCcGUUAucAAcuuGa | | |
| | | | | NN-3′ | | |
| mcPC | GA01 | CAGGTTC | 81 | 5′csasgsGUUCCAUGGGAUGCUCU | 3138 | SpCas |
| SK9 | 809 | CATGGG | | gUUUUAGagcuagaaauagcaaGUUaAa | | 9 |
| | | ATGCTCT | | AuAaggcuaGUccGUUAucAAcuugaaa | | |
| | | | | aagugGcaccgagucggugcusususuNNN- | | |
| | | | | 3′ | | |
| mcPC | GA01 | CAGGTTC | 81 | 5′csasgsGUUCCAUGGGAUGCUCU | 3139 | SpCas |
| SK10 | 810 | CATGGG | | GUUUUAGAgcuagaaauagcAAGUUA | | 9 |
| | | ATGCTCT | | AAAUAAGGCUAGUCCGUUAUCA | | |
| | | | | acuugaaaaaguggcaccgagucggugcususu | | |
| | | | | sunnn-3′ | | |
| mcPC | GA01 | CAGGTTC | 81 | 5′csasgsGUUCCAUGGGAUGCUCU | 3140 | SpCas |
| SK11 | 811 | CATGGG | | gUUUUAGagcuaGaaauagcaaGUUaAa | | 9 |
| | | ATGCTCT | | AuAaggCUaGUCcGUUAucAAcuuGa | | |
| | | | | aaaaguGgcaccgAgUCggugcusususunn | | |
| | | | | n-3′ | | |
| mcPC | GA01 | CAGGTTC | 81 | 5′csasgsGUUCCAUGGGAUGCUCU | 3141 | SpCas |
| SK12 | 812 | CATGGG | | gUUUUAGagcuagaaauagcaaGUUaAa | | 9 |
| | | ATGCTCT | | AuAaggcuaGUccGUUAucAAcuugaaa | | |
| | | | | aagugGcaccgagucggugcusususunnn-3′ | | |
| mcPC | GA01 | CAGGTTC | 81 | 5′csasgsGUUCCAUGGGAUGCUCU | 2115 | SpCas |
| SK9 | 813 | CATGGG | | GUUUUAGAgcuagaaauagcAAGUUA | | 9 |
| | | ATGCTCT | | AAAUAAGGCUAGUCCGUUAUCA | | |
| | | | | acuugaaaaaguggcaccgagucggugcusdXs | | |
| | | | | dXsdX-3′ | | |
| mcPC | GA01 | CAGGTTC | 81 | 5′csasgsGUUCCAUGGGAUGCUCU | 2116 | SpCas |
| SK9 | 814 | CATGGG | | gUUUUAGagcuaGaaauagcaaGUUaAa | | 9 |
| | | ATGCTCT | | AuAaggCUaGUCcGUUAucAAcuuGa | | |
| | | | | aaaaguGgcaccgAgUCggugcusdXsdXs | | |
| | | | | dX--3′ | | |
| mcPC | GA01 | CAGGTTC | 81 | 5′csasgsGUUCCAUGGGAUGCUCU | 3142 | SpCas |
| SK9 | 815 | CATGGG | | gUUUUAGagcuagaaauagcaaGUUaAa | | 9 |
| | | ATGCTCT | | AuAaggcuaGUccGUUAucAAcuugaaa | | |
| | | | | aagugGcaccgagucggugcusdXsdXsdX-- | | |
| | | | | 3′ | | |
| mcPC | GA01 | CAGGTTC | 81 | 5′csasgsGUUCCAUGGGAUGCUCU | 2117 | SpCas |
| SK9 | 816 | CATGGG | | GUUUUAGAgcuagaaauagcAAGUUA | | 9 |
| | | ATGCTCT | | AAAUAAGGCUAGUCCGUUAUCA | | |
| | | | | acuugaaaaaguggcaccgagucggugcususd | | |
| | | | | XsdX-3′ | | |
| mcPC | GA01 | CAGGTTC | 81 | 5′csasgsGUUCCAUGGGAUGCUCU | 2118 | SpCas |
| SK9 | 817 | CATGGG | | gUUUUAGagcuaGaaauagcaaGUUaAa | | 9 |
| | | ATGCTCT | | AuAaggCUaGUCcGUUAucAAcuuGa | | |
| | | | | aaaaguGgcaccgAgUCggugcususdXsd | | |
| | | | | X--3′ | | |
| mcPC | GA01 | CAGGTTC | 81 | 5′csasgsGUUCCAUGGGAUGCUCU | 3143 | SpCas |
| SK9 | 818 | CATGGG | | gUUUUAGagcuagaaauagcaaGUUaAa | | 9 |
| | | ATGCTCT | | AuAaggcuaGUccGUUAucAAcuugaaa | | |
| | | | | aagugGcaccgagucggugcususdXsdX--3′ | | |
| mcPC | GA01 | CAGGTTC | 81 | 5′csasgsGUUCCAUGGGAUGCUCU | 2119 | SpCas |
| SK9 | 819 | CATGGG | | GUUUUAGAgcuagaaauagcAAGUUA | | 9 |
| | | ATGCTCT | | AAAUAAGGCUAGUCCGUUAUCA | | |
| | | | | acuugaaaaaguggcaccgagucggugcususu | | |
| | | | | sdX-3′ | | |
| mcPC | GA01 | CAGGTTC | 81 | 5′csasgsGUUCCAUGGGAUGCUCU | 2120 | SpCas |
| SK9 | 820 | CATGGG | | gUUUUAGagcuaGaaauagcaaGUUaAa | | 9 |
| | | ATGCTCT | | AuAaggCUaGUCcGUUAucAAcuuGa | | |
| | | | | aaaaguGgcaccgAgUCggugcusususdX- | | |
| | | | | -3′ | | |
| mcPC | GA01 | CAGGTTC | 81 | 5′csasgsGUUCCAUGGGAUGCUCU | 3144 | SpCas |
| SK9 | 821 | CATGGG | | gUUUUAGagcuagaaauagcaaGUUaAa | | 9 |
| | | ATGCTCT | | AuAaggcuaGUccGUUAucAAcuugaaa | | |
| | | | | aagugGcaccgagucggugcusususdX--3′ | | |
| mcPC | GA05 | CAGGTTC | 81 | 5′csasgsGUUCCAUGGGAUGCUCU | 2121 | SpCas |
| SK9 | 3 | CATGGG | | GUUUUAGAgcuagaaauagcAAGUUA | | 9 |
| | | ATGCTCT | | AAAUAAGGCUAGUCCGUUAUCA | | |
| | | | | acuugaaaaaguggcaccgagucggugcususu | | |
| | | | | sudXdXdX-3′ | | |
| mcPC | GA01 | CAGGTTC | 81 | 5′csasgsGUUCCAUGGGAUGCUCU | 3145 | SpCas |
| SK9 | 823 | CATGGG | | gUUUUAGagcuaGaaauagcaaGUUaAa | | 9 |
| | | ATGCTCT | | AuAaggCUaGUCcGUUAucAAcuuGa | | |
| | | | | aaaaguGgcaccgAgUCggugcusususudX | | |
| | | | | dXdX-3′ | | |
| mcPC | GA01 | CAGGTTC | 81 | 5′csasgsGUUCCAUGGGAUGCUCU | 3146 | SpCas |
| SK9 | 824 | CATGGG | | gUUUUAGagcuagaaauagcaaGUUaAa | | 9 |
| | | ATGCTCT | | AuAaggcuaGUccGUUAucAAcuugaaa | | |
| | | | | aagugGcaccgagucggugcusususudXdX | | |
| | | | | dX-3′ | | |
| mcPC | GA01 | CAGGTTC | 81 | 5′csasgsGUUCCAUGGGAUGCUCU | 3147 | SpCas |
| SK99 | 825 | CATGGG | | gUUUUAGagcuaGaaauagcaaGUUaAa | | 9 |
| | | ATGCTCT | | AuAaggCUaGUCcGUUAucAAcuuGa | | |
| | | | | aaaaguGGcaccgAgUCggugcusususu-3′ | | |
| mcPC | GA01 | CAGGTTC | 81 | 5′csasgsGUUCCAUGGGAUGCUCU | 3148 | SpCas |
| SK99 | 826 | CATGGG | | gUUUUAGagcuagaaauagcaaGUUaAa | | 9 |
| | | ATGCTCT | | AuAaggcuaGUccGUUAucAAcuugaaa | | |
| | | | | aaguGGcaccgagucggugcusususu-3′ | | |
| mPCS | GA01 | GGCTGA | 251 | 5′gsgscsUGAUGAGGCCGCACAUG | 446 | SpCas |
| K9 | 0 | TGAGGC | | GUUUUAGAgcuagaaauagcAAGUUA | | 9 |
| | | CGCACA | | AAAUAAGGCUAGUCCGUUAUCA | | |
| | | TG | | acuugaaaaaguggcaccgagucggugcususu | | |
| | | | | su-3′ | | |
| mPCS | GA01 | GGCTGA | 251 | 5′gsgscsUGAUGAGGCCGCACAUG | 446 | SpCas |
| K9 | 1 | TGAGGC | | GUUUUAGAgcuagaaauagcAAGUUA | | 9 |
| | | CGCACA | | AAAUAAGGCUAGUCCGUUAUCA | | |
| | | TG | | acuugaaaaaguggcaccgagucggugcususu | | |
| | | | | su-3′ | | |
| hPCS | GA01 | CGCCTGC | 252 | 5′csgscsCUGCCAGCGCCUGGCGA | 3149 | CBE |
| K9 | 3 | CAGCGC | | GUUUUAGAgcuagaaauagcAAGUUA | | |
| | | CTGGCG | | AAAUAAGGCUAGUCCGUUAUCA | | |
| | | A | | acuugaaaaaguggcaccgagucggugcususu | | |
| | | | | su-3 | | |
| hPCS | GA01 | CGCCTGC | 252 | 5′csgsusGCGCAGGAGGACGAGGA | 3150 | CBE |
| K9 | 5 | CAGCGC | | GUUUUAGAgcuagaaauagcAAGUUA | | |
| | | CTGGCG | | AAAUAAGGCUAGUCCGUUAUCA | | |
| | | A | | acuugaaaaaguggcaccgagucggugcususu | | |
| | | | | su-3′ | | |
| hcAN | GA01 | GGCCTCC | 107 | 5′gsgscsCUCCUUCAGUUGGGACA | 2264 | SpCas |
| GPTL | 6 | TTCAGTT | | GUUUUAGAgcuagaaauagcAAGUUA | | 9 |
| 3 | | GGGACA | | AAAUAAGGCUAGUCCGUUAUCA | | |
| | | | | acuugaaaaaguggcaccgagucggugcususu | | |
| | | | | su-3′ | | |
| hcAN | GA01 | GCCAAT | 109 | 5′gscscsAAUGGCCUCCUUCAGUU | 2265 | SpCas |
| GPTL | 7 | GGCCTCC | | GUUUUAGAgcuagaaauagcAAGUUA | | 9 |
| 3 | | TTCAGTT | | AAAUAAGGCUAGUCCGUUAUCA | | |
| | | | | acuugaaaaaguggcaccgagucggugcususu | | |
| | | | | su-3 | | |
| hcAN | GA03 | GCCAAT | 109 | 5′gscscsAAUGGCCUCCUUCAGUU | 2282 | SpCas |
| GPTL | 1 | GGCCTCC | | gUUUUAGagcuagaaauagcaaGUUaAa | | 9 |
| 3 | | TTCAGTT | | AuAaggcuaGUccGUUAucAAcuugaaa | | |
| | | | | aagugGcaccgagucggugcusususu-3′ | | |
| hcAN | GA03 | GCCAAT | 109 | 5′gscscsAAUGGCCUCCUUCAGUU | 2122 | SpCas |
| GPTL | 2 | GGCCTCC | | gUUUUAGagcuagaaauagcaaGUUsaA | | 9 |
| 3 | | TTCAGTT | | aAuAaggcuaGUccGUUsAucAAcuuga | | |
| | | | | aaaagugGcaccgagucggugcusususu-3′ | | |
| hcAN | GA03 | GCCAAT | 109 | 5′gscscsAAUGGCCUCCUUCAGUU | 3151 | SpCas |
| GPTL | 3 | GGCCTCC | | gUUUuAGagcuagaaauagcaaGUUaAa | | 9 |
| 3 | | TTCAGTT | | AuAaggcuaGUccGUUAucAAcuugaaa | | |
| | | | | aagugGcaccgagucggugcusususu-3′ | | |
| hcAN | GA03 | GCCAAT | 109 | 5′gscscsAAUGGCCUCCUUCAGUU | 3152 | SpCas |
| GPTL | 4 | GGCCTCC | | gUUUUAGagcuagaaauagcaaGUUaAa | | 9 |
| 3 | | TTCAGTT | | AuAaggcuaGUccGUuAucAAcuugaaa | | |
| | | | | aagugGcaccgagucggugcusususu-3′ | | |
| hcAN | GA03 | GCCAAT | 109 | 5′gscscsAAUGGCCUCCUUCAGUU | 3153 | SpCas |
| GPTL | 5 | GGCCTCC | | gUUUuAGagcuagaaauagcaaGUUaAa | | 9 |
| 3 | | TTCAGTT | | AuAaggcuaGUccGUuAucAAcuugaaa | | |
| | | | | aagugGcaccgagucggugcusususu-3′ | | |
| hcAN | GA03 | GCCAAT | 109 | 5′gscscsAAUGGCCUCCUUCAGUU | 3154 | SpCas |
| GPTL | 6 | GGCCTCC | | gUUUuAGagcuagaaauagcaaGUuaAa | | 9 |
| 3 | | TTCAGTT | | AuAaggcuaGUccGUUAucAAcuugaaa | | |
| | | | | aagugGcaccgagucggugcusususu-3′ | | |
| hcAN | GA03 | GCCAAT | 109 | 5′gscscsAAUGGCCUCCUUCAGUU | 3155 | SpCas |
| GPTL | 7 | GGCCTCC | | gUUUUAGagcuagaaauagcaaGUuaAa | | 9 |
| 3 | | TTCAGTT | | AuAaggcuaGUccGUuAucAAcuugaaa | | |
| | | | | aagugGcaccgagucggugcusususu-3′ | | |
| hcAN | GA03 | GCCAAT | 109 | 5′gscscsAAUGGCCUCCUUCAGUU | 3156 | SpCas |
| GPTL | 8 | GGCCTCC | | gUUUuAGagcuagaaauagcaaGUuaAa | | 9 |
| 3 | | TTCAGTT | | AuAaggcuaGUccGUuAucAAcuugaaa | | |
| | | | | aagugGcaccgagucggugcusususu-3′ | | |
| hcAN | GA04 | GCCAAT | 109 | 5′gscscsAAuGGCCUCCUUcAGUUg | 3157 | SpCas |
| GPTL | 0 | GGCCTCC | | UUUUAGagcuagaaauagcaaGUUaAaA | | 9 |
| 3 | | TTCAGTT | | uAaggcuaGUccGUUAucAAcuugaaaa | | |
| | | | | agugGcaccgagucggugcusususu-3′ | | |
| hcAN | GA04 | GCCAAT | 109 | 5′gscscsAAuGGCCUCCUUcAGUUg | 3158 | SpCas |
| GPTL | 1 | GGCCTCC | | UUUUAGagcuagaaauagcaaGUUsaAa | | 9 |
| 3 | | TTCAGTT | | AuAaggcuaGUccGUUsAucAAcuugaa | | |
| | | | | aaagugGcaccgagucggugcusususu-3′ | | |
| hcAN | GA04 | TCCCAAC | 106 | 5′uscscsCAACUGAAGGAGGCCAU | 3159 | SpCas |
| GPTL | 2 | TGAAGG | | GUUUUAGAgcuagaaauagcAAGUUA | | 9 |
| 3 | | AGGCCA | | AAAUAAGGCUAGUCCGUUAUCA | | |
| | | T | | acuugaaaaaguggcaccgagucggugcususu | | |
| | | | | su-3′ | | |
| hcAN | GA04 | ATTCTGG | 111 | 5′asususCUGGAGGAAAUAACUAG | 3160 | SpCas |
| GPTL | 3 | AGGAAA | | GUUUUAGAgcuagaaauagcAAGUUA | | 9 |
| 3 | | TAACTA | | AAAUAAGGCUAGUCCGUUAUCA | | |
| | | G | | acuugaaaaaguggcaccgagucggugcususu | | |
| | | | | su-3′ | | |
| hcAN | GA04 | ACTACA | 115 | 5′ascsusACAAGUCAAAAAUGAAG | 3161 | SpCas |
| GPTL | 4 | AGTCAA | | GUUUUAGAgcuagaaauagcAAGUUA | | 9 |
| 3 | | AAATGA | | AAAUAAGGCUAGUCCGUUAUCA | | |
| | | AG | | acuugaaaaaguggcaccgagucggugcususu | | |
| | | | | su-3′ | | |
| hcAN | GA04 | CTTTTAT | 120 | 5′csususUUAUUUGACUAUGCUGU | 3162 | SpCas |
| GPTL | 5 | TTGACTA | | GUUUUAGAgcuagaaauagcAAGUUA | | 9 |
| 3 | | TGCTGT | | AAAUAAGGCUAGUCCGUUAUCA | | |
| | | | | acuugaaaaaguggcaccgagucggugcususu | | |
| | | | | su-3′ | | |
| hcAN | GA04 | GGAGTA | 124 | 5′gsgsasGUAGUUCUUGGUGCUCU | 3163 | SpCas |
| GPTL | 6 | GTTCTTG | | GUUUUAGAgcuagaaauagcAAGUUA | | 9 |
| 3 | | GTGCTCT | | AAAUAAGGCUAGUCCGUUAUCA | | |
| | | | | acuugaaaaaguggcaccgagucggugcususu | | |
| | | | | su-3′ | | |
| hcAN | GA04 | AGTTCTT | 127 | 5′asgsusUCUUGGUGCUCUUGGCU | 3164 | SpCas |
| GPTL | 7 | GGTGCTC | | GUUUUAGAgcuagaaauagcAAGUUA | | 9 |
| 3 | | TTGGCT | | AAAUAAGGCUAGUCCGUUAUCA | | |
| | | | | acuugaaaaaguggcaccgagucggugcususu | | |
| | | | | su-3′ | | |
| hcAN | GA04 | GGAAGA | 130 | 5′gsgsasAGAUAGAGAAAUUUCUG | 3165 | SpCas |
| GPTL | 8 | TAGAGA | | GUUUUAGAgcuagaaauagcAAGUUA | | 9 |
| 3 | | AATTTCT | | AAAUAAGGCUAGUCCGUUAUCA | | |
| | | G | | acuugaaaaaguggcaccgagucggugcususu | | |
| | | | | su-3′ | | |
| hcAN | GA04 | CATTATA | 143 | 5′csasusUAUAUUCAGGUAGUCCA | 3166 | SpCas |
| GPTL | 9 | TTCAGGT | | GUUUUAGAgcuagaaauagcAAGUUA | | 9 |
| 3 | | AGTCCA | | AAAUAAGGCUAGUCCGUUAUCA | | |
| | | | | acuugaaaaaguggcaccgagucggugcususu | | |
| | | | | su-3′ | | |
| hcAN | GA05 | ACAAAA | 146 | 5′ascsasAAACUUCAAUGAAACGU | 3167 | SpCas |
| GPTL | 0 | CTTCAAT | | GUUUUAGAgcuagaaauagcAAGUUA | | 9 |
| 3 | | GAAACG | | AAAUAAGGCUAGUCCGUUAUCA | | |
| | | T | | acuugaaaaaguggcaccgagucggugcususu | | |
| | | | | su-3′ | | |
| hcAN | GA05 | GAGAAC | 149 | 5′gsasgsAACUACAAAUAUGGUUU | 3168 | SpCas |
| GPTL | 1 | TACAAA | | GUUUUAGAgcuagaaauagcAAGUUA | | 9 |
| 3 | | TATGGTT | | AAAUAAGGCUAGUCCGUUAUCA | | |
| | | T | | acuugaaaaaguggcaccgagucggugcususu | | |
| | | | | su-3′ | | |
| mcPC | GA05 | CAGGTTC | 81 | 5′csasgsGUUCCAUGGGAUGCUCU | 2237 | SpCas |
| SK9 | 2 | CATGGG | | GUUUUAGAGCUAGAAAUAGCAA | | 9 |
| | | ATGCTCT | | GUUAAAAUAAGGCUAGUCCGUU | | |
| | | | | AUCAACUUGAAAAAGUGGCACC | | |
| | | | | GAGUCGGUGCUsususu-3′ | | |
| mcPC | GA05 | CAGGTTC | 81 | 5′csasgsGUUCCAUGGGAUGCUCU | 2236 | SpCas |
| SK9 | 3 | CATGGG | | GUUUUAGAgcuagaaauagcAAGUUA | | 9 |
| | | ATGCTCT | | AAAUAAGGCUAGUCCGUUAUCA | | |
| | | | | acuugaaaaaguggcaccgagucggugcususu | | |
| | | | | su-3′ | | |
| hANG | GA09 | AAGATA | 15 | 5′asasgsAUACCUGAAUAACCCUC | 60 | ABE |
| PTL3 | 8 | CCTGAAT | | GUUUUAGAgcuagaaauagcAAGUUA | | |
| | | AACCCTC | | AAAUAAGGCUAGUCCGUUAUCA | | |
| | | | | acuugaaaaaguggcaccgagucggugcususu | | |
| | | | | su-3′ | | |
| CANG | GA101/ | AAGATA | 14 | 5′asasgsAUACCUGAAUAACUCUC | 257 | ABE |
| PTL3 | GA066 | CCTGAAT | | GUUUUAGAgcuagaaauagcAAGUUA | | |
| | | AACTCTC | | AAAUAAGGCUAGUCCGUUAUCA | | |
| | | | | acuugaaaaaguggcaccgagucggugcususu | | |
| | | | | su-3′ | | |
| hcPCS | GA23 | CGCCTGC | 252 | 5′csgscsCUGCCAGCGCCUGGCGA | 452 | CBE |
| K9 | 4 | CAGCGC | | GUUUUAGAGCUAGAAAUAGCAA | | |
| | | CTGGCG | | GUUAAAAUAAGGCUAGUCCGUU | | |
| | | A | | AUCAACUUGAAAAAGUGGCACC | | |
| | | | | GAGUCGGUGCUsususu-3′ | | |
| hcAN | GA26 | TGAAGA | 126 | 5′usgsasAGAAAGGGAGUAGUUCU | 2279 | SpCas |
| GPTL | 1 | AAGGGA | | gUUUUAGagcuagaaauagcaaGUUaAa | | 9 |
| 3 | | GTAGTTC | | AuAaggcuaGUccGUUAucAAcuugaaa | | |
| | | T | | aagugGcaccgagucggugcusususu-3′ | | |
| hcAN | GA26 | CATTATA | 143 | 5′csasusUAUAUUCAGGUAGUCCA | 2280 | SpCas |
| GPTL | 2 | TTCAGGT | | gUUUUAGagcuagaaauagcaaGUUaAa | | 9 |
| 3 | | AGTCCA | | AuAaggcuaGUccGUUAucAAcuugaaa | | |
| | | | | aagugGcaccgagucggugcusususu-3′ | | |
| hcAN | GA26 | ACAAAA | 146 | 5′ascsasAAACUUCAAUGAAACGU | 2281 | SpCas |
| GPTL | 3 | CTTCAAT | | gUUUUAGagcuagaaauagcaaGUUaAa | | 9 |
| 3 | | GAAACG | | AuAaggcuaGUccGUUAucAAcuugaaa | | |
| | | T | | aagugGcaccgagucggugcusususu-3′ | | |
| hcAN | GA26 | GCCAAT | 109 | 5′gscscsAAUGGCCUCCUUCAGUU | 2282 | SpCas |
| GPTL | 4 | GGCCTCC | | gUUUUAGagcuagaaauagcaaGUUaAa | | 9 |
| 3 | | TTCAGTT | | AuAaggcuaGUccGUUAucAAcuugaaa | | |
| | | | | aagugGcaccgagucggugcusususu-3′ | | |
| hcAN | GA26 | GCCAAT | 109 | 5′gscscsAAUGGCCUCCUUCAGUU | 2283 | SpCas |
| GPTL | 5 | GGCCTCC | | gUUUUAGagcuaGaaauagcaaGUUaAa | | 9 |
| 3 | | TTCAGTT | | AuAaggCUaGUCcGUUAucAAcuuGa | | |
| | | | | aaaaguGgcaccgAgUCggugcusususu-3′ | | |
| hcPCS | GA26 | TCAGCTC | 161 | 5′uscsasGCUCCAGGCGGUCCUGG | 2284 | SpCas |
| K9 | 6 | CAGGCG | | gUUUUAGagcuagaaauagcaaGUUaAa | | 9 |
| | | GTCCTGG | | AuAaggcuaGUccGUUAucAAcuugaaa | | |
| | | | | aagugGcaccgagucggugcusususu-3′ | | |
| hcPCS | GA26 | GCCCCAT | 185 | 5′gscscsCCAUGUCGACUACAUCG | 2285 | SpCas |
| K9 | 7 | GTCGACT | | gUUUUAGagcuagaaauagcaaGUUaAa | | 9 |
| | | ACATCG | | AuAaggcuaGUccGUUAucAAcuugaaa | | |
| | | | | aagugGcaccgagucggugcusususu-3′ | | |
| hcPCS | GA26 | GGGGCT | 187 | 5′gsgsgsGCUGGUAUUCAUCCGCC | 2286 | SpCas |
| K9 | 8 | GGTATTC | | gUUUUAGagcuagaaauagcaaGUUaAa | | 9 |
| | | ATCCGCC | | AuAaggcuaGUccGUUAucAAcuugaaa | | |
| | | | | aagugGcaccgagucggugcusususu-3′ | | |
| hcPCS | GA26 | CTAGGA | 194 | 5′csusasGGAGAUACACCUCCACCg | 2287 | SpCas |
| K9 | 9 | GATACA | | UUUUAGagcuagaaauagcaaGUUaAaA | | 9 |
| | | CCTCCAC | | uAaggcuaGUccGUUAucAAcuugaaaa | | |
| | | C | | agugGcaccgagucggugcusususu-3′ | | |
| hcPCS | GA27 | CTGCGC | 204 | 5′csusgsCGCGUGCUCAACUGCCA | 2288 | SpCas |
| K9 | 0 | GTGCTCA | | gUUUUAGagcuagaaauagcaaGUUaAa | | 9 |
| | | ACTGCC | | AuAaggcuaGUccGUUAucAAcuugaaa | | |
| | | A | | aagugGcaccgagucggugcusususu-3′ | | |
| hcPCS | GA27 | CGGGAT | 206 | 5′csgsgsGAUGCCGGCGUGGCCAA | 2289 | SpCas |
| K9 | 1 | GCCGGC | | gUUUUAGagcuagaaauagcaaGUUaAa | | 9 |
| | | GTGGCC | | AuAaggcuaGUccGUUAucAAcuugaaa | | |
| | | AA | | aagugGcaccgagucggugcusususu-3′ | | |
| hcPCS | GA27 | CGCTGA | 212 | 5′csgscsUGACCACCCCUGCCAGGg | 2290 | SpCas |
| K9 | 2 | CCACCCC | | UUUUAGagcuagaaauagcaaGUUaAaA | | 9 |
| | | TGCCAG | | uAaggcuaGUccGUUAucAAcuugaaaa | | |
| | | G | | agugGcaccgagucggugcusususu-3′ | | |
| hcPCS | GA27 | TCATGGC | 215 | 5′uscsasUGGCACCCACCUGGCAGg | 3169 | SpCas |
| K9 | 3 | ACCCAC | | UUUUAGagcuagaaauagcaaGUUaAaA | | 9 |
| | | CTGGCA | | uAaggcuaGUccGUUAucAAcuugaaaa | | |
| | | G | | agugGcaccgagucggugcusususu-3′ | | |
| hcPCS | GA27 | GCTGAC | 217 | 5′gscsusGACCACCCCUGCCAGGUg | 3170 | SpCas |
| K9 | 4 | CACCCCT | | UUUUAGagcuagaaauagcaaGUUaAaA | | 9 |
| | | GCCAGG | | uAaggcuaGUccGUUAucAAcuugaaaa | | |
| | | T | | agugGcaccgagucggugcusususu-3′ | | |
| hcAN | GA29 | GCAAAT | 1608 | 5′gscsasAAUCUUGAUUUUGGCUC | 2123 | SpCas |
| GPTL | 5 | CTTGATT | | GUUUUAGAGCUAGAAAUAGCAA | | 9 |
| 3 | | TTGGCTC | | GUUAAAAUAAGGCUAGUCCGUU | | |
| | | | | AUCAACUUGAAAAAGUGGCACC | | |
| | | | | GAGUCGGUGCUsususu-3′ | | |
| hcAN | GA29 | GATGTA | 1609 | 5′gsasusGUAAAAAUUUUAGCCAA | 2124 | SpCas |
| GPTL | 6 | AAAATTT | | GUUUUAGAGCUAGAAAUAGCAA | | 9 |
| 3 | | TAGCCA | | GUUAAAAUAAGGCUAGUCCGUU | | |
| | | A | | AUCAACUUGAAAAAGUGGCACC | | |
| | | | | GAGUCGGUGCUsususu-3′ | | |
| hcAN | GA29 | ATGAAA | 1610 | 5′asusgsAAAAACUUGAGAGUUGC | 2125 | SpCas |
| GPTL | 7 | AACTTG | | GUUUUAGAGCUAGAAAUAGCAA | | 9 |
| 3 | | AGAGTT | | GUUAAAAUAAGGCUAGUCCGUU | | |
| | | GC | | AUCAACUUGAAAAAGUGGCACC | | |
| | | | | GAGUCGGUGCUsususu-3′ | | |
| hcAN | GA29 | ACTTGG | 1611 | 5′ascsusUGGGAUCACAAAGCAAA | 2126 | SpCa9 |
| GPTL | 8 | GATCAC | | GUUUUAGAGCUAGAAAUAGCAA | | |
| 3 | | AAAGCA | | GUUAAAAUAAGGCUAGUCCGUU | | |
| | | AA | | AUCAACUUGAAAAAGUGGCACC | | |
| | | | | GAGUCGGUGCUsususu-3′ | | |
| hcAN | GA29 | AAGATTT | 1612 | 5′asasgsAUUUGGUGUUUUCUACU | 2127 | SpCas |
| GPTL | 9 | GGTGTTT | | GUUUUAGAGCUAGAAAUAGCAA | | 9 |
| 3 | | TCTACT | | GUUAAAAUAAGGCUAGUCCGUU | | |
| | | | | AUCAACUUGAAAAAGUGGCACC | | |
| | | | | GAGUCGGUGCUsususu-3′ | | |
| hcAP | GA30 | AAGGAG | 1613 | 5′asasgsGAGUACCCGGGGCUGCA | 2128 | SpCas |
| OC3 | 0 | TACCCG | | GUUUUAGAGCUAGAAAUAGCAA | | 9 |
| | | GGGCTG | | GUUAAAAUAAGGCUAGUCCGUU | | |
| | | CA | | AUCAACUUGAAAAAGUGGCACC | | |
| | | | | GAGUCGGUGCUsususu-3′ | | |
| hcAP | GA30 | CAGAGG | 1614 | 5′csasgsAGGCCAGGAGCGCCAGG | 2129 | SpCas |
| OC3 | 1 | CCAGGA | | GUUUUAGAGCUAGAAAUAGCAA | | 9 |
| | | GCGCCA | | GUUAAAAUAAGGCUAGUCCGUU | | |
| | | GG | | AUCAACUUGAAAAAGUGGCACC | | |
| | | | | GAGUCGGUGCUsususu-3′ | | |
| hcAP | GA30 | AGAGGC | 1615 | 5′asgsasGGCCAGGAGCGCCAGGA | 2130 | SpCas |
| OC3 | 2 | CAGGAG | | GUUUUAGAGCUAGAAAUAGCAA | | 9 |
| | | CGCCAG | | GUUAAAAUAAGGCUAGUCCGUU | | |
| | | GA | | AUCAACUUGAAAAAGUGGCACC | | |
| | | | | GAGUCGGUGCUsususu | | |
| hcAP | GA30 | CTCGGCC | 1616 | 5′csuscsGGCCUCUGAAGCUCCUG | 2131 | SpCas |
| OC3 | 3 | TCTGAA | | GUUUUAGAGCUAGAAAUAGCAA | | 9 |
| | | GCTCCTG | | GUUAAAAUAAGGCUAGUCCGUU | | |
| | | | | AUCAACUUGAAAAAGUGGCACC | | |
| | | | | GAGUCGGUGCUsususu-3′ | | |
| hcAN | GA30 | CCAATG | 1594 | 5′iscscsAAUGGCCUCCUUCAGUUg | 3171 | SpCas |
| GPTL | 4 | GCCTCCT | | UUUUAGagcuagaaauagcaaGUUaAaA | | 9 |
| 3 | | TCAGTT | | uAaggcuaGUccGUUAucAAcuugaaaa | | |
| | | | | agugGcaccgagucggugcusususu-3′ | | |
| hcAN | GA30 | CCAATG | 1594 | 5′cscsAAUGGCCUCCUUCAGUUgU | 3172 | SpCas |
| GPTL | 5 | GCCTCCT | | UUUAGagcuagaaauagcaaGUUaAaAu | | 9 |
| 3 | | TCAGTT | | AaggcuaGUccGUUAucAAcuugaaaaa | | |
| | | | | gugGcaccgagucggugcusususu-3′ | | |
| hcPCS | GA30 | CCACCG | 192 | 5′cscsasCCGGGAAAUCGAGGGCA | 3173 | SpCas |
| K9 | 6 | GGAAAT | | gUUUUAGagcuagaaauagcaaGUUaAa | | 9 |
| | | CGAGGG | | AuAaggcuaGUccGUUAucAAcuugaaa | | |
| | | CA | | aagugGcaccgagucggugcusususu-3′ | | |
| hcPCS | GA30 | GCTTACC | 67 | 5′gscsusUACCUGUCUGUGGAAGC | 2301 | ABE |
| K9 | 7 | TGTCTGT | | gUUUUAGagcuagaaauagcaaGUUaAa | | |
| | | GGAAGC | | AuAaggcuaGUccGUUAucAAcuugaaa | | |
| | | | | aagugGcaccgagucggugcusususu-3′ | | |
| hcPCS | GA30 | CTTGGCA | 203 | 5′csususGGCAGUUGAGCACGCGC | 3174 | SpCas |
| K9 | 9 | GTTGAG | | gUUUUAGagcuagaaauagcaaGUUaAa | | 9 |
| | | CACGCG | | AuAaggcuaGUccGUUAucAAcuugaaa | | |
| | | C | | aagugGcaccgagucggugcusususu-3′ | | |
| hcPCS | GA34 | CCCGCA | 13 | 5′cscscsGCACCUUGGCGCAGCGG | 2254 | ABE |
| K9 | 3 | CCTTGGC | | GUUUUAGAGCUAGAAAUAGCAA | | |
| | | GCAGCG | | GUUAAAAUAAGGCUAGUCCGUU | | |
| | | G | | AUCAACUUGAAAAAGUGGCACC | | |
| | | | | GAGUCGGUGCUsususu-3′ | | |
| CANG | GA34 | aagatacCT | 14 | 5′asasgsAUACCUGAAUAACUCUC | 2255 | ABEe |
| PTL3 | 4 | GAATAA | | GUUUUAGAGCUAGAAAUAGCAA | | |
| | | CTCTC | | GUUAAAAUAAGGCUAGUCCGUU | | |
| | | | | AUCAACUUGAAAAAGUGGCACC | | |
| | | | | GAGUCGGUGCUsususu-3′ | | |
| PCSK | GA34 | CCCATAC | 69 | 5′cscscsAUACCUUGGAGCAACGG | 2303 | ABE |
| 9 | 8 | CTTGGA | | GUUUUAGAgcuagaaauagcAAGUUA | | |
| | | GCAACG | | AAAUAAGGCUAGUCCGUUAUCA | | |
| | | G | | acuugaaaaaguggcaccgagucggugcususu | | |
| | | | | su-3′ | | |
| mAN | GA34 | GAGATA | 241 | 5′gsasgsAUACCUGAGUAACUUUC | 2258 | ABE |
| GPTL | 9 | CCTGAGT | | GUUUUAGAgcuagaaauagcAAGUUA | | |
| 3 | | AACTTTC | | AAAUAAGGCUAGUCCGUUAUCA | | |
| | | | | acuugaaaaaguggcaccgagucggugcususu | | |
| | | | | su-3′ | | |
| mAN | GA35 | GAGATA | 241 | 5′gsasgsAUACCUGAGUAACUUUC | 2259 | ABE |
| GPTL | 3 | CCTGAGT | | GUUUUAGAGCUAGAAAUAGCAA | | |
| 3 | | AACTTTC | | GUUAAAAUAAGGCUAGUCCGUU | | |
| | | | | AUCAACUUGAAAAAGUGGCACC | | |
| | | | | GAGUCGGUGCUsususu-3′ | | |
| mPCS | GA35 | CCCATAC | 69 | 5′cscscsAUACCUUGGAGCAACGG | 1643 | ABE |
| K9 | 5 | CTTGGA | | gUUUUAGagcuaGaaauagcaaGUUaAa | | |
| | | GCAACG | | AuAaggcuaGUccGUUAucAAcuuGaa | | |
| | | G | | 3′ | | |
| mPCS | GA35 | CCCATAC | 69 | 5′cscscsAUACCUUGGAGCAACGG | 1644 | ABE |
| K9 | 6 | CTTGGA | | gUUUUAGagcuaGaaauagcaaGUUaAa | | |
| | | GCAACG | | AuAaggcuaGUccGUUAucAAcuuGaa | | |
| | | G | | aaagugGcaccgagucggugcuususuuuu-3′ | | |
| mPCS | GA35 | CCCATAC | 69 | 5′cscscsAUACCUUGGAGCAACGG | 1645 | ABE |
| K9 | 7 | CTTGGA | | gUUUUAGagcuaGaaauagcaaGUUsaA | | |
| | | GCAACG | | aAuAaggcuaGUccGUUsAucAAcuuG | | |
| | | G | | 3′ | | |
| mPCS | GA35 | CCCATAC | 69 | 5′cscscsAUACCUUGGAGCAACGG | 1646 | ABE |
| K9 | 8 | CTTGGA | | gUUUUAGagcuaGaaauagcaaGUUsaA | | |
| | | GCAACG | | aAuAaggcuaGUccGUUAucAAcuuGa | | |
| | | G | | 3′ | | |
| mPCS | GA35 | CCCATAC | 69 | 5′cscscsAUACCUUGGAGCAACGG | 1647 | ABE |
| K9 | 9 | CTTGGA | | gUUUUAGagcuaGaaauagcaaGUUaAa | | |
| | | GCAACG | | AuAaggcuaGUccGUUsAucAAcuuGa | | |
| | | G | | 3′ | | |
| mPCS | GA36 | CCCATAC | 69 | 5′cscscsAUACCUUGGAGCAACGG | 2304 | ABE |
| K9 | 0 | CTTGGA | | gUUUUAGagcuaGaaauagcaaGUUsaA | | |
| | | GCAACG | | aAuAaggcuaGUccGUUsAucAAcuuG | | |
| | | G | | aaaaagugGcaccgagucggugcuususuuUu | | |
| | | | | -3′ | | |
| mPCS | GA36 | CCCATAC | 69 | 5′cscscsAUACCUUGGAGCAACGG | 2305 | ABE |
| K9 | 1 | CTTGGA | | gUUUUAGagcuaGaaauagcaaGUUsaA | | |
| | | GCAACG | | aAuAaggcuaGUccGUUAucAAcuuGa | | |
| | | G | | aaaagugGcaccgagucggugcuususuuUu- | | |
| | | | | 3′ | | |
| mPCS | GA36 | CCCATAC | 69 | 5′cscscsAUACCUUGGAGCAACGG | 2306 | ABE |
| K9 | 2 | CTTGGA | | gUUUUAGagcuaGaaauagcaaGUUaAa | | |
| | | GCAACG | | AuAaggcuaGUccGUUsAucAAcuuGa | | |
| | | G | | aaaagugGcaccgagucggugcuususuuUu- | | |
| | | | | 3′ | | |
| mPCS | GA36 | CCCATAC | 69 | 5′cscscsAUACCUUGGAGCAACGG | 2307 | ABE |
| K9 | 3 | CTTGGA | | gUUUUAGagcuagaaauagcaaGUUaAa | | |
| | | GCAACG | | AuAaggcuaGUCcGUUAucAAcuugaa | | |
| | | G | | aaaguggcaccgagucggugcusususu-3′ | | |
| mPCS | GA36 | CCCATAC | 69 | 5′cscscsAUACCUUGGAGCAACGG | 2308 | ABE |
| K9 | 4 | CTTGGA | | gUUUUAGagcuagaaauagcaaGUUaAa | | |
| | | GCAACG | | AuAaggcuaGuCcGUUaucAAcuugaaa | | |
| | | G | | aaguggcaccgagucggugcusususu-3′ | | |
| mPCS | GA36 | CCCATAC | 69 | 5′cscscsAUACCUUGGAGCAACGG | 2309 | ABE |
| K9 | 5 | CTTGGA | | gUUUuagagcuagaaauagcaaGUUaAaA | | |
| | | GCAACG | | uaaggcuaGuccgUUaucaacuugaaaaagug | | |
| | | G | | gcaccgagucggugcusususu-3′ | | |
| mcPC | GA36 | CAGGTTC | 81 | 5′csasgsGUUCCAUGGGAUGCUCU | 3175 | SpCas |
| SK9 | 6 | CATGGG | | gUUUUAGagcuaGaaauagcaaGUUsaA | | 9 |
| | | ATGCTCT | | aAuAaggcuaGUccGUUsAucAAcuuG | | |
| | | | | 3′ | | |
| mcPC | GA36 | CAGGTTC | 81 | 5′csasgsGUUCCAUGGGAUGCUCU | 3176 | SpCas |
| SK9 | 7 | CATGGG | | gUUUUAGagcuaGaaauagcaaGUUsaA | | 9 |
| | | ATGCTCT | | aAuAaggcuaGUccGUUAucAAcuuGa | | |
| | | | | 3′ | | |
| mcPC | GA36 | CAGGTTC | 81 | 5′csasgsGUUCCAUGGGAUGCUCU | 3177 | SpCas |
| SK9 | 8 | CATGGG | | gUUUUAGagcuaGaaauagcaaGUUaAa | | 9 |
| | | ATGCTCT | | AuAaggcuaGUccGUUsAucAAcuuGa | | |
| | | | | 3′ | | |
| mcPC | GA36 | CAGGTTC | 81 | 5′csasgsGUUCCAUGGGAUGCUCU | 3178 | SpCas |
| SK9 | 9 | CATGGG | | gUUUUAGagcuaGaaauagcaaGUUsaA | | 9 |
| | | ATGCTCT | | aAuAaggcuaGUccGUUsAucAAcuuG | | |
| | | | | aaaaagugGcaccgagucggugcuususuuUu | | |
| | | | | -3′ | | |
| mcPC | GA37 | CAGGTTC | 81 | 5′csasgsGUUCCAUGGGAUGCUCU | 3179 | SpCas |
| SK9 | 0 | CATGGG | | gUUUUAGagcuaGaaauagcaaGUUsaA | | 9 |
| | | ATGCTCT | | aAuAaggcuaGUccGUUAucAAcuuGa | | |
| | | | | aaaagugGcaccgagucggugcuususuuUu- | | |
| | | | | 3′ | | |
| mcPC | GA37 | CAGGTTC | 81 | 5′csasgsGUUCCAUGGGAUGCUCU | 3180 | SpCas |
| SK9 | 1 | CATGGG | | gUUUUAGagcuaGaaauagcaaGUUaAa | | 9 |
| | | ATGCTCT | | AuAaggcuaGUccGUUsAucAAcuuGa | | |
| | | | | aaaagugGcaccgagucggugcuususuuUu- | | |
| | | | | 3′ | | |
| mcPC | GA37 | CAGGTTC | 81 | 5′csasgsGdUUdCCdAUdGGdGAdUG | 2132 | SpCas |
| SK9 | 2 | CATGGG | | dCUdCUgUUUUAGagcuagaaauagcaa | | 9 |
| | | ATGCTCT | | GUUaAaAuAaggcuaGUccGUUAucA | | |
| | | | | AcuugaaaaagugGcaccgagucggugcusus | | |
| | | | | usu-3′ | | |
| mcPC | GA37 | CAGGTTC | 81 | 5′csasgsdGUdUCdCAdUGdGGdAUd | 2133 | SpCas |
| SK9 | 3 | CATGGG | | GCdUCdUgUUUUAGagcuagaaauagc | | 9 |
| | | ATGCTCT | | aaGUUaAaAuAaggcuaGUccGUUAuc | | |
| | | | | AAcuugaaaaagugGcaccgagucggugcus | | |
| | | | | ususu-3′ | | |
| hPCS | GA37 | CCCGCA | 13 | 5′cscscsGCACCUUGGCGCAGCGGg | 10 | ABE |
| K9 | 4 | CCTTGGC | | UUUUAGagcuagaaauagcaaGUUaAaA | | |
| | | GCAGCG | | uAaggcuaGUccGUUAacAAcuugaaaaa | | |
| | | G | | gugGcaccgagucggugcusususu-3′ | | |
| hPCS | GA37 | CCCGCA | 13 | 5′cscscsGCACCUUGGCGCAGCGGg | 428 | ABE |
| K9 | 5 | CCTTGGC | | UUUUAGagcuagaaauagcaaGUUaAaA | | |
| | | GCAGCG | | uAaggcuaGUccGUUAacAAcgggaaacc | | |
| | | G | | gugGcaccgagucggugcusususu-3′ | | |
| hcPCS | GA37 | CCCGCA | 13 | 5′cscscsdGCdACdCUdUGdGCdGCd | 429 | ABE |
| K9 | 6 | CCTTGGC | | AGdCGdGgUUUUAGagcuaGaaauagc | | |
| | | GCAGCG | | aaGUUaAaAuAaggcuaGUccGUUAuc | | |
| | | G | | AAcuuGaaaaagugGcaccgagucggugcus | | |
| | | | | ususu-3′ | | |
| hcPCS | GA37 | CCCGCA | 13 | 5′cscscsGdCAdCCdUUdGGdCGdCA | 430 | ABE |
| K9 | 7 | CCTTGGC | | dGCdGGgUUUUAGagcuaGaaauagca | | |
| | | GCAGCG | | aGUUaAaAuAaggcuaGUccGUUAuc | | |
| | | G | | AAcuuGaaaaagugGcaccgagucggugcus | | |
| | | | | ususu-3′ | | |
| hcPCS | GA37 | CCCGCA | 13 | 5′cscscsGdCACCUdUGGdCGdCAGd | 1648 | ABE |
| K9 | 8 | CCTTGGC | | CGGgUUUUAGagcuaGaaauagcaaGU | | |
| | | GCAGCG | | UaAaAuAaggcuaGUccGUUAucAAcu | | |
| | | G | | uGaaaaagugGcaccgagucggugcusususu- | | |
| | | | | 3′ | | |
| hcPCS | GA37 | CCCGCA | 13 | 5′cscscsGCdACCUUdGGCdGCdAG | 1649 | ABE |
| K9 | 9 | CCTTGGC | | CdGGGUUUUAGAgUUUUAGagcua | | |
| | | GCAGCG | | GaaauagcaaGUUaAaAuAaggcuaGUcc | | |
| | | G | | GUUAucAAcuuGaaaaagugGcaccgagu | | |
| | | | | cggugcusususu-3′ | | |
| hcPCS | GA38 | CCCGCA | 13 | 5′cscscsGdCACCUUGGCGdCAGCG | 431 | ABE |
| K9 | 0 | CCTTGGC | | GgUUUUAGagcuaGaaauagcaaGUUa | | |
| | | GCAGCG | | AaAuAaggcuaGUccGUUAucAAcuuG | | |
| | | G | | aaaaagugGcaccgagucggugcusususu-3′ | | |
| hcPCS | GA38 | CCCGCA | 13 | 5′cscscsGCdACCUUGGCGCdAGCG | 432 | ABE |
| K9 | 1 | CCTTGGC | | GgUUUUAGagcuaGaaauagcaaGUUa | | |
| | | GCAGCG | | AaAuAaggcuaGUccGUUAucAAcuuG | | |
| | | G | | aaaaagugGcaccgagucggugcusususu-3′ | | |
| hcPCS | GA38 | CCCGCA | 13 | 5′cscscsGCACCUdUGGdCGCAGdC | 433 | ABE |
| K9 | 2 | CCTTGGC | | GGgUUUUAGagcuaGaaauagcaaGUU | | |
| | | GCAGCG | | aAaAuAaggcuaGUccGUUAucAAcuu | | |
| | | G | | GaaaaagugGcaccgagucggugcusususu- | | |
| | | | | 3′ | | |
| hcPCS | GA38 | CCCGCA | 13 | 5′cscscsGCACCUUdGGCdGCAGCd | 434 | ABE |
| K9 | 3 | CCTTGGC | | GGgUUUUAGagcuaGaaauagcaaGUU | | |
| | | GCAGCG | | aAaAuAaggcuaGUccGUUAucAAcuu | | |
| | | G | | GaaaaagugGcaccgagucggugcusususu- | | |
| | | | | 3′ | | |
| hcPCS | GA38 | CCCGCA | 13 | 5′cscscsdGdCdACCdUdUGGdCGCA | 435 | ABE |
| K9 | 4 | CCTTGGC | | dGCGdGgUUUUAGagcuaGaaauagca | | |
| | | GCAGCG | | aGUUaAaAuAaggcuaGUccGUUAuc | | |
| | | G | | AAcuuGaaaaagugGcaccgagucggugcus | | |
| | | | | ususu-3′ | | |
| hcPCS | GA38 | CCCGCA | 13 | 5′cscscsGCACCUUGGCGCAGCGGg | 11 | ABE |
| K9 | 5 | CCTTGGC | | UUUUAGagcuagaaauagcaaGUUaAaA | | |
| | | GCAGCG | | uAaggcuaGUccGUUAucAAcuugaaaa | | |
| | | G | | | | |
| hcPCS | GA38 | CCCGCA | 13 | 5′cscscsGCACCUUGGCGCAGCGGg | 2260 | ABE |
| K9 | 6 | CCTTGGC | | UUUUAGagcuagaaauagcaaGUUaAaA | | |
| | | GCAGCG | | uAaggcuaGUccGUUAucAAcuugaaaa | | |
| | | G | | agugGcaccgagucggugcusususuuUu-3′ | | |
| hcPCS | GA38 | CCCGCA | 13 | 5′cscscsGCACCUUGGCGCAGCGgU | 436 | ABE |
| K9 | 7 | CCTTGGC | | UUUAGagcuaGaaauagcaaGUUaAaAu | | |
| | | GCAGCG | | AaggcuaGUccGUUAucAAcuuGaaaaa | | |
| | | G | | gugGcaccgagucggugcuususuuuu-3′ | | |
| hcPCS | GA38 | CCCGCA | 13 | 5′cscscsGCACCUUGGCGCAGCGGg | 2261 | ABE |
| K9 | 8 | CCTTGGC | | UUUUAGagcuagaaauagcaaGUUaAaA | | |
| | | GCAGCG | | uAaggcuaGUCcGUUAucAAcuugaaaa | | |
| | | G | | aguggcaccgagucggugcusususu-3′ | | |
| hcPCS | GA38 | CCCGCA | 13 | 5′cscscsGCACCUUGGCGCAGCGGg | 2262 | ABE |
| K9 | 9 | CCTTGGC | | UUUUAGagcuagaaauagcaaGUUaAaA | | |
| | | GCAGCG | | uAaggcuaGuCcGUUaucAAcuugaaaaa | | |
| | | G | | guggcaccgagucggugcusususu | | |
| hcPCS | GA39 | CCCGCA | 13 | 5′cscscsGCACCUUGGCGCAGCGGg | 2310 | ABE |
| K9 | 0 | CCTTGGC | | UUUuagagcuagaaauagcaaGUUaAaAu | | |
| | | GCAGCG | | aaggcuaGuccgUUaucaacuugaaaaagugg | | |
| | | G | | caccgagucggugcusususu-3′ | | |
| hcPCS | GA39 | CCCGCA | 13 | 5′cscsGCACCUUGGCGCAGCGGgU | 437 | ABE |
| K9 | 1 | CCTTGGC | | UUUAGagcuaGaaauagcaaGUUaAaAu | | |
| | | GCAGCG | | AaggcuaGUccGUUAucAAcuuGaaaaa | | |
| | | G | | gugGcaccgagucggugcusususu-3′ | | |
| hANG | GA39 | AAGATA | 15 | 5′asgsAUACCUGAAUAACCCUCgU | 1650 | ABE |
| PTL3 | 2 | CCTGAAT | | UUUAGagcuaGaaauagcaaGUUaAaAu | | |
| | | AACCCTC | | AaggcuaGUccGUUAucAAcuuGaaaaa | | |
| | | | | gugGcaccgagucggugcusususu-3′ | | |
| hcPCS | GA39 | CAGCTCC | 1617 | 5′csasGCUCCAGGCGGUCCUGGgU | 2134 | |
| K9 | 3 | AGGCGG | | UUUAGagcuaGaaauagcaaGUUaAaAu | | |
| | | TCCTGG | | AaggcuaGUccGUUAucAAcuuGaaaaa | | |
| | | | | gugGcaccgagucggugcuususu-3′ | | |
| hcPCS | GA39 | TCAGCTC | 161 | 5′uscsasGCUCCAGGCGGUCCUGG | 2135 | SpCas |
| K9 | 4 | CAGGCG | | gUUUUAGagcuaGaaauagcaaGUUaAa | | 9 |
| | | GTCCTGG | | AuAaggcuaGUccGUUAucAAcuuGaa | | |
| | | | | aaagugGcaccgagucggugcuususu-3′ | | |
| hcPCS | GA39 | TCAGCTC | 161 | 5′uscsasGCUCCAGGCGGUCCUGG | 447 | SpCas |
| K9 | 5 | CAGGCG | | gUUUUAGagcuaGaaauagcaaGUUaAa | | 9 |
| | | GTCCTGG | | AuAaggcuaGUccGUUAucAAcuuGaa | | |
| | | | | 3′ | | |
| hcPCS | GA39 | TCAGCTC | 161 | 5′uscsasGCUCCAGGCGGUCCUGG | 448 | SpCas |
| K9 | 6 | CAGGCG | | gUUUUAGagcuaGaaauagcaaGUUsaA | | 9 |
| | | GTCCTGG | | aAuAaggcuaGUccGUUAucAAcuuGa | | |
| | | | | 3′ | | |
| hcPCS | GA39 | TCAGCTC | 161 | 5′uscsasGCUCCAGGCGGUCCUGG | 449 | SpCas |
| K9 | 7 | CAGGCG | | gUUUUAGagcuaGaaauagcaaGUUaAa | | 9 |
| | | GTCCTGG | | AuAaggcuaGUccGUUsAucAAcuuGa | | |
| | | | | 3′ | | |
| hcPCS | GA39 | TCAGCTC | 161 | 5′uscsasGCUCCAGGCGGUCCUGG | 2266 | SpCas |
| K9 | 8 | CAGGCG | | gUUUUAGagcuagaaauagcaaGUUaAa | | 9 |
| | | GTCCTGG | | AuAaggcuaGUCcGUUAucAAcuugaa | | |
| | | | | aaaguggcaccgagucggugcusususuuuu-3′ | | |
| hcPCS | GA39 | TCAGCTC | 161 | 5′uscsasGCUCCAGGCGGUCCUGG | 2267 | SpCas |
| K9 | 9 | CAGGCG | | gUUUUAGagcuagaaauagcaaGUUaAa | | 9 |
| | | GTCCTGG | | AuAaggcuaGuCcGUUaucAAcuugaaa | | |
| | | | | aaguggcaccgagucggugcusususuuuu-3′ | | |
| hcPCS | GA40 | TCAGCTC | 161 | 5′uscsasGCUCCAGGCGGUCCUGG | 2268 | SpCas |
| K9 | 0 | CAGGCG | | gUUUuagagcuagaaauagcaaGUUaAaA | | 9 |
| | | GTCCTGG | | uaaggcuaGuccgUUaucaacuugaaaaagug | | |
| | | | | gcaccgagucggugcusususuuuu-3′ | | |
| hcPCS | GA40 | TCAGCTC | 161 | 5′uscsasGCUCCAGGCGGUCCUGG | 2269 | SpCas |
| K9 | 1 | CAGGCG | | gUUUUAGagcuagaaauagcaaGUUaAa | | 9 |
| | | GTCCTGG | | AuAaggcuaGUccGUUAucAAcuugaaa | | |
| | | | | aagugGcaccgagucggugcusususuuuu-3′ | | |
| hcPCS | GA40 | TCAGCTC | 161 | 5′uscsasGCUCCAGGCGGUCCUGG | 2270 | SpCas |
| K9 | 2 | CAGGCG | | gUUUUAGagcuaGaaauagcaaGUUaAa | | 9 |
| | | GTCCTGG | | AuAaggcuaGUccGUUAucAAcuuGaa | | |
| | | | | aaagugGcaccgagucggugcusususuuUu- | | |
| | | | | 3′ | | |
| hcPCS | GA40 | TCAGCTC | 161 | 5′uscsasGCUCCAGGCGGUCCUGG | 2271 | SpCas |
| K9 | 3 | CAGGCG | | gUUUUAGagcuaGaaauagcaaGUUsaA | | 9 |
| | | GTCCTGG | | aAuAaggcuaGUccGUUAucAAcuuGa | | |
| | | | | aaaagugGcaccgagucggugcusususuuUu | | |
| | | | | -3′ | | |
| hcPCS | GA40 | TCAGCTC | 161 | 5′uscsasGCUCCAGGCGGUCCUGG | 2272 | SpCas |
| K9 | 4 | CAGGCG | | gUUUUAGagcuaGaaauagcaaGUUaAa | | 9 |
| | | GTCCTGG | | AuAaggcuaGUccGUUsAucAAcuuGa | | |
| | | | | aaaagugGcaccgagucggugcusususuuUu | | |
| | | | | -3′ | | |
| hcPCS | GA40 | TCAGCTC | 161 | 5′uscsasGCUCCAGGCGGUCCUGG | 2273 | SpCas |
| K9 | 5 | CAGGCG | | gUUUUAGagcuagaaauagcaaGUUaAa | | 9 |
| | | GTCCTGG | | AuAaggcuaGUCcGUUAucAAcuugaa | | |
| | | | | aaaguggcaccgagucggugcusususuuUu- | | |
| | | | | 3′ | | |
| hcPCS | GA40 | TCAGCTC | 161 | 5′uscsasGCUCCAGGCGGUCCUGG | 2274 | SpCas |
| K9 | 6 | CAGGCG | | gUUUUAGagcuagaaauagcaaGUUaAa | | 9 |
| | | GTCCTGG | | AuAaggcuaGuCcGUUaucAAcuugaaa | | |
| | | | | aaguggcaccgagucggugcusususuuUu-3′ | | |
| hcPCS | GA40 | TCAGCTC | 161 | 5′uscsasGCUCCAGGCGGUCCUGG | 2275 | SpCas |
| K9 | 7 | CAGGCG | | gUUUuagagcuagaaauagcaaGUUaAaA | | 9 |
| | | GTCCTGG | | uaaggcuaGuccgUUaucaacuugaaaaagug | | |
| | | | | gcaccgagucggugcusususuuUu-3′ | | |
| hcPCS | GA40 | TCAGCTC | 161 | 5′uscsasGCUCCAGGCGGUCCUGG | 2276 | SpCas |
| K9 | 8 | CAGGCG | | gUUUUAGagcuagaaauagcaaGUUaAa | | 9 |
| | | GTCCTGG | | AuAaggcuaGUccGUUAucAAcuugaaa | | |
| | | | | aagugGcaccgagucggugcusususuuUu-3′ | | |
| hcPCS | GA40 | TCAGCTC | 161 | 5′uscsasG(C- | 450 | SpCas |
| K9 | 9 | CAGGCG | | PACE)UCCAGGCGGUCCUGGgUU | | 9 |
| | | GTCCTGG | | UUAGagcuagaaauagcaaGUUaAaAuA | | |
| | | | | aggcuaGUccGUUAucAAcuugaaaaagu | | |
| | | | | gGcaccgagucggugcusususu-3′ | | |
| hcPCS | GA41 | TCAGCTC | 161 | 5′uscsasGCUCCAG(G- | 451 | SpCas |
| K9 | 0 | CAGGCG | | PACE)CGGUCCUGGgUUUUAGagc | | 9 |
| | | GTCCTGG | | uagaaauagcaaGUUaAaAuAaggcuaGU | | |
| | | | | ccGUUAucAAcuugaaaaagugGcaccgag | | |
| | | | | ucggugcusususu-3′ | | |
| hcPCS | GA43 | CCCGCA | 13 | 5′cscscsGCACCUUGGCGCAGCGGg | 2277 | ABE |
| K9 | 9 | CCTTGGC | | UUUUAGagcuaGaaauagcaGUUaAa | | |
| | | GCAGCG | | AuAaggcuaGUccGUUAucAAcuuGaa | | |
| | | G | | aaagugGcaccgagucggugcusususuUUu- | | |
| | | | | 3′ | | |
| hcPCS | GA44 | CCCGCA | 13 | 5′cscscsGCACCUUGGCGCAGCGGg | 2278 | ABE |
| K9 | 0 | CCTTGGC | | UUUUAGagcuagaaauagcaaGUUaAaA | | |
| | | GCAGCG | | uAaggcuaGUccGUUAucAAcuugaaaa | | |
| | | G | | agugGcaccgagucggugcusususuUUu-3′ | | |
| hANG | GA44 | AAGATA | 15 | 5′asasgsAUACCUGAAUAACCCUC | 2263 | ABE |
| PTL3 | 1 | CCTGAAT | | gUUUUAGagcuaGaaauagcaaGUUaAa | | |
| | | AACCCTC | | AuAaggcuaGUccGUUAucAAcuuGaa | | |
| | | | | aaagugGcaccgagucggugcusususu-3′ | | |
| hANG | GA44 | AAGATA | 15 | 5′asasgsAUACCUGAAUAACCCUC | 438 | ABE |
| PTL3 | 2 | CCTGAAT | | gUUUUAGagcuaGaaauagcaaGUUaAa | | |
| | | AACCCTC | | AuAaggcuaGUccGUUAucAAcuuGaa | | |
| | | | | aaagugGcaccgagucggugcusususuUUu- | | |
| | | | | 3′ | | |
| hANG | GA46 | AGATAC | 248 | 5′asgsasUACCUGAAUAACCCUCG | 2311 | ABE |
| PTL3 | 2 | CTGAAT | | UUUUAGAGCUAGAAAUAGCAAG | | |
| | | AACCCTC | | UUAAAAUAAGGCUAGUCCGUUA | | |
| | | | | UCAACUUGAAAAAGUGGCACCG | | |
| | | | | AGUCGGUGCUsususu-3′ | | |
| hANG | GA46 | GATACCT | 249 | 5′gsasUACCUGAAUAACCCUCGU | 2312 | ABE |
| PTL3 | 3 | GAATAA | | UUUAGAGCUAGAAAUAGCAAGU | | |
| | | CCCTC | | UAAAAUAAGGCUAGUCCGUUAU | | |
| | | | | CAACUUGAAAAAGUGGCACCGA | | |
| | | | | GUCGGUGCUsususu-3′ | | |
| hANG | GA46 | ATACCTG | 250 | 5′asusACCUGAAUAACCCUCGUU | 2313 | ABE |
| PTL3 | 4 | AATAAC | | UUAGAGCUAGAAAUAGCAAGUU | | |
| | | CCTC | | AAAAUAAGGCUAGUCCGUUAUC | | |
| | | | | AACUUGAAAAAGUGGCACCGAG | | |
| | | | | UCGGUGCUsususu-3′ | | |
| hANG | GA46 | AGATAC | 248 | 5′asgsAUACCUGAAUAACCCUCG | 2314 | ABE |
| PTL3 | 5 | CTGAAT | | UUUUAGAGCUAGAAAUAGCAAG | | |
| | | AACCCTC | | UUAAAAUAAGGCUAGUCCGUUA | | |
| | | | | UCAACUUGAAAAAGUGGCACCG | | |
| | | | | AGUCGGUGCUsususu-3′ | | |
| hANG | GA46 | GATACCT | 249 | 5′gsasUsACCUGAAUAACCCUCGU | 1651 | ABE |
| PTL3 | 6 | GAATAA | | UUUAGAGCUAGAAAUAGCAAGU | | |
| | | CCCTC | | UAAAAUAAGGCUAGUCCGUUAU | | |
| | | | | CAACUUGAAAAAGUGGCACCGA | | |
| | | | | GUCGGUGCUsususu-3′ | | |
| hANG | GA46 | ATACCTG | 250 | 5′asUsACCUGAAUAACCCUCGUU | 2315 | ABE |
| PTL3 | 7 | AATAAC | | UUAGAGCUAGAAAUAGCAAGUU | | |
| | | CCTC | | AAAAUAAGGCUAGUCCGUUAUC | | |
| | | | | AACUUGAAAAAGUGGCACCGAG | | |
| | | | | UCGGUGCUsususu-3′ | | |
| hANG | GA47 | AAGATA | 15 | 5′asasisAUACCUGAAUAACCCUCg | 439 | ABE |
| PTL3 | 2 | CCTGAAT | | UUUUAGagcuaGaaauagcaaGUUaAa | | |
| | | AACCCTC | | AuAaggcuaGUccGUUAucAAcuuGaa | | |
| | | | | aaagugGcaccgagucggugcusususu-3′ | | |
| hANG | GA47 | AAGATA | 15 | 5′asasisAUACCUIAAUAACCCUCg | 440 | ABE |
| PTL3 | 3 | CCTGAAT | | UUUUAGagcuaGaaauagcaaGUUaAa | | |
| | | AACCCTC | | AuAaggcuaGUccGUUAucAAcuuGaa | | |
| | | | | aaagugGcaccgagucggugcusususu-3′ | | |
| hANG | GA47 | AAGATA | 15 | 5′asasgsAUACCUIAAUAACCCUCg | 441 | ABE |
| PTL3 | 4 | CCTGAAT | | UUUUAGagcuaGaaauagcaaGUUaAa | | |
| | | AACCCTC | | AuAaggcuaGUccGUUAucAAcuuGaa | | |
| | | | | aaagugGcaccgagucggugcusususu-3′ | | |
| hANG | GA47 | AGATAC | 248 | 5′asgsasUACCUGAAUAACCCUCg | 442 | ABE |
| PTL3 | 5 | CTGAAT | | UUUUAGagcuaGaaauagcaaGUUaAa | | |
| | | AACCCTC | | AuAaggcuaGUccGUUAucAAcuuGaa | | |
| | | | | aaagugGcaccgagucggugcusususu-3′ | | |
| hANG | GA47 | GATACCT | 249 | 5′gsasUACCUGAAUAACCCUCgUU | 443 | ABE |
| PTL3 | 6 | GAATAA | | UUAGagcuaGaaauagcaaGUUaAaAuA | | |
| | | CCCTC | | aggcuaGUccGUUAucAAcuuGaaaaag | | |
| | | | | ugGcaccgagucggugcusususu-3′ | | |
| hANG | GA47 | ATACCTG | 250 | 5′asusACCUGAAUAACCCUCgUUU | 444 | ABE |
| PTL3 | 7 | AATAAC | | UAGagcuaGaaauagcaaGUUaAaAuAa | | |
| | | CCTC | | ggcuaGUccGUUAucAAcuuGaaaaagu | | |
| | | | | gGcaccgagucggugcusususu-3′ | | |
| CANG | GA51 | GATACCT | 1606 | 5′gsasUsACCUGAAUAACUCUCgU | 1652 | ABE |
| PTL3 | 7 | GAATAA | | UUUAGagcuaGaaauagcaaGUUaAaAu | | |
| | | CTCTC | | AaggcuaGUccGUUAucAAcuuGaaaaa | | |
| | | | | gugGcaccgagucggugcusususu-3′ | | |
| CANG | GA51 | ATACCTG | 1607 | 5′asusAsCCUGAAUAACUCUCgUU | 1653 | ABE |
| PTL3 | 8 | AATAAC | | UUAGagcuaGaaauagcaaGUUaAaAuA | | |
| | | TCTC | | aggcuaGUccGUUAucAAcuuGaaaaag | | |
| | | | | ugGcaccgagucggugcusususu-3′ | | |
| hANG | GA53 | AAGATA | 15 | 5′asasgsAUXCCUGAAUAACCCUC | 1654 | ABE |
| PTL3 | 9 | CCTGAAT | | gUUUUAGagcuaGaaauagcaaGUUaAa | | |
| | | AACCCTC | | AuAaggcuaGUccGUUAucAAcuuGaa | | |
| | | | | aaagugGcaccgagucggugcusususu-3′ | | |
| hANG | GA54 | AAGATA | 15 | 5′asasgsAUXCCUGXAUAACCCUC | 1655 | ABE |
| PTL3 | 0 | CCTGAAT | | gUUUUAGagcuaGaaauagcaaGUUaAa | | |
| | | AACCCTC | | AuAaggcuaGUccGUUAucAAcuuGaa | | |
| | | | | aaagugGcaccgagucggugcusususu-3′ | | |
| hANG | GA54 | AAGATA | 15 | 5′asasgsAUXCCUGAAUAXCCCUC | 1656 | ABE |
| PTL3 | 1 | CCTGAAT | | gUUUUAGagcuaGaaauagcaaGUUaAa | | |
| | | AACCCTC | | AuAaggcuaGUccGUUAucAAcuuGaa | | |
| | | | | aaagugGcaccgagucggugcusususu-3′ | | |
| hANG | GA54 | AAGATA | 15 | 5′asasgsAUXCCUGXAUXACCCUC | 1657 | ABE |
| PTL3 | 2 | CCTGAAT | | gUUUUAGagcuaGaaauagcaaGUUaAa | | |
| | | AACCCTC | | AuAaggcuaGUccGUUAucAAcuuGaa | | |
| | | | | aaagugGcaccgagucggugcusususu-3′ | | |
| hANG | GA54 | AAGATA | 15 | 5′asasgsXUXCCUGAAUAACCCUC | 1658 | ABE |
| PTL3 | 3 | CCTGAAT | | gUUUUAGagcuaGaaauagcaaGUUaAa | | |
| | | AACCCTC | | AuAaggcuaGUccGUUAucAAcuuGaa | | |
| | | | | aaagugGcaccgagucggugcusususu-3′ | | |
| hANG | GA54 | AAGATA | 15 | 5′asasgsXUXCCUGAAUAXCCCUC | 1659 | ABE |
| PTL3 | 4 | CCTGAAT | | gUUUUAGagcuaGaaauagcaaGUUaAa | | |
| | | AACCCTC | | AuAaggcuaGUccGUUAucAAcuuGaa | | |
| | | | | aaagugGcaccgagucggugcusususu-3′ | | |
| hANG | GA54 | AAGATA | 15 | 5′asasgsXUACCUGAAUXACCCUC | 1660 | ABE |
| PTL3 | 5 | CCTGAAT | | gUUUUAGagcuaGaaauagcaaGUUaAa | | |
| | | AACCCTC | | AuAaggcuaGUccGUUAucAAcuuGaa | | |
| | | | | aaagugGcaccgagucggugcusususu-3′ | | |
| hANG | GA54 | AAGATA | 15 | 5′asasgsAUACCUGXAUAACCCUC | 1661 | ABE |
| PTL3 | 6 | CCTGAAT | | gUUUUAGagcuaGaaauagcaaGUUaAa | | |
| | | AACCCTC | | AuAaggcuaGUccGUUAucAAcuuGaa | | |
| | | | | aaagugGcaccgagucggugcusususu-3′ | | |
| hANG | GA54 | AAGATA | 15 | 5′asasgsAUACCUGAAUAACUCUC | 445 | ABE |
| PTL3 | 7 | CCTGAAT | | gUUUUAGagcuaGaaauagcaaGUUaAa | | |
| | | AACCCTC | | AuAaggcuaGUccGUUAucAAcuuGaa | | |
| | | | | aaaguggcaccgagucggugcusususuUUu- | | |
| | | | | 3′ | | |
| hANG | GA54 | AAGATA | 15 | 5′asasgsAUACCUGXAUAXCCCUC | 1662 | ABE |
| PTL3 | 8 | CCTGAAT | | gUUUUAGagcuaGaaauagcaaGUUaAa | | |
| | | AACCCTC | | AuAaggcuaGUccGUUAucAAcuuGaa | | |
| | | | | aaagugGcaccgagucggugcusususu-3′ | | |

[0788] All patents and publications mentioned in this specification are herein incorporated by reference to the same extent as if each independent patent and publication was specifically and individually indicated to be incorporated by reference.

### OTHER EMBODIMENTS

[0789] From the foregoing description, it will be apparent that variations and modifications may be made to the disclosure described herein to adopt it to various usages and conditions. Such embodiments are also within the scope of the following claims.

[0790] The recitation of a listing of elements in any definition of a variable herein includes definitions of that variable as any single element or combination (or subcombination) of listed elements. The recitation of an embodiment herein includes that embodiment as any single embodiment, any portion of the embodiment, or in combination with any other embodiments or any portion thereof.

[0791] As is set forth herein, it will be appreciated that the disclosure comprises specific embodiments and examples of base editing systems to effect a nucleobase alteration in a gene and methods of using same for treatment of disease including compositions that comprise such base editing systems, designs and modifications thereto; and specific examples and embodiments describing the synthesis, manufacture, use, and efficacy of the foregoing individually and in combination including as pharmaceutical compositions for treating disease and for in vivo and in vitro delivery of active agents to mammalian cells under described conditions.

[0792] While specific examples and numerous embodiments have been provided to illustrate aspects and combinations of aspects of the foregoing, it should be appreciated and understood that any aspect, or combination thereof, of an exemplary or disclosed embodiment may be excluded therefrom to constitute another embodiment without limitation and that it is contemplated that any such embodiment can constitute a separate and independent claim. Similarly, it should be appreciated and understood that any aspect or combination of aspects of one or more embodiments may also be included or combined with any aspect or combination of aspects of one or more embodiments and that it is contemplated herein that all such combinations thereof fall within the scope of this disclosure and can be presented as separate and independent claims without limitation. Accordingly, it should be appreciated that any feature presented in one claim may be included in another claim; any feature presented in one claim may be removed from the claim to constitute a claim without that feature; and any feature presented in one claim may be combined with any feature in another claim, each of which is contemplated herein. The following enumerated clauses are further illustrative examples of aspects and combination of aspects of the foregoing embodiments and examples:

[0793] Following is the first example of enumerated clauses:

[0794] 1. A composition for editing a gene target comprising:
[0795] (i) a base editor fusion protein comprising a programmable DNA binding domain and a deaminase, or a mRNA encoding the same,
[0796] (ii) a guide RNA comprising a tracr sequence that serves as a binding scaffold for the base editor fusion protein, and a spacer sequence that corresponds to a protospacer on a PCSK9 gene,
[0797] wherein the guide RNA directs the base editor fusion protein to effect a nucleobase alteration in the PCSK9 gene in vivo when administered to a mammalian subject,
[0798] wherein when the guide RNA and the mRNA is administered at a total amount of at least 0.05 mg/kg, the base alteration occurs in at least 35% of whole liver cells in the mammalian subject as measured by next generation sequencing or Sanger sequencing.

[0799] 2. The composition of clause 1, wherein the mammalian subject is a cynomolgus monkey,
[0800] wherein when the guide RNA and the mRNA is administered at a total amount of at least 0.5 mg/kg, the base alteration occurs in at least 40% of whole liver cells in the cynomolgus monkey as measured by next generation sequencing or Sanger sequencing.

[0801] 3. The composition of clause 1, wherein the mammalian subject is a cynomolgus monkey,
[0802] wherein when the guide RNA and the mRNA is administered at a total amount of at least 1 mg/kg, the base alteration occurs in at least 45% of whole liver cells in the cynomolgus monkey as measured by next generation sequencing or Sanger sequencing.

[0803] 4. The composition of clause 1, wherein the mammalian subject is a cynomolgus monkey,
[0804] wherein when the guide RNA and the mRNA is administered at a total amount of at least 1.5 mg/kg, the base alteration occurs in at least 50% of whole liver cells in the cynomolgus monkey as measured by next generation sequencing or Sanger sequencing.

[0805] 5. The composition of clause 1, wherein the mammalian subject is a cynomolgus monkey,
[0806] wherein when the guide RNA and the mRNA is administered at a total amount of at least 3 mg/kg, the base alteration occurs in at least 55% of whole liver cells in the cynomolgus monkey as measured by next generation sequencing or Sanger sequencing.

[0807] 6. The composition of clause 1, wherein the mammalian subject is a mouse,
[0808] wherein when the guide RNA and the mRNA is administered at a total amount of at least 0.125 mg/kg, the base alteration occurs in at least 40% of whole liver cells in the mouse as measured by next generation sequencing or Sanger sequencing.

[0809] 7. The composition of clause 1, wherein the mammalian subject is a mouse,
[0810] wherein when the guide RNA and the mRNA is administered at a total amount of at least 0.5 mg/kg, the base alteration occurs in at least 45% of whole liver cells in the mouse as measured by next generation sequencing or Sanger sequencing.

[0811] 8. The composition of clause 1, wherein the mammalian subject is a mouse,
[0812] wherein when the guide RNA and the mRNA is administered at a total amount of at least 2 mg/kg, the base alteration occurs in at least 50% of whole liver cells in the mouse as measured by next generation sequencing or Sanger sequencing.

[0813] 9. The composition of clause 2, wherein the nucleobase alteration results in a reduction of at least 50% in blood low-density lipoprotein cholesterol (LDL-C) level in the subject as compared to prior to the administration.

[0814] 10. The composition of any one of clauses 1-9, wherein the protospacer is located in a splice site.

[0815] 11. The composition of any one of clauses 1-9, wherein the protospacer complementary sequence is in the antisense strand of the PCSK9 gene.

[0816] 12. The composition of any one of clauses 1-9, wherein the protospacer complementary sequence is in the sense strand of the PCSK9 gene.

[0817] 13. The composition of any one of clauses 1-12, wherein the base alteration happens outside of the protospacer on the PCSK9 gene (off-target sites),
[0818] wherein the editing percentages of off-target sites set forth in Table 11 are below or equal to the editing percentages set forth in Table 11, respectively.

[0819] 14. The composition of any one of clauses 1-13, wherein the deaminase is an adenine deaminase and wherein the nucleobase alteration is a A·T to G·C alteration.

[0820] 15. The composition of any one of clauses 1-14, wherein the programmable DNA binding domain comprises a nuclease inactive Cas9 or a Cas9 nickase.

[0821] 16. The composition of any one of clauses 1-15, wherein the nucleobase alteration is at a splice site of the PCSK9 gene.

[0822] 17. The composition of clause 16, wherein the nucleobase alteration is at a splice donor site of the PCSK9 gene.

[0823] 18. The composition of clause 17, wherein the splice donor site is at 5′ end of PCSK9 intron 1 as referenced in SEQ ID NO: 5.

[0824] 19. The composition of clause 16, wherein the nucleobase alteration is at a splice acceptor site of the PCSK9 gene.

[0825] 20. The composition of any one of clauses 1-19, wherein the nucleobase alteration results in a frame shift, a premature stop codon, an insertion or deletion in a transcript encoded by the PCSK9 gene.

[0826] 21. The composition of any one of clauses 1-20, wherein the nucleobase alteration results in an aberrant transcript encoded by the PCSK9 gene.

[0827] 22. The composition of any one of clauses 1-21, wherein the guide RNA is chemically modified.

[0828] 23. The composition of clause 16, wherein the tracr sequence of the guide RNA is chemically modified following the scheme depicted in FIG. 7.

[0829] 24. The composition of any one of clauses 1-22, wherein the spacer sequence comprises a PCSK9 ABE guide RNA spacer sequence set forth in Table 1.

[0830] 25. The composition of clause 24, wherein the guide RNA comprises the PCSK9 ABE guide RNA sequence of GA096, GA097, GA343, GA346, GA375-377, GA380-389, GA391, GA439 or GA440 as set forth in Table 1.

[0831] 26. The composition of any one of clauses 1-23, wherein the protospacer sequence comprises a PCSK9 ABE protospacer sequence set forth in Table 1.

[0832] 27. The composition of clause 26, wherein the protospacer comprises the sequence 5′-

(SEQ ID No: 13)
CCCGCACCTTGGCGCAGCGG-3′ or
(SEQ ID NO: 247)
5′-CCGCACCTTGGCGCAGCGG-3′

[0833] 28. The composition of any one of clauses 1-27, wherein the base editor fusion protein comprises an amino acid sequence of SEQ ID No: 2137.

[0834] 29. The composition of any one of clauses 1-28, wherein the GC % content of the mRNA sequence is greater than 50%.

[0835] 30. The composition of clause 29, wherein the GC % content of the mRNA sequence is greater than 56%.

[0836] 31. The composition of clause 30, wherein the GC % content of the mRNA sequence is greater than or equal to 63%.

[0837] 32. The composition of clause 29, wherein the mRNA comprises an adenine tTNA deaminase (TadA) region, a Cas9 region and a nuclear localization sequence (NLS) region.

[0838] 33. The composition of clause 32, wherein the mRNA further comprises a first linker region which connects the TadA region and the Cas9 region, and a second linker region which connects the Cas9 region and the NLS region.

[0839] 34. The composition of clause 32 or 33, wherein the GC % content of the TadA region is greater than 60%.

[0840] 35. The composition of clause 32 or 33, wherein the GC % content of the TadA region is greater than or equal to 70%.

[0841] 36. The composition of clause 32 or 33, wherein the GC % content of the Cas9 region is greater than 56%.

[0842] 37. The composition of clause 32 or 33, wherein the GC % content of the Cas9 region is greater than or equal to 62%.

[0843] 38. The composition of clause 32 or 33, wherein the GC % content of the NLS region is greater than 54%.

[0844] 39. The composition of clause 32 or 33, wherein the GC % content of the NLS region is greater than or equal to 63%.

[0845] 40. The composition of clause 33, wherein the GC % content of the first linker region is greater than 65%.

[0846] 41. The composition of clause 33, wherein the GC % content of the first linker region is greater than or equal to 79%.

[0847] 42. The composition of clause 33, wherein the GC % content of the second linker region is greater than 67%.

[0848] 43. The composition of clause 33, wherein the GC % content of the second linker region is greater than or equal to 83%.

[0849] 44. The composition of clause 33, wherein the GC % content of the TadA region is greater than 60%, the GC % content of the Cas9 region is greater than 56%, the GC % content of the NLS region is greater than 54%, the GC % content of the first linker region is greater than 65%, and the GC % content of the second linker region is greater than 67%.

[0850] 45. The composition of clause 29, wherein the mRNA comprises a mRNA sequence selected from Table 23.

[0851] 46. The composition of clause 45, wherein the mRNA comprises a mRNA sequence of SEQ ID No: 2136.

[0852] 47. The composition of any one of clauses 29-46, wherein the mRNA comprises a poly A tail.

[0853] 48. The composition of any one of clauses 1-47, further comprising a lipid nanoparticle (LNP) enclosing (i).

[0854] 49. The composition of clause 48, wherein the LNP further encloses (ii).

[0855] 50. The composition of clause 48, further comprising a second LNP enclosing (ii).

[0856] 51. The composition of any one of clauses 1-44, wherein the ratio of the guide RNA and the mRNA encoding the base editor fusion protein is about 1:10 to about 10:1 by weight.

[0857] 52. The composition of clause 51, wherein the ratio of the guide RNA and the mRNA encoding the base editor fusion protein is about 1:1, 1.5:1, 2:1, 3:1, 4:1, 1:1.5, 1:2, 1:3, or 1:4 by weight.

[0858] 53. The composition of clause 51, wherein the ratio of the guide RNA and the mRNA encoding the base editor fusion protein is about 1:1 by weight.

[0859] 54. A pharmaceutical composition comprising the composition of any one of the preceding clauses and a pharmaceutically acceptable carrier or excipient.

[0860] 55. A method for treating or preventing a condition in a subject in need thereof, the method comprising administering to the subject a therapeutically effective amount of the composition of clause 1.

[0861] 56. The method of clause 55, wherein the administration is via intravenous infusion.

[0862] 57. The method of clause 55 or 56, comprising sequential administration of a LNP enclosing (i) and a LNP enclosing (ii).

[0863] 58. The method of clause 55 or 56, comprising concurrent administration of the t LNP enclosing (i) and the LNP enclosing (ii).

[0864] 59. The method of clause 57, comprising administering a single dose of the LNP enclosing (ii) followed by staggered doses of the LNP enclosing (i) over an interval of 1 day.

[0865] 60. The method of clause 57, comprising administering a single dose of the LNP enclosing (ii) followed by staggered doses of the LNP enclosing (i) over an interval of 2 days.

[0866] 61. The method of clause 57, comprising administering a single dose of the LNP enclosing (ii) followed by staggered doses of the LNP enclosing (i) over an interval of 3 days.

[0867] 62. The method of clause 57, comprising administering a single dose of the LNP enclosing (ii) followed by staggered doses of the LNP enclosing (i) over an interval of 4 days.

[0868] 63. The method of clause 57, comprising administering a single dose of the LNP enclosing (ii) followed by staggered doses of the LNP enclosing (i) over an interval of 5 days.

[0869] 64. The method of clause 57, comprising administering a single dose of the LNP enclosing (ii) followed by staggered doses of the LNP enclosing (i) over an interval of 6 days.

[0870] 65. The method of clause 57, comprising administering a single dose of the LNP enclosing (ii) followed by staggered doses of the LNP enclosing (i) over an interval of 7 days.

[0871] 66. The method of clause 55 or 56, comprising administering a single dose of the LNP enclosing (i) and (ii).

[0872] 67. The method of clause 66, wherein the single dose of the LNP is at about 0.3 to about 3 mg/kg.

[0873] 68. The method of clause 66 or 67, comprising administering a treatment course of one or more treatments to the subject, wherein each one of the one or more treatment comprises one or more of the single doses of the LNP.

[0874] 69. The method of clause 68, comprising administering a treatment course of two to ten treatments.

[0875] 70. The method of clause 68, comprising administering a treatment course of two to five treatments.

[0876] 71. The method of clause 68, comprising administering a treatment course of two treatments 72. The method of clause 68, comprising administering a treatment course of three treatments.

[0877] 73. The method of clause 68, comprising administering a treatment course of four treatments.

[0878] 74. The method of clause 68, comprising administering a treatment course of five treatments.

[0879] 75. The method of any one of clauses 55-74, wherein the condition is an atherosclerotic cardiovascular disease.

[0880] 76. The method of any one of clauses 55-74, wherein the condition is an atherosclerotic vascular disease.

[0881] 77. The method of any one of clauses 55-74, wherein the subject is a human.

[0882] 78. A composition for editing a gene target comprising:
[0883] (i) a base editor fusion protein comprising a programmable DNA binding domain and a deaminase, or a mRNA encoding the same,
[0884] (ii) a guide RNA comprising a tracr sequence that serves as a binding scaffold for the base editor fusion protein, and a spacer sequence that corresponds to a protospacer on a PCSK9 gene,
[0885] wherein the guide RNA directs the base editor fusion protein to effect a nucleobase alteration in the PCSK9 gene in vivo when administered to a mammalian subject, and
[0886] wherein the guide RNA comprises the PCSK9 ABE guide RNA sequences as set forth in Table 1.

[0887] 79. A composition for editing a gene target comprising:
[0888] (i) a base editor fusion protein comprising a programmable DNA binding domain and a deaminase, or a mRNA encoding the same,
[0889] (ii) a guide RNA comprising a tracr sequence that serves as a binding scaffold for the base editor fusion protein, and a spacer sequence that corresponds to a protospacer on a PCSK9 gene,
[0890] wherein the guide RNA directs the base editor fusion protein to effect a nucleobase alteration in the PCSK9 gene in vivo when administered to a mammalian subject, and
[0891] wherein the mRNA comprises a sequence selected from Table 23.

[0892] 80. A method for treating or preventing an atherosclerotic cardiovascular disease in a subject in need thereof, the method comprising administering to the subject a therapeutically effective amount of a first composition, comprising
[0893] (i) a base editor fusion protein comprising a programmable DNA binding domain and a deaminase, or a mRNA encoding the same,
[0894] (ii) a guide RNA comprising a tracr sequence that serves as a binding scaffold for the base editor fusion protein, and a spacer sequence that corresponds to a protospacer on a PCSK9 gene,
[0895] wherein the guide RNA directs the base editor fusion protein to effect a nucleobase alteration in the PCSK9 gene in vivo when administered to a mammalian subject,
[0896] wherein when the guide RNA and the mRNA is administered at a total amount of at least 0.05 mg/kg, the base alteration occurs in at least 35% of whole liver cells in the mammalian subject as measured by next generation sequencing or Sanger sequencing; and a second composition, comprising
[0897] (i) a base editor fusion protein comprising a programmable DNA binding domain and a deaminase, or a mRNA encoding the same,
[0898] (ii) a guide RNA comprising a tracr sequence that serves as a binding scaffold for the base editor fusion protein, and a spacer sequence that corresponds to a protospacer on a ANGPTL3 gene,
[0899] wherein the guide RNA directs the base editor fusion protein to effect a nucleobase alteration in the ANGPTL3 gene in vivo when administered to a mammalian subject,
[0900] wherein when the guide RNA and the mRNA is administered at a total amount of at least 0.5 mg/kg, the base alteration occurs in at least 35% of whole liver cells in the mammalian subject as measured by next generation sequencing or Sanger sequencing.

[0901] 81. The method of clause 80, comprising sequential administration of the first composition and the second composition.

[0902] 82. The method of clause 81, comprising administering one or more doses of the first composition followed by one or more dose of the second composition.

[0903] 83. The method of clause 82, comprising administering one or more doses of the second composition followed by one or more dose of the first composition.

[0904] 84. The method of clause 80, comprising concurrent administration of the first composition and the second composition.

[0905] 85. The method of clause 84, comprising one or more doses of the first composition and the second composition.

[0906] 86. A composition for editing a gene target comprising:
[0907] (i) a base editor fusion protein comprising a programmable DNA binding domain and a deaminase, or a mRNA encoding the same,
[0908] (ii) a guide RNA comprising a tracr sequence that serves as a binding scaffold for the base editor fusion protein, and a spacer sequence that corresponds to a protospacer on a APOC3 gene,
[0909] wherein the guide RNA comprises the APOC3 ABE guide RNA sequence of GA300-303 as set forth in Table 24.

[0910] 87. A composition for editing a gene target comprising:
[0911] (i) a base editor fusion protein comprising a programmable DNA binding domain and a deaminase, or a mRNA encoding the same,
[0912] (ii) a guide RNA comprising a tracr sequence that serves as a binding scaffold for the base editor fusion protein, and a spacer sequence that corresponds to a protospacer on a PCSK9 gene,
[0913] wherein the guide RNA directs the base editor fusion protein to effect a nucleobase alteration in the PCSK9 gene in vitro,
[0914] wherein when the guide RNA and the mRNA is administered at a total amount of at least 2.5 mg/kg, the base alteration occurs in at least 35% of whole liver cells in the mammalian subject as measured by next generation sequencing or Sanger sequencing.

[0915] 88. A composition for editing a PCSK9 gene comprising:
[0916] (a) a mRNA encoding an adenine base editor protein having an editing window, and
[0917] (b) a guide RNA comprising a tracr sequence that serves as a binding scaffold for the base editor protein and a spacer sequence that serves to guide the base editor protein to a protospacer sequence on the PCSK9 gene,
[0918] wherein the spacer sequence is complimentary, at least in part, to a splice site or an exon region of the PCSK9 gene.

[0919] 89. The composition for editing the PCSK9 gene of clause 88, wherein when the base editor protein is operatively bound to the guide RNA and the guide RNA is hybridized with the complementary strand to the protospacer sequence on the PCSK9 gene, the editing window encompasses the splice site of the PCSK9 gene.

[0920] 90. The composition for editing the PCSK9 gene of clause 88, wherein when the base editor protein is operatively bound to the guide RNA and the guide RNA is hybridized with the complementary strand to the protospacer sequence on the PCSK9 gene, the editing window encompasses a region of an intron of the PCSK9 gene.

[0921] 91. The composition for editing the PCSK9 gene of clause 88, wherein when the base editor protein is operatively bound to the guide RNA and the guide RNA is hybridized with the complementary strand to the protospacer sequence on the PCSK9 gene, the editing window encompasses a region of intron 1, intron 3 or intron 4 of the PCSK9 gene.

[0922] 92. The composition for editing the PCSK9 gene of clause 88, wherein when the base editor protein is operatively bound to the guide RNA and the guide RNA is hybridized with the complementary strand to the protospacer sequence on the PCSK9 gene, the editing window encompasses a region of intron 1 of the PCSK9 gene.

[0923] 93. The composition for editing the PCSK9 gene of clause 88, wherein the spacer sequence has a 80-100% nucleotide sequence identity to a spacer sequence selected from the group of guide RNA sequences identified as GA066, GA073 and GA074.

[0924] 94. The composition for editing the PCSK9 gene of clause 88, wherein the tracr sequence has a 80-100% nucleotide sequence identity to a tracr sequence selected from the group of guide RNA sequences identified as GA066, GA095, GA096, GA097, GA343, GA346, GA375, GA376, GA377, GA380, GA381, GA382, GA383, GA384, GA385, GA386, GA387, GA388, GA389, GA439, and GA440.

[0925] 95. The composition for editing the PCSK9 gene of clause 88, wherein the mRNA has an 80-100% sequence identity to the mRNA sequences identified as MA002, MA004, MA040, MA0041, or MA045.

[0926] 96. The composition for editing the PCSK9 gene of clause 88, wherein the mRNA has one or more of the GC nucleotide region percentages set forth in the following table:

| | Average GC |
|---|---|
| Nucleotide region | Nucleotide Content |
| 27-213 | 67-73% |
| 389-661 | 67-71% |
| 735-829 | 63-74% |
| 4207-4286 | 67-70% |
| 4537-4569 | 65-73% |
| 4683-4741 | 62-67% |

[0927] 97. The composition for editing the PCSK9 gene of clause 88, wherein the mRNA has one or more of the GC nucleotide region percentages set forth in the following table:

| | Average GC |
|---|---|
| Nucleotide region | Nucleotide Content |
| 27-213 | At least 73% |
| 389-661 | At least 71% |
| 735-829 | At least 74% |
| 4207-4286 | At least 70% |
| 4537-4569 | At least 73% |
| 4683-4741 | At least 67% |

[0928] 98. The composition for editing the PCSK9 gene of clause 88, wherein the mRNA and gRNA are encapsulated within a lipid nanoparticle.

[0929] 99. The composition for editing the PCSK9 gene of clause 88, wherein the mRNA and gRNA are encapsulated within a lipid nanoparticle having the following:
[0930] LNP composition (mol %):
[0931] 40-65% iLipid
[0932] 2-20% DSPC
[0933] 1-5% PEG
[0934] Remaining mol % balance is cholesterol;
[0935] LNP Particle size: 55-120 nm Z average hydrodynamic diameter; and
[0936] Polydispersity index of <0.2 as determined by dynamic light scattering.

[0937] 100. The composition for editing the PCSK9 gene of clause 88, wherein the mRNA and gRNA are encapsulated within the lipid nanoparticle having an LNP particle size between 50-70 nm Z average hydrodynamic diameter.

[0938] 101. The composition for editing the PCSK9 gene of clause 88, wherein the composition when administered to a group of cynomolgus monkeys via intravenous infusion at a dose of approximately 0.5 mg of the guide RNA and mRNA combined total weight per kg of the cynomolgus monkey weight is capable of inducing adenine base editing at the PCSK9 target splice site in the liver of the cynomolgus monkeys with an average editing percentage of greater than 40 percent.

[0939] 102. The composition for editing the PCSK9 gene of clause 88, wherein the composition when administered to a group of cynomolgus monkeys via intravenous infusion at a dose of approximately 0.5 mg of the guide RNA and mRNA combined total weight per kg of the cynomolgus monkey weight is capable of inducing adenine base editing at the PCSK9 target splice site in the liver of the cynomolgus monkeys with an average editing percentage of greater than 50 percent.

[0940] 103. The composition for editing the PCSK9 gene of clause 88, wherein the composition when administered to a group of cynomolgus monkeys via intravenous infusion at a dose of approximately 0.5 mg of the guide RNA and mRNA combined total weight per kg of the cynomolgus monkey weight is capable of inducing adenine base editing at the PCSK9 target splice site in the liver of the cynomolgus monkeys with an average editing percentage of greater than 30 percent.

[0941] 104. The composition for editing the PCSK9 gene of clause 88, wherein the composition when administered to a group of cynomolgus monkeys via intravenous infusion at a dose of approximately 1 mg of the guide RNA and mRNA combined total weight per kg of the cynomolgus monkey weight is capable of inducing adenine base editing at the PCSK9 target splice site in the liver of the cynomolgus monkeys with an average editing percentage of greater than 40 percent.

[0942] 105. The composition for editing the PCSK9 gene of clause 88, wherein the composition when administered to a group of cynomolgus monkeys via intravenous infusion at a dose of approximately 1 mg of the guide RNA and mRNA combined total weight per kg of the cynomolgus monkey weight is capable of inducing adenine base editing at the PCSK9 target splice site in the liver of the cynomolgus monkeys with an average editing percentage of greater than 50 percent.

[0943] 106. The composition for editing the PCSK9 gene of clause 88, wherein the composition when administered to a group of cynomolgus monkeys via intravenous infusion at a dose of approximately 1 mg of the guide RNA and mRNA combined total weight per kg of the cynomolgus monkey weight is capable of inducing adenine base editing at the PCSK9 target splice site in the liver of the cynomolgus monkeys with an average editing percentage of greater than 60 percent.

[0944] 107. The composition for editing the PCSK9 gene of clause 88, wherein the composition when administered to a group of cynomolgus monkeys via intravenous infusion at a dose of approximately 1 mg of the guide RNA and mRNA combined total weight per kg of the cynomolgus monkey weight is capable of inducing adenine base editing at the PCSK9 target splice site in the liver of the cynomolgus monkeys with an average editing percentage of greater than 70 percent.

[0945] 108. The composition for editing the PCSK9 gene of clause 88, wherein the composition when administered to a group of cynomolgus monkeys via intravenous infusion at a dose of approximately 1.5 mg of the guide RNA and mRNA combined total weight per kg of the cynomolgus monkey weight is capable of inducing adenine base editing at the PCSK9 target splice site in the liver of the cynomolgus monkeys with an average editing percentage of greater than 40 percent.

[0946] 109. The composition for editing the PCSK9 gene of clause 88, wherein the composition when administered to a group of cynomolgus monkeys via intravenous infusion at a dose of approximately 1.5 mg of the guide RNA and mRNA combined total weight per kg of the cynomolgus monkey weight is capable of inducing adenine base editing at the PCSK9 target splice site in the liver of the cynomolgus monkeys with an average editing percentage of greater than 50 percent.

[0947] 110. The composition for editing the PCSK9 gene of clause 88, wherein the composition when administered to a group of cynomolgus monkeys via intravenous infusion at a dose of approximately 1.5 mg of the guide RNA and mRNA combined total weight per kg of the cynomolgus monkey weight is capable of inducing adenine base editing at the PCSK9 target splice site in the liver of the cynomolgus monkeys with an average editing percentage of greater than 60 percent.

[0948] 111. The composition for editing the PCSK9 gene of clause 88, wherein the composition when administered to a group of cynomolgus monkeys via intravenous infusion at a dose of approximately 1.5 mg of the guide RNA and mRNA combined total weight per kg of the cynomolgus monkey weight is capable of inducing adenine base editing at the PCSK9 target splice site in the liver of the cynomolgus monkeys with an average editing percentage of greater than 70 percent.

[0949] 112. The composition for editing the PCSK9 gene of clause 88, wherein the composition when at administered to a group of cynomolgus monkeys via intravenous infusion at a dose of approximately 1.5 mg of the guide RNA and mRNA combined total weight per kg of the cynomolgus monkey weight is capable of inducing adenine base editing at the PCSK9 target splice site in the liver of the cynomolgus monkeys with an average editing percentage of greater than 80 percent.

[0950] 113. The composition for editing the PCSK9 gene of clause 88, wherein the composition when administered to a group of cynomolgus monkeys via intravenous infusion at a dose of approximately 3 mg of the guide RNA and mRNA combined total weight per kg of the cynomolgus monkey weight is capable of inducing adenine base editing at the PCSK9 target splice site in the liver of the cynomolgus monkeys with an average editing percentage of greater than 40 percent.

[0951] 114. The composition for editing the PCSK9 gene of clause 88, wherein the composition when administered to a group of cynomolgus monkeys via intravenous infusion at a dose of approximately 3 mg of the guide RNA and mRNA combined total weight per kg of the cynomolgus monkey weight is capable of inducing adenine base editing at the PCSK9 target splice site in the liver of the cynomolgus monkeys with an average editing percentage of greater than 50 percent.

[0952] 115. The composition for editing the PCSK9 gene of clause 88, wherein the composition when administered to a group of cynomolgus monkeys via intravenous infusion at a dose of approximately 3 mg of the guide RNA and mRNA combined total weight per kg of the cynomolgus monkey weight is capable of inducing adenine base editing at the PCSK9 target splice site in the liver of the cynomolgus monkeys with an average editing percentage of greater than 60 percent.

[0953] 116. The composition for editing the PCSK9 gene of clause 88, wherein the composition when administered to a group of cynomolgus monkeys via intravenous infusion at a dose of approximately 3 mg of the guide RNA and mRNA combined total weight per kg of the cynomolgus monkey weight is capable of inducing adenine base editing at the PCSK9 target splice site in the liver of the cynomolgus monkeys with an average editing percentage of greater than 70 percent.

[0954] 117. The composition for editing the PCSK9 gene of clause 88, wherein the composition when administered to a group of cynomolgus monkeys via intravenous infusion at a dose of approximately 3 mg of the guide RNA and mRNA combined total weight per kg of the cynomolgus monkey weight is capable of inducing adenine base editing at the PCSK9 target splice site in the liver of the cynomolgus monkeys with an average editing percentage of greater than 80 percent.

[0955] 118. The compositions for editing the PCSK9 gene of clauses 87-117, wherein the percent editing is determined at 15 days after dosing through analysis of dosed cynomolgus monkey liver either via liver biopsy or necropsy of the monkey.

[0956] 119. The compositions for editing of the PCSK9 gene of clauses 87-117, wherein the percent editing is determined to be durably maintained by periodic liver biopsy testing of the dosed cynomolgus monkeys over a span of at least 168 days after dosing.

[0957] 120. The compositions for editing of the PCSK9 gene of clauses 87-117, wherein the percent editing is determined to be durably maintained by periodic liver biopsy testing of the dosed cynomolgus monkeys over a span of at least 300 days after dosing.

[0958] 121. The composition for editing the PCSK9 gene of clause 88, wherein the composition when administered to a group of cynomolgus monkeys via intravenous infusion at a dose of approximately 0.5 mg of the guide RNA and mRNA combined total weight per kg of cynomolgus monkey weight is capable of reducing PCSK9 protein in the plasma of the dosed cynomolgus monkeys on average of at least 35 percent as compared to baseline.

[0959] 122. The composition for editing the PCSK9 gene of clause 88, wherein the composition when administered to a group of cynomolgus monkeys via intravenous infusion at a dose of approximately 0.5 mg of the guide RNA and mRNA combined total weight per kg of cynomolgus monkey weight is capable of reducing PCSK9 protein in the plasma of the dosed cynomolgus monkeys on average of at least 40 percent as compared to baseline.

[0960] 123. The composition for editing the PCSK9 gene of clause 88, wherein the composition when administered to a group of cynomolgus monkeys via intravenous infusion at a dose of approximately 0.5 mg of the guide RNA and mRNA combined total weight per kg of monkey weight is capable of reducing PCSK9 protein in the plasma of the dosed cynomolgus monkeys on average of at least 50 percent as compared to baseline.

[0961] 124. The composition for editing the PCSK9 gene of clause 88, wherein the composition when administered to a group of cynomolgus monkeys via intravenous infusion at a dose of approximately 0.5 mg of the guide RNA and mRNA combined total weight per kg of cynomolgus monkey weight is capable of reducing PCSK9 protein in the plasma of the dosed monkeys on average of at least 60 percent as compared to baseline.

[0962] 125. The composition for editing the PCSK9 gene of clause 88, wherein the composition when administered to a group of cynomolgus monkeys via intravenous infusion at a dose of approximately 0.5 mg of the guide RNA and mRNA combined total weight per kg of cynomolgus monkey weight is capable of reducing PCSK9 protein in the plasma of the dosed cynomolgus monkeys on average of at least 70 percent as compared to baseline.

[0963] 126. The composition for editing the PCSK9 gene of clause 88, wherein the composition when administered to a group of cynomolgus monkeys via intravenous infusion at a dose of approximately 0.5 mg of the guide RNA and mRNA combined total weight per kg of cynomolgus monkey weight is capable of reducing PCSK9 protein in the plasma of the dosed cynomolgus monkeys on average of at least 80 percent as compared to baseline.

[0964] 127. The composition for editing the PCSK9 gene of clause 88, wherein the composition when administered to a group of cynomolgus monkeys via intravenous infusion at a dose of approximately 1 mg of the guide RNA and mRNA combined total weight per kg of cynomolgus monkey weight is capable of reducing PCSK9 protein in the plasma of the dosed cynomolgus monkeys on average of at least 35 percent as compared to baseline.

[0965] 128. The composition for editing the PCSK9 gene of clause 88, wherein the composition when administered to a group of cynomolgus monkeys via intravenous infusion at a dose of approximately 1 mg of the guide RNA and mRNA combined total weight per kg of cynomolgus monkey weight is capable of reducing PCSK9 protein in the plasma of the dosed cynomolgus monkeys on average of at least 40 percent as compared to baseline.

[0966] 129. The composition for editing the PCSK9 gene of clause 88, wherein the composition when administered to a group of cynomolgus monkeys via intravenous infusion at a dose of approximately 1 mg of the guide RNA and mRNA combined total weight per kg of monkey weight is capable of reducing PCSK9 protein in the plasma of the dosed cynomolgus monkeys on average of at least 50 percent as compared to baseline.

[0967] 130. The composition for editing the PCSK9 gene of clause 88, wherein the composition when administered to a group of cynomolgus monkeys via intravenous infusion at a dose of approximately 1 mg of the guide RNA and mRNA combined total weight per kg of cynomolgus monkey weight is capable of reducing PCSK9 protein in the plasma of the dosed cynomolgus monkeys on average of at least 60 percent as compared to baseline.

[0968] 131. The composition for editing the PCSK9 gene of clause 88, wherein the composition when administered to a group of cynomolgus monkeys via intravenous infusion at a dose of approximately 1 mg of the guide RNA and mRNA combined total weight per kg of cynomolgus monkey weight is capable of reducing PCSK9 protein in the plasma of the dosed cynomolgus monkeys on average of at least 70 percent as compared to baseline.

[0969] 132. The composition for editing the PCSK9 gene of clause 88, wherein the composition when administered to a group of cynomolgus monkeys via intravenous infusion at a dose of approximately 1 mg of the guide RNA and mRNA combined total weight per kg of cynomolgus monkey weight is capable of reducing PCSK9 protein in the plasma of the dosed cynomolgus monkeys on average of at least 80 percent as compared to baseline.

[0970] 133. The composition for editing the PCSK9 gene of clause 88, wherein the composition when administered to a group of cynomolgus monkeys via intravenous infusion at a dose of approximately 1.5 mg of the guide RNA and mRNA combined total weight per kg of cynomolgus monkey weight is capable of reducing PCSK9 protein in the plasma of the dosed cynomolgus monkeys on average of at least 35 percent as compared to baseline.

[0971] 134. The composition for editing the PCSK9 gene of clause 88, wherein the composition when administered to a group of cynomolgus monkeys via intravenous infusion at a dose of approximately 1.5 mg of the guide RNA and mRNA combined total weight per kg of cynomolgus monkey weight is capable of reducing PCSK9 protein in the plasma of the dosed cynomolgus monkeys on average of at least 40 percent as compared to baseline.

[0972] 135. The composition for editing the PCSK9 gene of clause 88, wherein the composition when administered to a group of cynomolgus monkeys via intravenous infusion at a dose of approximately 1.5 mg of the guide RNA and mRNA combined total weight per kg of cynomolgus monkey weight is capable of reducing PCSK9 protein in the plasma of the dosed cynomolgus monkeys on average of at least 50 percent as compared to baseline.

[0973] 136. The composition for editing the PCSK9 gene of clause 88, wherein the composition when administered to a group of cynomolgus monkeys via intravenous infusion at a dose of approximately 1.5 mg of the guide RNA and mRNA combined total weight per kg of cynomolgus monkey weight is capable of reducing PCSK9 protein in the plasma of the dosed cynomolgus monkeys on average of at least 60 percent as compared to baseline.

[0974] 137. The composition for editing the PCSK9 gene of clause 88, wherein the composition when administered to a group of cynomolgus monkeys via intravenous infusion at a dose of approximately 1.5 mg of the guide RNA and mRNA combined total weight per kg of cynomolgus monkey weight is capable of reducing PCSK9 protein in the plasma of the dosed cynomolgus monkeys on average of at least 70 percent as compared to baseline.

[0975] 138. The composition for editing the PCSK9 gene of clause 88, wherein the composition when administered to a group of cynomolgus monkeys via intravenous infusion at a dose of approximately 1.5 mg of the guide RNA and mRNA combined total weight per kg of cynomolgus monkey weight is capable of reducing PCSK9 protein in the plasma of the dosed cynomolgus monkeys on average of at least 80 percent as compared to baseline.

[0976] 139. The composition for editing the PCSK9 gene of clause 88, wherein the composition when administered to a group of cynomolgus monkeys via intravenous infusion at a dose of approximately 3 mg of the guide RNA and mRNA combined total weight per kg of cynomolgus monkey weight is capable of reducing PCSK9 protein in the plasma of the dosed cynomolgus monkeys on average of at least 35 percent as compared to baseline.

[0977] 140. The composition for editing the PCSK9 gene of clause 88, wherein the composition when administered to a group of cynomolgus monkeys via intravenous infusion at a dose of approximately 3 mg of the guide RNA and mRNA combined total weight per kg of cynomolgus monkey weight is capable of reducing PCSK9 protein in the plasma of the dosed cynomolgus monkeys on average of at least 40 percent as compared to baseline.

[0978] 141. The composition for editing the PCSK9 gene of clause 88, wherein the composition when administered to a group of cynomolgus monkeys via intravenous infusion at a dose of approximately 3 mg of the guide RNA and mRNA combined total weight per kg of cynomolgus monkey weight is capable of reducing PCSK9 protein in the plasma of the dosed cynomolgus monkeys on average of at least 50 percent as compared to baseline.

[0979] 142. The composition for editing the PCSK9 gene of clause 88, wherein the composition when administered to a group of cynomolgus monkeys via intravenous infusion at a dose of approximately 3 mg of the guide RNA and mRNA combined total weight per kg of cynomolgus monkey weight is capable of reducing PCSK9 protein in the plasma of the dosed cynomolgus monkeys on average of at least 60 percent as compared to baseline.

[0980] 143. The composition for editing the PCSK9 gene of clause 88, wherein the composition when administered to a group of cynomolgus monkeys via intravenous infusion at a dose of approximately 3 mg of the guide RNA and mRNA combined total weight per kg of cynomolgus monkey weight is capable of reducing PCSK9 protein in the plasma of the dosed cynomolgus monkeys on average of at least 70 percent as compared to baseline.

[0981] 144. The composition for editing the PCSK9 gene of clause 88, wherein the composition when administered to a group of cynomolgus monkeys via intravenous infusion at a dose of approximately 3 mg of the guide RNA and mRNA combined total weight per kg of cynomolgus monkey weight is capable of reducing PCSK9 protein in the plasma of the dosed cynomolgus monkeys on average of at least 80 percent as compared to baseline.

[0982] 145. The compositions for editing of the PCSK9 gene of clauses 121-144, wherein the reduction in plasma protein is determined at 15 days after dosing via blood sampling and analysis of the dosed cynomolgus monkey.

[0983] 146. The composition for editing the PCSK9 gene of clause 88, wherein the composition when administered to a group of cynomolgus monkeys via intravenous infusion at a dose of approximately 0.5 mg of the guide RNA and mRNA combined total weight per kg of monkey weight is capable of reducing LDL-C in the plasma of the dosed monkeys on average of at least 20 percent as compared to baseline.

[0984] 147. The composition for editing the PCSK9 gene of clause 88, wherein the composition when administered to a group of cynomolgus monkeys via intravenous infusion at a dose of approximately 0.5 mg of the guide RNA and mRNA combined total weight per kg of cynomolgus monkey weight is capable of reducing LDL-C in the plasma of the dosed cynomolgus monkeys on average of at least 25 percent as compared to baseline.

[0985] 148. The composition for editing the PCSK9 gene of clause 88, wherein the composition when administered to a group of cynomolgus monkeys via intravenous infusion at a dose of approximately 0.5 mg of the guide RNA and mRNA combined total weight per kg of cynomolgus monkey weight is capable of reducing LDL-C in the plasma of the dosed cynomolgus monkeys on average of at least 30 percent as compared to baseline.

[0986] 149. The composition for editing the PCSK9 gene of clause 88, wherein the composition when administered to a group of cynomolgus monkeys via intravenous infusion at a dose of approximately 0.5 mg of the guide RNA and mRNA combined total weight per kg of cynomolgus monkey weight is capable of reducing LDL-C in the plasma of the dosed cynomolgus monkeys on average of at least 35 percent as compared to baseline.

[0987] 150. The composition for editing the PCSK9 gene of clause 88, wherein the composition when administered to a group of cynomolgus monkeys via intravenous infusion at a dose of approximately 0.5 mg of the guide RNA and mRNA combined total weight per kg of cynomolgus monkey weight is capable of reducing LDL-C in the plasma of the dosed cynomolgus monkeys on average of at least 40 percent as compared to baseline.

[0988] 151. The composition for editing the PCSK9 gene of clause 88, wherein the composition when administered to a group of cynomolgus monkeys via intravenous infusion at a dose of approximately 0.5 mg of the guide RNA and mRNA combined total weight per kg of cynomolgus monkey weight is capable of reducing LDL-C in the plasma of the dosed cynomolgus monkeys on average of at least 45 percent as compared to baseline.

[0989] 152. The composition for editing the PCSK9 gene of clause 88, wherein the composition when administered to a group of cynomolgus monkeys via intravenous infusion at a dose of approximately 1 mg of the guide RNA and mRNA combined total weight per kg of cynomolgus monkey weight is capable of reducing LDL-C in the plasma of the dosed cynomolgus monkeys on average of at least 20 percent as compared to baseline.

[0990] 153. The composition for editing the PCSK9 gene of clause 88, wherein the composition when administered to a group of cynomolgus monkeys via intravenous infusion at a dose of approximately 1 mg of the guide RNA and mRNA combined total weight per kg of cynomolgus monkey weight is capable of reducing LDL-C in the plasma of the dosed cynomolgus monkeys on average of at least 25 percent as compared to baseline.

[0991] 154. The composition for editing the PCSK9 gene of clause 88, wherein the composition when administered to a group of cynomolgus monkeys via intravenous infusion at a dose of approximately 1 mg of the guide RNA and mRNA combined total weight per kg of cynomolgus monkey weight is capable of reducing LDL-C in the plasma of the dosed cynomolgus monkeys on average of at least 30 percent as compared to baseline.

[0992] 155. The composition for editing the PCSK9 gene of clause 88, wherein the composition when administered to a group of cynomolgus monkeys via intravenous infusion at a dose of approximately 1 mg of the guide RNA and mRNA combined total weight per kg of cynomolgus monkey weight is capable of reducing LDL-C in the plasma of the dosed cynomolgus monkeys on average of at least 35 percent as compared to baseline.

[0993] 156. The composition for editing the PCSK9 gene of clause 88, wherein the composition when administered to a group of cynomolgus monkeys via intravenous infusion at a dose of approximately 1 mg of the guide RNA and mRNA combined total weight per kg of cynomolgus monkey weight is capable of reducing LDL-C in the plasma of the dosed cynomolgus monkeys on average of at least 40 percent as compared to baseline.

[0994] 157. The composition for editing the PCSK9 gene of clause 88, wherein the composition when administered to a group of cynomolgus monkeys via intravenous infusion at a dose of approximately 1 mg of the guide RNA and mRNA combined total weight per kg of cynomolgus monkey weight is capable of reducing LDL-C in the plasma of the dosed cynomolgus monkeys on average of at least 45 percent as compared to baseline.

[0995] 158. The composition for editing the PCSK9 gene of clause 88, wherein the composition when administered to a group of cynomolgus monkeys via intravenous infusion at a dose of approximately 1 mg of the guide RNA and mRNA combined total weight per kg of cynomolgus monkey weight is capable of reducing LDL-C in the plasma of the dosed cynomolgus monkeys on average of at least 50 percent as compared to baseline.

[0996] 159. The composition for editing the PCSK9 gene of clause 88, wherein the composition when administered to a group of cynomolgus monkeys via intravenous infusion at a dose of approximately 1 mg of the guide RNA and mRNA combined total weight per kg of cynomolgus monkey weight is capable of reducing LDL-C in the plasma of the dosed cynomolgus monkeys on average of at least 55 percent as compared to baseline.

[0997] 160. The composition for editing the PCSK9 gene of clause 88, wherein the composition when administered to a group of cynomolgus monkeys via intravenous infusion at a dose of approximately 1 mg of the guide RNA and mRNA combined total weight per kg of cynomolgus monkey weight is capable of reducing LDL-C in the plasma of the dosed cynomolgus monkeys on average of at least 60 percent as compared to baseline.

[0998] 161. The composition for editing the PCSK9 gene of clause 88, wherein the composition when administered to a group of cynomolgus monkeys via intravenous infusion at a dose of approximately 1.5 mg of the guide RNA and mRNA combined total weight per kg of cynomolgus monkey weight is capable of reducing LDL-C in the plasma of the dosed cynomolgus monkeys on average of at least 20 percent as compared to baseline.

[0999] 162. The composition for editing the PCSK9 gene of clause 88, wherein the composition when administered to a group of cynomolgus monkeys via intravenous infusion at a dose of approximately 1.5 mg of the guide RNA and mRNA combined total weight per kg of cynomolgus monkey weight is capable of reducing LDL-C in the plasma of the dosed cynomolgus monkeys on average of at least 25 percent as compared to baseline.

[1000] 163. The composition for editing the PCSK9 gene of clause 88, wherein the composition when administered to a group of cynomolgus monkeys via intravenous infusion at a dose of approximately 1.5 mg of the guide RNA and mRNA combined total weight per kg of cynomolgus monkey weight is capable of reducing LDL-C in the plasma of the dosed cynomolgus monkeys on average of at least 30 percent as compared to baseline.

[1001] 164. The composition for editing the PCSK9 gene of clause 88, wherein the composition when administered to a group of cynomolgus monkeys via intravenous infusion at a dose of approximately 1.5 mg of the guide RNA and mRNA combined total weight per kg of cynomolgus monkey weight is capable of reducing LDL-C in the plasma of the dosed cynomolgus monkeys on average of at least 35 percent as compared to baseline.

[1002] 165. The composition for editing the PCSK9 gene of clause 88, wherein the composition when administered to a group of cynomolgus monkeys via intravenous infusion at a dose of approximately 1.5 mg of the guide RNA and mRNA combined total weight per kg of cynomolgus monkey weight is capable of reducing LDL-C in the plasma of the dosed cynomolgus monkeys on average of at least 40 percent as compared to baseline.

[1003] 166. The composition for editing the PCSK9 gene of clause 88, wherein the composition when administered to a group of cynomolgus monkeys via intravenous infusion at a dose of approximately 1.5 mg of the guide RNA and mRNA combined total weight per kg of cynomolgus monkey weight is capable of reducing LDL-C in the plasma of the dosed cynomolgus monkeys on average of at least 45 percent as compared to baseline.

[1004] 167. The composition for editing the PCSK9 gene of clause 88, wherein the composition when administered to a group of cynomolgus monkeys via intravenous infusion at a dose of approximately 1.5 mg of the guide RNA and mRNA combined total weight per kg of cynomolgus monkey weight is capable of reducing LDL-C in the plasma of the dosed cynomolgus monkeys on average of at least 50 percent as compared to baseline.

[1005] 168. The composition for editing the PCSK9 gene of clause 88, wherein the composition when administered to a group of cynomolgus monkeys via intravenous infusion at a dose of approximately 1.5 mg of the guide RNA and mRNA combined total weight per kg of cynomolgus monkey weight is capable of reducing LDL-C in the plasma of the dosed cynomolgus monkeys on average of at least 55 percent as compared to baseline.

[1006] 169. The composition for editing the PCSK9 gene of clause 88, wherein the composition when administered to a group of cynomolgus monkeys via intravenous infusion at a dose of approximately 1.5 mg of the guide RNA and mRNA combined total weight per kg of cynomolgus monkey weight is capable of reducing LDL-C in the plasma of the dosed cynomolgus monkeys on average of at least 60 percent as compared to baseline.

[1007] 170. The composition for editing the PCSK9 gene of clause 88, wherein the composition when administered to a group of cynomolgus monkeys via intravenous infusion at a dose of approximately 1.5 mg of the guide RNA and mRNA combined total weight per kg of cynomolgus monkey weight is capable of reducing LDL-C in the plasma of the dosed cynomolgus monkeys on average of at least 65 percent as compared to baseline.

[1008] 171. The composition for editing the PCSK9 gene of clause 88, wherein the composition when administered to a group of cynomolgus monkeys via intravenous infusion at a dose of approximately 3 mg of the guide RNA and mRNA combined total weight per kg of cynomolgus monkey weight is capable of reducing LDL-C in the plasma of the dosed cynomolgus monkeys on average of at least 20 percent as compared to baseline.

[1009] 172. The composition for editing the PCSK9 gene of clause 88, wherein the composition when administered to a group of cynomolgus monkeys via intravenous infusion at a dose of approximately 3 mg of the guide RNA and mRNA combined total weight per kg of cynomolgus monkey weight is capable of reducing LDL-C in the plasma of the dosed cynomolgus monkeys on average of at least 25 percent as compared to baseline.

[1010] 173. The composition for editing the PCSK9 gene of clause 88, wherein the composition when administered to a group of cynomolgus monkeys via intravenous infusion at a dose of approximately 3 mg of the guide RNA and mRNA combined total weight per kg of cynomolgus monkey weight is capable of reducing LDL-C in the plasma of the dosed cynomolgus monkeys on average of at least 30 percent as compared to baseline.

[1011] 174. The composition for editing the PCSK9 gene of clause 88, wherein the composition when administered to a group of cynomolgus monkeys via intravenous infusion at a dose of approximately 3 mg of the guide RNA and mRNA combined total weight per kg of cynomolgus monkey weight is capable of reducing LDL-C in the plasma of the dosed cynomolgus monkeys on average of at least 35 percent as compared to baseline.

[1012] 175. The composition for editing the PCSK9 gene of clause 88, wherein the composition when administered to a group of cynomolgus monkeys via intravenous infusion at a dose of approximately 3 mg of the guide RNA and mRNA combined total weight per kg of cynomolgus monkey weight is capable of reducing LDL-C in the plasma of the dosed cynomolgus monkeys on average of at least 40 percent as compared to baseline.

[1013] 176. The composition for editing the PCSK9 gene of clause 88, wherein the composition when administered to a group of cynomolgus monkeys via intravenous infusion at a dose of approximately 3 mg of the guide RNA and mRNA combined total weight per kg of cynomolgus monkey weight is capable of reducing LDL-C in the plasma of the dosed cynomolgus monkeys on average of at least 45 percent as compared to baseline.

[1014] 177. The composition for editing the PCSK9 gene of clause 88, wherein the composition when administered to a group of cynomolgus monkeys via intravenous infusion at a dose of approximately 3 mg of the guide RNA and mRNA combined total weight per kg of cynomolgus monkey weight is capable of reducing LDL-C in the plasma of the dosed cynomolgus monkeys on average of at least 50 percent as compared to baseline.

[1015] 178. The composition for editing the PCSK9 gene of clause 88, wherein the composition when administered to a group of cynomolgus monkeys via intravenous infusion at a dose of approximately 3 mg of the guide RNA and mRNA combined total weight per kg of cynomolgus monkey weight is capable of reducing LDL-C in the plasma of the dosed cynomolgus monkeys on average of at least 55 percent as compared to baseline.

[1016] 179. The composition for editing the PCSK9 gene of clause 88, wherein the composition when administered to a group of cynomolgus monkeys via intravenous infusion at a dose of approximately 3 mg of the guide RNA and mRNA combined total weight per kg of cynomolgus monkey weight is capable of reducing LDL-C in the plasma of the dosed cynomolgus monkeys on average of at least 60 percent as compared to baseline.

[1017] 180. The composition for editing the PCSK9 gene of clause 88, wherein the composition when administered to a group of cynomolgus monkeys via intravenous infusion at a dose of approximately 3 mg of the guide RNA and mRNA combined total weight per kg of cynomolgus monkey weight is capable of reducing LDL-C in the plasma of the dosed cynomolgus monkeys on average of at least 65 percent as compared to baseline.

[1018] 181. The compositions for editing the PCSK9 gene of clauses 148-182, wherein the reduction in LDL-C is determined at 15 days after dosing via blood sampling and analysis of the dosed cynomolgus monkey.

[1019] 182. The compositions for editing the PCSK9 gene of clauses 148-182, wherein the reduction in LDL-C is determined to be durably maintained over a span of at least 168 days by periodic blood sampling and analysis of the dosed cynomolgus monkey.

[1020] 183. The compositions for editing the PCSK9 gene of clauses 148-182, wherein the reduction in LDL-C is determined to be durably maintained over a span of at least 300 days by periodic blood sampling and analysis of the dosed cynomolgus monkey.

[1021] 184. The composition for editing the PCSK9 gene of clause 88, wherein the composition when administered to a group of cynomolgus monkeys via intravenous infusion at a dose of approximately 3 mg of the guide RNA and mRNA combined total weight per kg of cynomolgus monkey weight is capable of reducing lipoprotein (a) in the plasma of the dosed cynomolgus monkeys on average of at least 10 percent as compared to baseline.

[1022] 185. The composition for editing the PCSK9 gene of clause 88, wherein the composition when administered to a group of cynomolgus monkeys via intravenous infusion at a dose of approximately 3 mg of the guide RNA and mRNA combined total weight per kg of cynomolgus monkey weight is capable of reducing lipoprotein (a) level in the plasma of the dosed cynomolgus monkeys on average of at least 15 percent as compared to baseline.

[1023] 186. The composition for editing the PCSK9 gene of clause 88, wherein the composition when administered to a group of cynomolgus monkeys via intravenous infusion at a dose of approximately 3 mg of the guide RNA and mRNA combined total weight per kg of cynomolgus monkey weight is capable of reducing lipoprotein (a) level in the plasma of the dosed cynomolgus monkeys on average of at least 20 percent as compared to baseline.

[1024] 187. The composition for editing the PCSK9 gene of clause 88, wherein the composition when administered to a group of cynomolgus monkeys via intravenous infusion at a dose of approximately 3 mg of the guide RNA and mRNA combined total weight per kg of cynomolgus monkey weight is capable of reducing lipoprotein (a) level in the plasma of the dosed cynomolgus monkeys on average of at least 25 percent as compared to baseline.

[1025] 188. The composition for editing the PCSK9 gene of clause 88, wherein the composition when administered to a group of cynomolgus monkeys via intravenous infusion at a dose of approximately 3 mg of the guide RNA and mRNA combined total weight per kg of cynomolgus monkey weight is capable of reducing lipoprotein (a) level in the plasma of the dosed cynomolgus monkeys on average of at least 30 percent as compared to baseline.

[1026] 189. The composition for editing the PCSK9 gene of clause 88, wherein the composition when administered to a group of cynomolgus monkeys via intravenous infusion at a dose of approximately 3 mg of the guide RNA and mRNA combined total weight per kg of cynomolgus monkey weight is capable of reducing lipoprotein (a) level in the plasma of the dosed cynomolgus monkeys on average of approximately 35 percent as compared to baseline.

[1027] 190. The compositions for editing the PCSK9 gene of clauses 186-191, wherein the reduction in lipoprotein (a) is determined at 15 days after dosing via blood sampling and analysis of the dosed cynomolgus monkey.

[1028] 191. The compositions for editing the PCSK9 gene of clauses 186-191, wherein the reduction in lipoprotein (a) is determined to be durably maintained over a span of at least 224 days by periodic blood sampling and analysis of the dosed cynomolgus monkey.

[1029] 192. The compositions for editing the PCSK9 gene of clauses 186-191, wherein the reduction in lipoprotein (a) is determined to be durably maintained over a span of at least 300 days by periodic blood sampling and analysis of the dosed cynomolgus monkey.

[1030] 193. The compositions for editing the PCSK9 gene of clauses 101-194, wherein to the extent that the dosing of the cynomolgus monkeys results in elevation of AST, ALT, or Cytokines, the elevations resulting from the dosing of the composition are transient and resolved back to approximately baseline levels within 3-15 days after dosing.

[1031] 194. The composition for editing the PCSK9 gene of clauses 101-103, 121-126, 148-153, wherein the percent editing of PCSK9 is negligible outside of the liver, spleen and adrenal glands tissues as illustrated in FIG. 27.

[1032] 195. The compositions for editing the PCSK9 gene of clauses 101-107, 121-132, 148-162, wherein repeat dosing results is additive with respect to the editing percentage of PCSK9 editing percentage.

[1033] 196. The compositions for editing the PCSK9 gene of clause 195, wherein the repeat dosing does not elicit cytokine activation nor an immune response.

[1034] 197. The composition for editing the PCSK9 gene of clause 88, wherein the spacer sequence has at least 80% nucleotide correlation with the nucleotide sequence of a targeted protospacer on the PCSK9 gene, wherein an RNA nucleotide on the spacer sequence is in correlation with a DNA nucleotide of the protospacer if it has the same nucleotide as the DNA nucleotide in the same order and wherein uracil and thymine bases are considered the same nucleotide for purposes of determining correlation.

[1035] 198. The composition for editing the PCSK9 gene of clause 197, wherein the spacer sequence has at least 85% nucleotide correlation with the nucleotide sequence of a targeted protospacer on the PCSK9 gene.

[1036] 199. The composition for editing the PCSK9 gene of clause 197, wherein the spacer sequence has at least 90% nucleotide correlation with the nucleotide sequence of a targeted protospacer on the PCSK9 gene.

[1037] 200. The composition for editing the PCSK9 gene of clause 197, wherein the spacer sequence has at least 95% nucleotide correlation with the nucleotide sequence of a targeted protospacer on the PCSK9 gene.

[1038] 201. The composition for editing the PCSK9 gene of clause 197, wherein the spacer sequence has at least 99% nucleotide correlation with the nucleotide sequence of a targeted protospacer on the PCSK9 gene.

[1039] 202. The composition for editing the PCSK9 gene of clause 197, wherein the spacer sequence has at least 100% nucleotide correlation with the nucleotide sequence of a targeted protospacer on the PCSK9 gene.

[1040] 203. A method for treating or preventing an atherosclerotic cardiovascular disease in a subject in need thereof, the method comprising administering to the subject a therapeutically effective amount of
[1041] (a) a mRNA encoding an adenine base editor protein having an editing window,
[1042] (b) a first guide RNA comprising a tracr sequence that serves as a binding scaffold for the base editor protein and a spacer sequence that serves to guide the base editor protein to a protospacer sequence on a PCSK9 gene, wherein the spacer sequence is complimentary, at least in part, to a splice site or an exon region of the PCSK9 gene; and
[1043] (c) a second guide RNA comprising a tracr sequence that serves as a binding scaffold for the base editor protein and a spacer sequence that serves to guide the base editor protein to a protospacer sequence on a ANGPTL3 gene, wherein the spacer sequence is complimentary, at least in part, to a splice site or an exon region of the ANGPTL3 gene.

[1044] 204. The method of clause 203, further comprising a first LNP enclosing (a).

[1045] 205. The method of clause 204, wherein the first LNP encloses (b) and (c).

[1046] 206. The method of clause 204, wherein the first LNP was administered repeatedly.

[1047] 207. The method of clause 204, wherein the first LNP was administered repeatedly at an interval of one to sixty days.

[1048] 208. The method of clause 204, wherein the first LNP was administered repeatedly at an interval of seven days.

[1049] 209. The method of clause 204, wherein the first LNP further encloses (b).

[1050] 210. The method of clause 209, further comprising a second LNP enclosing (a) and (c).

[1051] 211. The method of clause 210, wherein the first LNP and the second LNP are administered sequentially.

[1052] 212. The method of clause 211, wherein the first LNP and the second LNP are administered sequentially at an interval of one day to 12 months.

[1053] 213. The method of clause 212, wherein the interval is one day.

[1054] 214. The method of clause 212, wherein the interval is five days.

[1055] 215. The method of clause 212, wherein the interval is ten days.

[1056] 216. The method of clause 212, wherein the interval is fifteen days.

[1057] 217. The method of clause 212, wherein the interval is twenty days.

[1058] 218. The method of clause 212, wherein the interval is twenty-five days.

[1059] 219. The method of clause 212, wherein the interval is one month.

[1060] 220. The method of clause 212, wherein the interval is two months.

[1061] 221. The method of clause 212, wherein the interval is three months.

[1062] 222. The method of clause 212, wherein the interval is five months.

[1063] 223. The method of clause 212, wherein the interval is eight months.

[1064] 224. The method of clause 212, wherein the interval is ten months.

[1065] 225. The method of clause 212, wherein the interval is twelve months.

[1066] Following is the second example of enumerated clauses:

[1067] 1. A single guide RNA that comprises: (a) a spacer sequence, wherein the spacer sequence comprises (i) one or more chemical modification(s) and (ii) one or more unmodified nucleotide(s) at select position(s), and (b) a tracr sequence having at least 70% identity to SEQ ID NO: 61, wherein the tracr sequence serve as a binding scaffold for a Type II Cas protein, and wherein the tracr sequence comprises (i) one or more chemical modification(s) and (ii) one or more unmodified nucleotide(s) at select position(s).

[1068] 2. The single guide RNA of clause 1, wherein the spacer sequence hybridizes with a target polynucleotide sequence in a gene of interest when contacted with the target polynucleotide sequence, wherein the single guide RNA directs the Cas protein to effect alteration in the gene when administered to a mammalian subject.

[1069] 3. The single guide RNA of clause 1 or 2, wherein the tracr sequence comprises unmodified nucleotides at positions 2 to 7, 23 to 25, 27, 29, 31, 38, 39, 42 to 45 48, 49 and 62 as numbered in SEQ ID NO: 61 or a corresponding position thereof.

[1070] 4. The single guide RNA of clause 1 or 2, wherein the tracr sequence comprises unmodified nucleotides at positions 2 to 7, 13, 23 to 25, 27, 29, 31, 38, 39, 42 to 45, 48, 49, 53 and 62 as numbered in SEQ ID NO: 61 or a corresponding position thereof.

[1071] 5. The single guide RNA of clause 1 or 2, wherein the tracr sequence comprises unmodified nucleotides at positions 2 to 7, 13, 23 to 25, 27, 29, 31, 38, 39, 42 to 45, 48, 49, 53, 61, 68, 70 and 11 as numbered in SEQ ID NO: 61 or a corresponding position thereof.

[1072] 6. The single guide RNA of any one of clauses 1 to 3, wherein the tracr sequence comprises modified nucleotides at positions 1, 8 to 22, 26, 28, 30, 32 to 37, 40, 41, 46, 47, 50 to 61, and 63 to 80 as numbered in SEQ ID NO: 61 or a corresponding position thereof.

[1073] 7. The single guide RNA of any one of clauses 1 to 3, wherein the tracr sequence comprises modified nucleotides at positions 1, 8 to 12, 14 to 22, 26, 28, 30, 32 to 37, 40, 41, 46, 47, 50 to 52, 54 to 61, and 63 to 80 as numbered in SEQ ID NO: 61 or a corresponding position thereof.

[1074] 8 The single guide RNA of any one of clauses 1 to 7, wherein the tracr sequence comprises modified nucleotides at positions 1, 8 to 12, 14 to 22, 26, 28, 30, 32 to 34, 37, 41, 46, 47, 50 to 52, 54 to 60, 62 to 67, 69 and 72 to 80 as numbered in SEQ ID NO: 61 or a corresponding position thereof.

[1075] 9. The single guide RNA of any one of clauses 3 to 8, wherein more than 60% of the nucleotides in the tracr sequence with SEQ ID NO: 61 are modified.

[1076] 10. The single guide RNA of clauses 9, wherein more than 70% of the nucleotides in the tracr sequence with SEQ ID NO: 61 are modified.

[1077] 11. The single guide RNA of any one of clauses 1 to 10, wherein the tracr sequence comprises unmodified nucleotides at positions 13, 49, 53 and 62 as numbered in SEQ ID NO: 61 or a corresponding position thereof.

[1078] 12. The single guide RNA of any one of clauses 11, wherein the tracr sequence comprises unmodified nucleotides at positions 49 and 62 as numbered in SEQ ID NO: 61 or a corresponding position thereof.

[1079] 13. The single guide RNA of any one of clauses 1 to 10, wherein the tracr sequence comprises unmodified nucleotides at positions 13, 40, 49, 53, 61, 68, 70 and 71 as numbered in SEQ ID NO: 61 or a corresponding position thereof.

[1080] 14. The single guide RNA of any one of clause 13, wherein the tracr sequence comprises unmodified nucleotides at positions 13, 49 and 53 as numbered in SEQ ID NO: 61 or a corresponding position thereof.

[1081] 15. The single guide RNA of any one of clauses 1 to 10, wherein the tracr sequence comprises modified nucleotides at positions 1, 8, 21, 22, 26, 28, 30, 32 to 37, 40, 41, 46 and 47 as numbered in SEQ ID NO: 61 or a corresponding position thereof.

[1082] 16. The single guide RNA of any one of clauses 1-15, wherein the tracr sequence comprises at least 80% identity to SEQ ID NO: 61.

[1083] 17. The single guide RNA of any one of clauses 1-15, wherein the tracr sequence comprises at least 90% identity to SEQ ID NO: 61.

[1084] 18. The single guide RNA of any one of clauses 1-17, wherein the chemical modification comprises a 2′-OMe modification.

[1085] 19. The single guide RNA of any one of clauses 1-17, wherein the chemical modification comprises a nebularin or a deoxynebularin.

[1086] 20. The single guide RNA of any one of clauses 1-17, wherein the chemical modification comprises a phosphorothioate linkage.

[1087] 21. The single guide RNA of any one of clauses 1-20, wherein the tracr sequence comprises SEQ ID No. 61, and wherein the single guide RNA further comprises one or more phosphorothioate linkage at a 5′ end, at a 3′ end, at select internal positions or any combinations thereof.

[1088] 22. The single guide RNA of clause 21, wherein the single guide RNA further comprises two and no more than two contiguous phosphorothioate linkages at the 5′ end, at the 3′ end or both.

[1089] 23. The single guide RNA of clause 21, wherein the single guide RNA further comprises three contiguous phosphorothioate linkages at the 5′ end, at the 3′ end or both.

[1090] 24. The single guide RNA of any one of clauses 1-21, wherein the single guide RNA comprises the sequence 5′-ususuNNN-3′ at the 3′end, wherein N independently indicates a unmodified ribonucleotide, and wherein each u indicates 2′-O-methyluridine and each s indicates phosphorothioate linkage.

[1091] 25. The single guide RNA of clauses 24, wherein each N is uridine.

[1092] 26. The single guide RNA of any one of clauses 1-21, wherein the single guide RNA comprises the sequence 5′-ususuNNn-3′ at the 3′end, wherein each N independently indicates a unmodified ribonucleotide, wherein the n indicates a modified nucleotide, wherein each u indicates 2′-O-methyluridine and wherein each s indicates phosphorothioate linkage.

[1093] 27. The single guide RNA of clauses 26, wherein each N is uridine and the n is 2′-O-methyluridine.

[1094] 28. A single guide RNA that comprises (i) a spacer sequence and (ii) a tracr sequence, wherein the spacer sequence hybridizes with a target polynucleotide sequence in a PCSK9 gene or an ANGPTL3 gene when contacted with the target polynucleotide sequence, wherein the tracr sequence binds a Type II Cas protein when contacted with the Type II Cas protein, and wherein the single guide RNA comprises a nebularine, a deoxynebularine, or a 2′-O-methylnebularine.

[1095] 29. A single guide RNA that comprises (i) a spacer sequence and (ii) a tracr sequence, wherein the spacer sequence hybridizes with a target polynucleotide sequence in a PCSK9 gene or an ANGPTL3 gene when contacted with the target polynucleotide sequence, wherein the tracr sequence binds a Type II Cas protein when contacted with the Type II Cas protein, and wherein the single guide RNA comprises two and no more than two phosphorothioate linkages at a 5′ end or at a 3′ end.

[1096] 30. The single guide RNA of clause 29, wherein the single guide RNA comprises two and no more than two phosphorothioate linkages at the 5′ end and at the 3′ end.

[1097] 31. The single guide RNA of clause 29, wherein the single guide RNA comprises three phosphorothioate linkages at the 5′ end.

[1098] 32. The single guide RNA of clause 29, wherein the single guide RNA comprises three phosphorothioate linkages at the 3′ end.

[1099] 33. The single guide RNA of clause 29, wherein the two phosphorothioate linkages at the 5′ end are two contiguous phosphorothioate linkages at the first two nucleotide positions of the 5′ end.

[1100] 34. The single guide RNA of clause 29, wherein the two phosphorothioate linkages at the 5′ end are within the first 3-10 nucleotides of the 5′ end.

[1101] 35. The single guide RNA of clause 29, wherein the two phosphorothioate linkages at the 3′ end are two contiguous phosphorothioate linkages at the last two nucleotide positions of the 3′ end.

[1102] 36. The single guide RNA of clause 29, wherein the two phosphorothioate linkages at the 3′ end are within the last 3-10 nucleotides of the 3′ end.

[1103] 37. The single guide RNA of clause 29 comprising the sequence 5′-UsUsUs-3′ at the 3′ end, wherein U indicates a uridine and s indicates a phosphorothioate linkage.

[1104] 38. The single guide RNA of clause 29 comprising the sequence 5′-UUU-3′ at the 3′end.

[1105] 39. The single guide RNA of any one of clauses 1-27, wherein the tracr sequence binds the Type II Cas protein with increased binding affinity compared to a tracr sequence in an unmodified single guide RNA.

[1106] 40. The single guide RNA of any one of clauses 28-38, wherein the Type II Cas protein is a Cas9 protein.

[1107] 41. The single guide RNA of clause 40, wherein the Cas9 protein is a Streptococcus pyogenes Cas9.

[1108] 42. A single guide RNA that comprises a guide RNA sequence selected from Table 1, wherein a, u, g, and c indicate 2′-OMe modified adenine, uridine, guanine, and cytidine, wherein s indicates a phosphorothioate linkage, wherein X indicates a nebularine, wherein x indicates a 2′-O-methylnebularine and wherein dX indicates a 2′-deoxynebularine.

[1109] 43. A pharmaceutical composition for gene modification comprising the single guide RNA of any one of clauses 1-42 and a Type II Cas protein or a nucleic acid sequence encoding the Type II Cas protein.

[1110] 44. The pharmaceutical composition of clause 43 further comprising a vector that comprises the nucleic acid sequence encoding the Type II Cas protein.

[1111] 45. The pharmaceutical composition of clause 43 or 44, wherein the Type II Cas protein is a Cas9.

[1112] 46. The pharmaceutical composition of any one of clauses 43-45 further comprising a pharmaceutically acceptable carrier.

[1113] 47. A lipid nanoparticle comprising the pharmaceutical composition of any one of clauses 43-46.

[1114] 48. A method for modifying a target polynucleotide sequence in a cell comprising introducing into the cell the pharmaceutical composition of any one of clauses 43-46, wherein the single guide RNA directs the Type II Cas protein to effect a modification in the target polynucleotide sequence in the cell.

[1115] 49. The method of clause 48, wherein the target polynucleotide sequence is in a PCSK9 gene.

[1116] 50. The method of clause 49, wherein the modification reduces expression of functional PCSK9 protein encoded by the PCSK9 gene in the cell.

[1117] 51. The method of clause 50, wherein the target polynucleotide sequence is in an ANGPTL3 gene.

[1118] 52. The method of clause 51 wherein the modification reduces expression of functional ANGPTL3 protein encoded by the ANGPTL3 gene in the cell.

[1119] 53. The method of any one of clauses 48-52, wherein the introduction is performed via a lipid nanoparticle that comprises the composition.

[1120] 54. A method for treating or preventing a condition in a subject in need thereof, the method comprising administering to the subject the pharmaceutical composition of any one of clauses 43-46 or the lipid nanoparticle of clause 47, wherein the single guide RNA directs the Type II Cas protein to effect a modification in a target polynucleotide sequence in a cell of the subject, thereby treating or preventing the condition.

[1121] 55. The method of clause 54, wherein the target polynucleotide sequence is in a PCSK9 gene.

[1122] 56. The method of clause 54, wherein the target polynucleotide sequence is in an ANGPTL3 gene.

[1123] 57. The method of clause 55, wherein the modification reduces expression of functional PCSK9 protein encoded by the PCSK9 gene in the subject.

[1124] 58. The method of clause 56, wherein the modification reduces expression of functional ANGPTL3 protein encoded by the ANGPTL3 gene in the subject.

[1125] 59. The method of any one of clauses 48-58 wherein the condition is an atherosclerotic vascular disease.

[1126] 60. The method of any one of clauses 48-58, wherein the condition is an atherosclerotic vascular disease, hypertriglyceridemia, or diabetes.

[1127] 61. The method of any one of clauses 48-60, wherein the subject exhibits a reduced blood LDL cholesterol level, and/or a reduced blood triglycerides level as compared to before the administration.

[1128] Following is the third example of enumerated clauses:

[1129] 1. A composition for editing a gene target comprising:
[1130] (i) a base editor fusion protein comprising a programmable DNA binding domain and a deaminase, or a mRNA encoding the same,
[1131] (ii) a guide RNA comprising a tracr sequence that serves as a binding scaffold for the base editor fusion protein, and a spacer sequence that corresponds to a protospacer on a ANGPTL3 gene,
[1132] wherein the guide RNA directs the base editor fusion protein to effect a nucleobase alteration in the ANGPTL3 gene in vivo when administered to a mammalian subject,
[1133] wherein when the guide RNA and the mRNA is administered at a total amount of at least 0.5 mg/kg, the base alteration occurs in at least 35% of whole liver cells in the mammalian subject as measured by next generation sequencing or Sanger sequencing.

[1134] 2. The composition of clause 1, wherein the mammalian subject is a cynomolgus monkey,
[1135] wherein when the guide RNA and the mRNA is administered at a total amount of about 1 mg/kg, the base alteration occurs in at least 35% of whole liver cells in the cynomolgus monkey as measured by next generation sequencing or Sanger sequencing.

[1136] 3. The composition of clause 1, wherein the mammalian subject is a cynomolgus monkey,
[1137] wherein when the guide RNA and the mRNA is administered at a total amount of about 3 mg/kg, the base alteration occurs in at least 50% of whole liver cells in the cynomolgus monkey as measured by next generation sequencing or Sanger sequencing.

[1138] 4. The composition of clause 2, wherein the nucleobase alteration results in a reduction of at least 20% in blood triglyceride level in the cynomolgus monkey as compared to prior to the administration.

[1139] 5. The composition of clause 3, wherein the nucleobase alteration results in a reduction of at least 50% in blood triglyceride level in the cynomolgus monkey as compared to prior to the administration.

[1140] 6. The composition of any one of clauses 1-5, wherein the protospacer is located in a splice site.

[1141] 7. The composition of any one of clauses 1-5, wherein the protospacer complementary sequence is in the antisense strand of the ANGPTL3 gene.

[1142] 8. The composition of any one of clauses 1-5, wherein the protospacer complementary sequence is in the sense strand of the ANGPTL3 gene.

[1143] 9. The composition of any one of clauses 1-8, wherein the base alteration happens outside of the protospacer on the ANGPTL3 gene (off-target sites),
[1144] wherein the editing percentages of off-target sites set forth in Table 14 are below or equal to the editing percentages set forth in Table 14, respectively.

[1145] 10. The composition of any one of clauses 1-9, wherein the deaminase is an adenine deaminase and wherein the nucleobase alteration is a A·T to G·C alteration.

[1146] 11. The composition of any one of clauses 1-10, wherein the programmable DNA binding domain comprises a nuclease inactive Cas9 or a Cas9 nickase.

[1147] 12. The composition of any one of clauses 1-11, wherein the nucleobase alteration is at a splice site of the ANGPTL3 gene.

[1148] 13. The composition of clause 12, wherein the nucleobase alteration is at a splice donor site of the ANGPTL3 gene.

[1149] 14. The composition of clause 13, wherein the splice donor site is at 5′ end of ANGPTL3 intron 6 as referenced in SEQ ID NO: 7.

[1150] 15. The composition of clause 12, wherein the nucleobase alteration is at a splice acceptor site of the ANGPTL3 gene.

[1151] 16. The composition of any one of clauses 1-15, wherein the nucleobase alteration results in a frame shift, a premature stop codon, an insertion or deletion in a transcript encoded by the ANGPTL3 gene.

[1152] 17. The composition of any one of clauses 1-16, wherein the nucleobase alteration results in an aberrant transcript encoded by the ANGPTL3 gene.

[1153] 18. The composition of any one of clauses 1-17, wherein the guide RNA is chemically modified.

[1154] 19. The composition of clause 16, wherein the tracr sequence of the guide RNA is chemically modified following the scheme depicted in FIG. 7.

[1155] 20. The composition of any one of clauses 1-19, wherein the spacer sequence comprises an ANGPTL3 ABE guide RNA spacer sequence set forth in Table 1.

[1156] 21. The composition of clause 20, wherein the guide RNA comprises the ANGPTL3 ABE guide RNA sequence of GA067, GA091, GA098, GA099, GA100, GA101, GA102, GA103, GA347, GA441, GA442, GA472, GA473, GA474, GA475, GA476, GA517 or GA547 as set forth in Table 1.

[1157] 22. The composition of any one of clauses 1-19, wherein the protospacer sequence comprises an ANGPTL3 ABE protospacer sequence set forth in Table 1.

[1158] 23. The composition of clause 22, wherein the protospacer comprises the sequence 5′-

(SEQ ID No: 14)
AAGATACCTGAATAACTCTC-3′,
(SEQ ID No: 15)
5′-AAGATACCTGAATAACCCTC-3′,
(SEQ ID No: 1606)
5′-GATACCTGAATAACTCTC-3′,
(SEQ ID No: 248)
5′-AGATACCTGAATAACCCTC-3′, or
(SEQ ID NO: 249)
5′-GATACCTGAATAACCCTC-3′.

[1159] 24. The composition of any one of clauses 1-23, wherein the base editor fusion protein comprises an amino acid sequence of SEQ ID No: 2137.

[1160] 25. The composition of any one of clauses 1-24, wherein the GC % content of the mRNA sequence is greater than 50%.

[1161] 26. The composition of clause 25, wherein the GC % content of the mRNA sequence is greater than 56%.

[1162] 27. The composition of clause 26, wherein the GC % content of the mRNA sequence is greater than or equal to 63%.

[1163] 28. The composition of clause 25, wherein the mRNA comprises an adenine tTNA deaminase (TadA) region, a Cas9 region and a nuclear localization sequence (NLS) region.

[1164] 29. The composition of clause 28, wherein the mRNA further comprises a first linker region which connects the TadA region and the Cas9 region, and a second linker region which connects the Cas9 region and the NLS region.

[1165] 30. The composition of clause 28 or 29, wherein the GC % content of the TadA region is greater than 60%.

[1166] 31. The composition of clause 28 or 29, wherein the GC % content of the TadA region is greater than or equal to 70%.

[1167] 32. The composition of clause 28 or 29, wherein the GC % content of the Cas9 region is greater than 56%.

[1168] 33. The composition of clause 28 or 29, wherein the GC % content of the Cas9 region is greater than or equal to 62%.

[1169] 34. The composition of clause 28 or 29, wherein the GC % content of the NLS region is greater than 54%.

[1170] 35. The composition of clause 28 or 29, wherein the GC % content of the NLS region is greater than or equal to 63%.

[1171] 36. The composition of clause 29, wherein the GC % content of the first linker region is greater than 65%.

[1172] 37. The composition of clause 29, wherein the GC % content of the first linker region is greater than or equal to 79%.

[1173] 38. The composition of clause 29, wherein the GC % content of the second linker region is greater than 67%.

[1174] 39. The composition of clause 29, wherein the GC % content of the second linker region is greater than or equal to 83%.

[1175] 40. The composition of clause 29, wherein the GC % content of the TadA region is greater than 60%, the GC % content of the Cas9 region is greater than 56%, the GC % content of the NLS region is greater than 54%, the GC % content of the first linker region is greater than 65%, and the GC % content of the second linker region is greater than 67%.

[1176] 41. The composition of clause 25, wherein the mRNA comprises a mRNA sequence selected from Table 23.

[1177] 42. The composition of clause 41, wherein the mRNA comprises a mRNA sequence of SEQ ID No: 2136.

[1178] 43. The composition of any one of clauses 25-42, wherein the mRNA comprises a poly A tail.

[1179] 44. The composition of any one of clauses 1-43, further comprising a lipid nanoparticle (LNP) enclosing (i).

[1180] 45. The composition of clause 44, wherein the LNP further encloses (ii).

[1181] 46. The composition of clause 44, further comprising a second LNP enclosing (ii).

[1182] 47. The composition of any one of clauses 1-44, wherein the ratio of the guide RNA and the mRNA encoding the base editor fusion protein is about 1:10 to about 10:1 by weight.

[1183] 48. The composition of clause 47, wherein the ratio of the guide RNA and the mRNA encoding the base editor fusion protein is about 1:1, 1.5:1, 2:1, 3:1, 4:1, 1:1.5, 1:2, 1:3, or 1:4 by weight.

[1184] 49. The composition of clause 48, wherein the ratio of the guide RNA and the mRNA encoding the base editor fusion protein is about 1:1 by weight.

[1185] 50. A pharmaceutical composition comprising the composition of any one of the preceding clauses and a pharmaceutically acceptable carrier or excipient.

[1186] 51. A method for treating or preventing a condition in a subject in need thereof, the method comprising administering to the subject a therapeutically effective amount of the composition of clause 1.

[1187] 52. The method of clause 51, wherein the administration is via intravenous infusion.

[1188] 53. The method of clause 51 or 52, comprising sequential administration of a LNP enclosing (i) and a LNP enclosing (ii).

[1189] 54. The method of clause 51 or 52, comprising concurrent administration of the LNP enclosing (i) and the LNP enclosing (ii).

[1190] 55. The method of clause 53, comprising administering a single dose of the LNP enclosing (ii) followed by staggered doses of the LNP enclosing (i) over an interval of 1 day.

[1191] 56. The method of clause 53, comprising administering a single dose of the LNP enclosing (ii) followed by staggered doses of the LNP enclosing (i) over an interval of 2 days.

[1192] 57. The method of clause 53, comprising administering a single dose of the LNP enclosing (ii) followed by staggered doses of the LNP enclosing (i) over an interval of 3 days.

[1193] 58. The method of clause 53, comprising administering a single dose of the LNP enclosing (ii) followed by staggered doses of the LNP enclosing (i) over an interval of 4 days.

[1194] 59. The method of clause 53, comprising administering a single dose of the LNP enclosing (ii) followed by staggered doses of the LNP enclosing (i) over an interval of 5 days.

[1195] 60. The method of clause 53, comprising administering a single dose of the LNP enclosing (ii) followed by staggered doses of the LNP enclosing (i) over an interval of 6 days.

[1196] 61. The method of clause 53, comprising administering a single dose of the LNP enclosing (ii) followed by staggered doses of the LNP enclosing (i) over an interval of 7 days.

[1197] 62. The method of clause 51 or 52, comprising administering a single dose of the LNP enclosing (i) and (ii).

[1198] 63. The method of clause 62, wherein the single dose of the LNP is at about 0.3 to about 3 mg/kg.

[1199] 64. The method of clause 62 or 63, comprising administering a treatment course of one or more treatments to the subject, wherein each one of the one or more treatment comprises one or more of the single doses of the LNP.

[1200] 65. The method of clause 64, comprising administering a treatment course of two to ten treatments.

[1201] 66. The method of clause 64, comprising administering a treatment course of two to five treatments.

[1202] 67. The method of clause 64, comprising administering a treatment course of two treatments.

[1203] 68. The method of clause 64, comprising administering a treatment course of three treatments.

[1204] 69. The method of clause 64, comprising administering a treatment course of four treatments.

[1205] 70. The method of clause 62, comprising administering a treatment course of five treatments.

[1206] 71. The method of any one of clauses 51-70, wherein the condition is an atherosclerotic cardiovascular disease.

[1207] 72. The method of any one of clauses 51-70, wherein the condition is an atherosclerotic vascular disease.

[1208] 73. The method of any one of clauses 51-72, wherein the subject is a human.

[1209] 74. A composition for editing a gene target comprising:
[1210] (i) a base editor fusion protein comprising a programmable DNA binding domain and a deaminase, or a mRNA encoding the same,
[1211] (ii) a guide RNA comprising a tracr sequence that serves as a binding scaffold for the base editor fusion protein, and a spacer sequence that corresponds to a protospacer on a ANGPTL3 gene,
[1212] wherein the guide RNA directs the base editor fusion protein to effect a nucleobase alteration in the ANGPTL3 gene in vivo when administered to a mammalian subject, and
[1213] wherein the guide RNA comprises the ANGPTL3 ABE guide RNA sequences as set forth in Table 1.

[1214] 75. A composition for editing a gene target comprising:
[1215] (i) a base editor fusion protein comprising a programmable DNA binding domain and a deaminase, or a mRNA encoding the same,
[1216] (ii) a guide RNA comprising a tracr sequence that serves as a binding scaffold for the base editor fusion protein, and a spacer sequence that corresponds to a protospacer on a ANGPTL3 gene,
[1217] wherein the guide RNA directs the base editor fusion protein to effect a nucleobase alteration in the ANGPTL3 gene in vivo when administered to a mammalian subject, and
[1218] wherein the mRNA comprises a sequence selected from Table 23.

[1219] 76. A method for treating or preventing an atherosclerotic cardiovascular disease in a subject in need thereof, the method comprising administering to the subject a therapeutically effective amount of a first composition, comprising
[1220] (i) a base editor fusion protein comprising a programmable DNA binding domain and a deaminase, or a mRNA encoding the same,
[1221] (ii) a guide RNA comprising a tracr sequence that serves as a binding scaffold for the base editor fusion protein, and a spacer sequence that corresponds to a protospacer on a PCSK9 gene,
[1222] wherein the guide RNA directs the base editor fusion protein to effect a nucleobase alteration in the PCSK9 gene in vivo when administered to a mammalian subject,
[1223] wherein when the guide RNA and the mRNA is administered at a total amount of at least 0.5 mg/kg, the base alteration occurs in at least 35% of whole liver cells in the mammalian subject as measured by next generation sequencing or Sanger sequencing; and
[1224] a second composition, comprising
[1225] (i) a base editor fusion protein comprising a programmable DNA binding domain and a deaminase, or a mRNA encoding the same,
[1226] (ii) a guide RNA comprising a tracr sequence that serves as a binding scaffold for the base editor fusion protein, and a spacer sequence that corresponds to a protospacer on a ANGPTL3 gene,
[1227] wherein the guide RNA directs the base editor fusion protein to effect a nucleobase alteration in the ANGPTL3 gene in vivo when administered to a mammalian subject,
[1228] wherein when the guide RNA and the mRNA is administered at a total amount of at least 1 mg/kg, the base alteration occurs in at least 35% of whole liver cells in the mammalian subject as measured by next generation sequencing or Sanger sequencing.

[1229] 77. The method of clause 76, comprising sequential administration of the first composition and the second composition.

[1230] 78. The method of clause 77, comprising administering one or more doses of the first composition followed by one or more dose of the second composition.

[1231] 79. The method of clause 78, comprising administering one or more doses of the second composition followed by one or more dose of the first composition.

[1232] 80. The method of clause 76, comprising concurrent administration of the first composition and the second composition.

[1233] 81. The method of clause 80, comprising one or more doses of the first composition and the second composition.

[1234] 82. A composition for editing a gene target comprising:
[1235] (i) a base editor fusion protein comprising a programmable DNA binding domain and a deaminase, or a mRNA encoding the same,
[1236] (ii) a guide RNA comprising a tracr sequence that serves as a binding scaffold for the base editor fusion protein, and a spacer sequence that corresponds to a protospacer on a ANGPTL3 gene,
[1237] wherein the guide RNA directs the base editor fusion protein to effect a nucleobase alteration in the ANGPTL3 gene in vitro,
[1238] wherein when the guide RNA and the mRNA is administered at a total amount of at least 0.5 mg/kg, the base alteration occurs in at least 35% of whole liver cells in the mammalian subject as measured by next generation sequencing or Sanger sequencing.

[1239] 83. The composition of clause 82, wherein when the guide RNA and the mRNA is administered at a total amount of at least 1 mg/kg, the base alteration occurs in at least 40% of whole liver cells in the mammalian subject as measured by next generation sequencing or Sanger sequencing.

[1240] 84. The composition of clause 82, wherein when the guide RNA and the mRNA is administered at a total amount of at least 1.5 mg/kg, the base alteration occurs in at least 45% of whole liver cells in the mammalian subject as measured by next generation sequencing or Sanger sequencing.

[1241] 85. The composition of clause 82, wherein when the guide RNA and the mRNA is administered at a total amount of at least 2 mg/kg, the base alteration occurs in at least 50% of whole liver cells in the mammalian subject as measured by next generation sequencing or Sanger sequencing.

[1242] 86. The composition of clause 82, wherein when the guide RNA and the mRNA is administered at a total amount of at least 2.5 mg/kg, the base alteration occurs in at least 55% of whole liver cells in the mammalian subject as measured by next generation sequencing or Sanger sequencing.

[1243] 87. The composition of clause 82, wherein when the guide RNA and the mRNA is administered at a total amount of at least 3 mg/kg, the base alteration occurs in at least 60% of whole liver cells in the mammalian subject as measured by next generation sequencing or Sanger sequencing.

[1244] 88. A composition for editing an ANGPTL3 gene comprising:
[1245] (a) a mRNA encoding an adenine base editor protein having an editing window, and
[1246] (b) a guide RNA comprising a tracr sequence that serves as a binding scaffold for the base editor protein and a spacer sequence that serves to guide the base editor protein to a protospacer sequence on the ANGPTL3 gene,
[1247] wherein the spacer sequence is complimentary, at least in part, to a splice site or an exon region of the ANGPTL3 gene.

[1248] 89. The composition for editing the ANGPTL3 gene of clause 83, wherein when the base editor protein is operatively bound to the guide RNA and the guide RNA is hybridized with the complementary strand to the protospacer sequence on the ANGPTL3 gene, the editing window encompasses the splice site of the ANGPTL3 gene.

[1249] 90. The composition for editing the ANGPTL3 gene of clause 88, wherein when the base editor protein is operatively bound to the guide RNA and the guide RNA is hybridized with the complementary strand to the protospacer sequence on the ANGPTL3 gene, the editing window encompasses a region of an intron of the ANGPTL3 gene.

[1250] 91. The composition for editing the ANGPTL3 gene of clause 88, wherein when the base editor protein is operatively bound to the guide RNA and the guide RNA is hybridized with the complementary strand to the protospacer sequence on the ANGPTL3 gene, the editing window encompasses a region of intron 1, intron 3 or intron 4 of the ANGPTL3 gene.

[1251] 92. The composition for editing the ANGPTL3 gene of clause 88, wherein when the base editor protein is operatively bound to the guide RNA and the guide RNA is hybridized with the complementary strand to the protospacer sequence on the ANGPTL3 gene, the editing window encompasses a region of intron 1 of the ANGPTL3 gene.

[1252] 93. The composition for editing the ANGPTL3 gene of clause 88, wherein the spacer sequence has a 80-100% nucleotide sequence identity to a spacer sequence selected from the group of guide RNA sequences identified as GA067, GA100 and GA574.

[1253] 94. The composition for editing the ANGPTL3 gene of clause 88, wherein the tracr sequence has a 80-100% nucleotide sequence identity to a tracr sequence selected from the group of guide RNA sequences identified as GA067, GA091, GA098, GA099, GA100, GA101, GA102, GA103, GA347, GA441, GA442, GA472, GA473, GA474, GA475, GA476, GA517 and GA547.

[1254] 95. The composition for editing the ANGPTL3 gene of clause 88, wherein the mRNA has an 80-100% sequence identity to the mRNA sequences identified as MA002, MA004, MA040, MA0041, or MA045.

[1255] 96. The composition for editing the ANGPTL3 gene of clause 88, wherein the mRNA has one or more of the GC nucleotide region percentages set forth in the following table:

| | Average GC |
|---|---|
| Nucleotide region | Nucleotide Content |
| 27-213 | 67-73% |
| 389-661 | 67-71% |
| 735-829 | 63-74% |
| 4207-4286 | 67-70% |
| 4537-4569 | 65-73% |
| 4683-4741 | 62-67% |

[1256] 97. The composition for editing the ANGPTL3 gene of clause 88, wherein the mRNA has one or more of the GC nucleotide region percentages set forth in the following table:

| | Average GC |
|---|---|
| Nucleotide region | Nucleotide Content |
| 27-213 | At least 73% |
| 389-661 | At least 71% |
| 735-829 | At least 74% |
| 4207-4286 | At least 70% |
| 4537-4569 | At least 73% |
| 4683-4741 | At least 67% |

[1257] 98. The composition for editing the ANGPTL3 gene of clause 88, wherein the mRNA and gRNA are encapsulated within a lipid nanoparticle.

[1258] 99. The composition for editing the ANGPTL3 gene of clause 88, wherein the mRNA and gRNA are encapsulated within a lipid nanoparticle having the following:
[1259] LNP composition (mol %):
[1260] 40-65% iLipid
[1261] 2-20% DSPC
[1262] 1-5% PEG
[1263] Remaining mol % balance is cholesterol;
[1264] LNP Particle size: 55-120 nm Z average hydrodynamic diameter; and
[1265] Polydispersity index of <0.2 as determined by dynamic light scattering.

[1266] 100. The composition for editing the ANGPTL3 gene of clause 88, wherein the mRNA and gRNA are encapsulated within the lipid nanoparticle having an LNP particle size between 50-70 nm Z average hydrodynamic diameter.

[1267] 101. The composition for editing the ANGPTL3 gene of clause 88, wherein the composition when administered to a group of cynomolgus monkeys via intravenous infusion at a dose of approximately 0.5 mg of the guide RNA and mRNA combined total weight per kg of the cynomolgus monkey weight is capable of inducing adenine base editing at the ANGPTL3 target splice site in the liver of the cynomolgus monkeys with an average editing percentage of greater than 40 percent.

[1268] 102. The composition for editing the ANGPTL3 gene of clause 88, wherein the composition when administered to a group of cynomolgus monkeys via intravenous infusion at a dose of approximately 0.5 mg of the guide RNA and mRNA combined total weight per kg of the cynomolgus monkey weight is capable of inducing adenine base editing at the ANGPTL3 target splice site in the liver of the cynomolgus monkeys with an average editing percentage of greater than 50 percent.

[1269] 103. The composition for editing the ANGPTL3 gene of clause 88, wherein the composition when administered to a group of cynomolgus monkeys via intravenous infusion at a dose of approximately 0.5 mg of the guide RNA and mRNA combined total weight per kg of the cynomolgus monkey weight is capable of inducing adenine base editing at the ANGPTL3 target splice site in the liver of the cynomolgus monkeys with an average editing percentage of greater than 30 percent.

[1270] 104. The composition for editing the ANGPTL3 gene of clause 88, wherein the composition when administered to a group of cynomolgus monkeys via intravenous infusion at a dose of approximately 1 mg of the guide RNA and mRNA combined total weight per kg of the cynomolgus monkey weight is capable of inducing adenine base editing at the ANGPTL3 target splice site in the liver of the cynomolgus monkeys with an average editing percentage of greater than 40 percent.

[1271] 105. The composition for editing the ANGPTL3 gene of clause 88, wherein the composition when administered to a group of cynomolgus monkeys via intravenous infusion at a dose of approximately 1 mg of the guide RNA and mRNA combined total weight per kg of the cynomolgus monkey weight is capable of inducing adenine base editing at the ANGPTL3 target splice site in the liver of the cynomolgus monkeys with an average editing percentage of greater than 50 percent.

[1272] 106. The composition for editing the ANGPTL3 gene of clause 88, wherein the composition when administered to a group of cynomolgus monkeys via intravenous infusion at a dose of approximately 1 mg of the guide RNA and mRNA combined total weight per kg of the cynomolgus monkey weight is capable of inducing adenine base editing at the ANGPTL3 target splice site in the liver of the cynomolgus monkeys with an average editing percentage of greater than 60 percent.

[1273] 107. The composition for editing the ANGPTL3 gene of clause 88, wherein the composition when administered to a group of cynomolgus monkeys via intravenous infusion at a dose of approximately 1 mg of the guide RNA and mRNA combined total weight per kg of the cynomolgus monkey weight is capable of inducing adenine base editing at the ANGPTL3 target splice site in the liver of the cynomolgus monkeys with an average editing percentage of greater than 70 percent.

[1274] 108. The composition for editing the ANGPTL3 gene of clause 88, wherein the composition when administered to a group of cynomolgus monkeys via intravenous infusion at a dose of approximately 1.5 mg of the guide RNA and mRNA combined total weight per kg of the cynomolgus monkey weight is capable of inducing adenine base editing at the ANGPTL3 target splice site in the liver of the cynomolgus monkeys with an average editing percentage of greater than 40 percent.

[1275] 109. The composition for editing the ANGPTL3 gene of clause 88, wherein the composition when administered to a group of cynomolgus monkeys via intravenous infusion at a dose of approximately 1.5 mg of the guide RNA and mRNA combined total weight per kg of the cynomolgus monkey weight is capable of inducing adenine base editing at the ANGPTL3 target splice site in the liver of the cynomolgus monkeys with an average editing percentage of greater than 50 percent.

[1276] 110. The composition for editing the ANGPTL3 gene of clause 88, wherein the composition when administered to a group of cynomolgus monkeys via intravenous infusion at a dose of approximately 1.5 mg of the guide RNA and mRNA combined total weight per kg of the cynomolgus monkey weight is capable of inducing adenine base editing at the ANGPTL3 target splice site in the liver of the cynomolgus monkeys with an average editing percentage of greater than 60 percent.

[1277] 111. The composition for editing the ANGPTL3 gene of clause 88, wherein the composition when administered to a group of cynomolgus monkeys via intravenous infusion at a dose of approximately 1.5 mg of the guide RNA and mRNA combined total weight per kg of the cynomolgus monkey weight is capable of inducing adenine base editing at the ANGPTL3 target splice site in the liver of the cynomolgus monkeys with an average editing percentage of greater than 70 percent.

[1278] 112. The composition for editing the ANGPTL3 gene of clause 88, wherein the composition when at administered to a group of cynomolgus monkeys via intravenous infusion at a dose of approximately 1.5 mg of the guide RNA and mRNA combined total weight per kg of the cynomolgus monkey weight is capable of inducing adenine base editing at the ANGPTL3 target splice site in the liver of the cynomolgus monkeys with an average editing percentage of greater than 80 percent.

[1279] 113. The composition for editing the ANGPTL3 gene of clause 88, wherein the composition when administered to a group of cynomolgus monkeys via intravenous infusion at a dose of approximately 3 mg of the guide RNA and mRNA combined total weight per kg of the cynomolgus monkey weight is capable of inducing adenine base editing at the ANGPTL3 target splice site in the liver of the cynomolgus monkeys with an average editing percentage of greater than 40 percent.

[1280] 114. The composition for editing the ANGPTL3 gene of clause 88, wherein the composition when administered to a group of cynomolgus monkeys via intravenous infusion at a dose of approximately 3 mg of the guide RNA and mRNA combined total weight per kg of the cynomolgus monkey weight is capable of inducing adenine base editing at the ANGPTL3 target splice site in the liver of the cynomolgus monkeys with an average editing percentage of greater than 50 percent.

[1281] 115. The composition for editing the ANGPTL3 gene of clause 88, wherein the composition when administered to a group of cynomolgus monkeys via intravenous infusion at a dose of approximately 3 mg of the guide RNA and mRNA combined total weight per kg of the cynomolgus monkey weight is capable of inducing adenine base editing at the ANGPTL3 target splice site in the liver of the cynomolgus monkeys with an average editing percentage of greater than 60 percent.

[1282] 116. The composition for editing the ANGPTL3 gene of clause 88, wherein the composition when administered to a group of cynomolgus monkeys via intravenous infusion at a dose of approximately 3 mg of the guide RNA and mRNA combined total weight per kg of the cynomolgus monkey weight is capable of inducing adenine base editing at the ANGPTL3 target splice site in the liver of the cynomolgus monkeys with an average editing percentage of greater than 70 percent.

[1283] 117. The composition for editing the ANGPTL3 gene of clause 88, wherein the composition when administered to a group of cynomolgus monkeys via intravenous infusion at a dose of approximately 3 mg of the guide RNA and mRNA combined total weight per kg of the cynomolgus monkey weight is capable of inducing adenine base editing at the ANGPTL3 target splice site in the liver of the cynomolgus monkeys with an average editing percentage of greater than 80 percent.

[1284] 118. The compositions for editing the ANGPTL3 gene of clauses 87-117, wherein the percent editing is determined at 15 days after dosing through analysis of dosed cynomolgus monkey liver either via liver biopsy or necropsy of the monkey.

[1285] 119. The compositions for editing of the ANGPTL3 gene of clauses 87-117, wherein the percent editing is determined to be durably maintained by periodic liver biopsy testing of the dosed cynomolgus monkeys over a span of at least 168 days after dosing.

[1286] 120. The compositions for editing of the ANGPTL3 gene of clauses 87-117, wherein the percent editing is determined to be durably maintained by periodic liver biopsy testing of the dosed cynomolgus monkeys over a span of at least 300 days after dosing.

[1287] 121. The composition for editing the ANGPTL3 gene of clause 88, wherein the composition when administered to a group of cynomolgus monkeys via intravenous infusion at a dose of approximately 0.5 mg of the guide RNA and mRNA combined total weight per kg of cynomolgus monkey weight is capable of reducing ANGPTL3 protein in the plasma of the dosed cynomolgus monkeys on average of at least 35 percent as compared to baseline.

[1288] 122. The composition for editing the ANGPTL3 gene of clause 88, wherein the composition when administered to a group of cynomolgus monkeys via intravenous infusion at a dose of approximately 0.5 mg of the guide RNA and mRNA combined total weight per kg of cynomolgus monkey weight is capable of reducing ANGPTL3 protein in the plasma of the dosed cynomolgus monkeys on average of at least 40 percent as compared to baseline.

[1289] 123. The composition for editing the ANGPTL3 gene of clause 88, wherein the composition when administered to a group of cynomolgus monkeys via intravenous infusion at a dose of approximately 0.5 mg of the guide RNA and mRNA combined total weight per kg of monkey weight is capable of reducing ANGPTL3 protein in the plasma of the dosed cynomolgus monkeys on average of at least 50 percent as compared to baseline.

[1290] 124. The composition for editing the ANGPTL3 gene of clause 88, wherein the composition when administered to a group of cynomolgus monkeys via intravenous infusion at a dose of approximately 0.5 mg of the guide RNA and mRNA combined total weight per kg of cynomolgus monkey weight is capable of reducing ANGPTL3 protein in the plasma of the dosed monkeys on average of at least 60 percent as compared to baseline.

[1291] 125. The composition for editing the ANGPTL3 gene of clause 88, wherein the composition when administered to a group of cynomolgus monkeys via intravenous infusion at a dose of approximately 0.5 mg of the guide RNA and mRNA combined total weight per kg of cynomolgus monkey weight is capable of reducing ANGPTL3 protein in the plasma of the dosed cynomolgus monkeys on average of at least 70 percent as compared to baseline.

[1292] 126. The composition for editing the ANGPTL3 gene of clause 88, wherein the composition when administered to a group of cynomolgus monkeys via intravenous infusion at a dose of approximately 0.5 mg of the guide RNA and mRNA combined total weight per kg of cynomolgus monkey weight is capable of reducing ANGPTL3 protein in the plasma of the dosed cynomolgus monkeys on average of at least 80 percent as compared to baseline.

[1293] 127. The composition for editing the ANGPTL3 gene of clause 88, wherein the composition when administered to a group of cynomolgus monkeys via intravenous infusion at a dose of approximately 1 mg of the guide RNA and mRNA combined total weight per kg of cynomolgus monkey weight is capable of reducing ANGPTL3 protein in the plasma of the dosed cynomolgus monkeys on average of at least 35 percent as compared to baseline.

[1294] 128. The composition for editing the ANGPTL3 gene of clause 88, wherein the composition when administered to a group of cynomolgus monkeys via intravenous infusion at a dose of approximately 1 mg of the guide RNA and mRNA combined total weight per kg of cynomolgus monkey weight is capable of reducing ANGPTL3 protein in the plasma of the dosed cynomolgus monkeys on average of at least 40 percent as compared to baseline.

[1295] 129. The composition for editing the ANGPTL3 gene of clause 88, wherein the composition when administered to a group of cynomolgus monkeys via intravenous infusion at a dose of approximately 1 mg of the guide RNA and mRNA combined total weight per kg of monkey weight is capable of reducing ANGPTL3 protein in the plasma of the dosed cynomolgus monkeys on average of at least 50 percent as compared to baseline.

[1296] 130. The composition for editing the ANGPTL3 gene of clause 88, wherein the composition when administered to a group of cynomolgus monkeys via intravenous infusion at a dose of approximately 1 mg of the guide RNA and mRNA combined total weight per kg of cynomolgus monkey weight is capable of reducing ANGPTL3 protein in the plasma of the dosed cynomolgus monkeys on average of at least 60 percent as compared to baseline.

[1297] 131. The composition for editing the ANGPTL3 gene of clause 88, wherein the composition when administered to a group of cynomolgus monkeys via intravenous infusion at a dose of approximately 1 mg of the guide RNA and mRNA combined total weight per kg of cynomolgus monkey weight is capable of reducing ANGPTL3 protein in the plasma of the dosed cynomolgus monkeys on average of at least 70 percent as compared to baseline.

[1298] 132. The composition for editing the ANGPTL3 gene of clause 88, wherein the composition when administered to a group of cynomolgus monkeys via intravenous infusion at a dose of approximately 1 mg of the guide RNA and mRNA combined total weight per kg of cynomolgus monkey weight is capable of reducing ANGPTL3 protein in the plasma of the dosed cynomolgus monkeys on average of at least 80 percent as compared to baseline.

[1299] 133. The composition for editing the ANGPTL3 gene of clause 88, wherein the composition when administered to a group of cynomolgus monkeys via intravenous infusion at a dose of approximately 1.5 mg of the guide RNA and mRNA combined total weight per kg of cynomolgus monkey weight is capable of reducing ANGPTL3 protein in the plasma of the dosed cynomolgus monkeys on average of at least 35 percent as compared to baseline.

[1300] 134. The composition for editing the ANGPTL3 gene of clause 88, wherein the composition when administered to a group of cynomolgus monkeys via intravenous infusion at a dose of approximately 1.5 mg of the guide RNA and mRNA combined total weight per kg of cynomolgus monkey weight is capable of reducing ANGPTL3 protein in the plasma of the dosed cynomolgus monkeys on average of at least 40 percent as compared to baseline.

[1301] 135. The composition for editing the ANGPTL3 gene of clause 88, wherein the composition when administered to a group of cynomolgus monkeys via intravenous infusion at a dose of approximately 1.5 mg of the guide RNA and mRNA combined total weight per kg of cynomolgus monkey weight is capable of reducing ANGPTL3 protein in the plasma of the dosed cynomolgus monkeys on average of at least 50 percent as compared to baseline.

[1302] 136. The composition for editing the ANGPTL3 gene of clause 88, wherein the composition when administered to a group of cynomolgus monkeys via intravenous infusion at a dose of approximately 1.5 mg of the guide RNA and mRNA combined total weight per kg of cynomolgus monkey weight is capable of reducing ANGPTL3 protein in the plasma of the dosed cynomolgus monkeys on average of at least 60 percent as compared to baseline.

[1303] 137. The composition for editing the ANGPTL3 gene of clause 88, wherein the composition when administered to a group of cynomolgus monkeys via intravenous infusion at a dose of approximately 1.5 mg of the guide RNA and mRNA combined total weight per kg of cynomolgus monkey weight is capable of reducing ANGPTL3 protein in the plasma of the dosed cynomolgus monkeys on average of at least 70 percent as compared to baseline.

[1304] 138. The composition for editing the ANGPTL3 gene of clause 88, wherein the composition when administered to a group of cynomolgus monkeys via intravenous infusion at a dose of approximately 1.5 mg of the guide RNA and mRNA combined total weight per kg of cynomolgus monkey weight is capable of reducing ANGPTL3 protein in the plasma of the dosed cynomolgus monkeys on average of at least 80 percent as compared to baseline.

[1305] 139. The composition for editing the ANGPTL3 gene of clause 88, wherein the composition when administered to a group of cynomolgus monkeys via intravenous infusion at a dose of approximately 3 mg of the guide RNA and mRNA combined total weight per kg of cynomolgus monkey weight is capable of reducing ANGPTL3 protein in the plasma of the dosed cynomolgus monkeys on average of at least 35 percent as compared to baseline.

[1306] 140. The composition for editing the ANGPTL3 gene of clause 88, wherein the composition when administered to a group of cynomolgus monkeys via intravenous infusion at a dose of approximately 3 mg of the guide RNA and mRNA combined total weight per kg of cynomolgus monkey weight is capable of reducing ANGPTL3 protein in the plasma of the dosed cynomolgus monkeys on average of at least 40 percent as compared to baseline.

[1307] 141. The composition for editing the ANGPTL3 gene of clause 88, wherein the composition when administered to a group of cynomolgus monkeys via intravenous infusion at a dose of approximately 3 mg of the guide RNA and mRNA combined total weight per kg of cynomolgus monkey weight is capable of reducing ANGPTL3 protein in the plasma of the dosed cynomolgus monkeys on average of at least 50 percent as compared to baseline.

[1308] 142. The composition for editing the ANGPTL3 gene of clause 88, wherein the composition when administered to a group of cynomolgus monkeys via intravenous infusion at a dose of approximately 3 mg of the guide RNA and mRNA combined total weight per kg of cynomolgus monkey weight is capable of reducing ANGPTL3 protein in the plasma of the dosed cynomolgus monkeys on average of at least 60 percent as compared to baseline.

[1309] 143. The composition for editing the ANGPTL3 gene of clause 88, wherein the composition when administered to a group of cynomolgus monkeys via intravenous infusion at a dose of approximately 3 mg of the guide RNA and mRNA combined total weight per kg of cynomolgus monkey weight is capable of reducing ANGPTL3 protein in the plasma of the dosed cynomolgus monkeys on average of at least 70 percent as compared to baseline.

[1310] 144. The composition for editing the ANGPTL3 gene of clause 88, wherein the composition when administered to a group of cynomolgus monkeys via intravenous infusion at a dose of approximately 3 mg of the guide RNA and mRNA combined total weight per kg of cynomolgus monkey weight is capable of reducing ANGPTL3 protein in the plasma of the dosed cynomolgus monkeys on average of at least 80 percent as compared to baseline.

[1311] 145. The compositions for editing of the ANGPTL3 gene of clauses 121-144, wherein the reduction in plasma protein is determined at 15 days after dosing via blood sampling and analysis of the dosed cynomolgus monkey.

[1312] 146. The composition for editing the ANGPTL3 gene of clause 88, wherein the composition when administered to a group of cynomolgus monkeys via intravenous infusion at a dose of approximately 0.5 mg of the guide RNA and mRNA combined total weight per kg of monkey weight is capable of reducing triglyceride level in the plasma of the dosed monkeys on average of at least 20 percent as compared to baseline.

[1313] 147. The composition for editing the ANGPTL3 gene of clause 88, wherein the composition when administered to a group of cynomolgus monkeys via intravenous infusion at a dose of approximately 0.5 mg of the guide RNA and mRNA combined total weight per kg of cynomolgus monkey weight is capable of reducing triglyceride level in the plasma of the dosed cynomolgus monkeys on average of at least 25 percent as compared to baseline.

[1314] 148. The composition for editing the ANGPTL3 gene of clause 88, wherein the composition when administered to a group of cynomolgus monkeys via intravenous infusion at a dose of approximately 0.5 mg of the guide RNA and mRNA combined total weight per kg of cynomolgus monkey weight is capable of reducing triglyceride level in the plasma of the dosed cynomolgus monkeys on average of at least 30 percent as compared to baseline.

[1315] 149. The composition for editing the ANGPTL3 gene of clause 88, wherein the composition when administered to a group of cynomolgus monkeys via intravenous infusion at a dose of approximately 0.5 mg of the guide RNA and mRNA combined total weight per kg of cynomolgus monkey weight is capable of reducing triglyceride level in the plasma of the dosed cynomolgus monkeys on average of at least 35 percent as compared to baseline.

[1316] 150. The composition for editing the ANGPTL3 gene of clause 88, wherein the composition when administered to a group of cynomolgus monkeys via intravenous infusion at a dose of approximately 0.5 mg of the guide RNA and mRNA combined total weight per kg of cynomolgus monkey weight is capable of reducing triglyceride level in the plasma of the dosed cynomolgus monkeys on average of at least 40 percent as compared to baseline.

[1317] 151. The composition for editing the ANGPTL3 gene of clause 88, wherein the composition when administered to a group of cynomolgus monkeys via intravenous infusion at a dose of approximately 0.5 mg of the guide RNA and mRNA combined total weight per kg of cynomolgus monkey weight is capable of reducing triglyceride level in the plasma of the dosed cynomolgus monkeys on average of at least 45 percent as compared to baseline.

[1318] 152. The composition for editing the ANGPTL3 gene of clause 88, wherein the composition when administered to a group of cynomolgus monkeys via intravenous infusion at a dose of approximately 1 mg of the guide RNA and mRNA combined total weight per kg of cynomolgus monkey weight is capable of reducing triglyceride level in the plasma of the dosed cynomolgus monkeys on average of at least 20 percent as compared to baseline.

[1319] 153. The composition for editing the ANGPTL3 gene of clause 88, wherein the composition when administered to a group of cynomolgus monkeys via intravenous infusion at a dose of approximately 1 mg of the guide RNA and mRNA combined total weight per kg of cynomolgus monkey weight is capable of reducing triglyceride level in the plasma of the dosed cynomolgus monkeys on average of at least 25 percent as compared to baseline.

[1320] 154. The composition for editing the ANGPTL3 gene of clause 88, wherein the composition when administered to a group of cynomolgus monkeys via intravenous infusion at a dose of approximately 1 mg of the guide RNA and mRNA combined total weight per kg of cynomolgus monkey weight is capable of reducing triglyceride level in the plasma of the dosed cynomolgus monkeys on average of at least 30 percent as compared to baseline.

[1321] 155. The composition for editing the ANGPTL3 gene of clause 88, wherein the composition when administered to a group of cynomolgus monkeys via intravenous infusion at a dose of approximately 1 mg of the guide RNA and mRNA combined total weight per kg of cynomolgus monkey weight is capable of reducing triglyceride level in the plasma of the dosed cynomolgus monkeys on average of at least 35 percent as compared to baseline.

[1322] 156. The composition for editing the ANGPTL3 gene of clause 88, wherein the composition when administered to a group of cynomolgus monkeys via intravenous infusion at a dose of approximately 1 mg of the guide RNA and mRNA combined total weight per kg of cynomolgus monkey weight is capable of reducing triglyceride level in the plasma of the dosed cynomolgus monkeys on average of at least 40 percent as compared to baseline.

[1323] 157. The composition for editing the ANGPTL3 gene of clause 88, wherein the composition when administered to a group of cynomolgus monkeys via intravenous infusion at a dose of approximately 1 mg of the guide RNA and mRNA combined total weight per kg of cynomolgus monkey weight is capable of reducing triglyceride level in the plasma of the dosed cynomolgus monkeys on average of at least 45 percent as compared to baseline.

[1324] 158. The composition for editing the ANGPTL3 gene of clause 88, wherein the composition when administered to a group of cynomolgus monkeys via intravenous infusion at a dose of approximately 1 mg of the guide RNA and mRNA combined total weight per kg of cynomolgus monkey weight is capable of reducing triglyceride level in the plasma of the dosed cynomolgus monkeys on average of at least 50 percent as compared to baseline.

[1325] 159. The composition for editing the ANGPTL3 gene of clause 88, wherein the composition when administered to a group of cynomolgus monkeys via intravenous infusion at a dose of approximately 1 mg of the guide RNA and mRNA combined total weight per kg of cynomolgus monkey weight is capable of reducing triglyceride level in the plasma of the dosed cynomolgus monkeys on average of at least 55 percent as compared to baseline.

[1326] 160. The composition for editing the ANGPTL3 gene of clause 88, wherein the composition when administered to a group of cynomolgus monkeys via intravenous infusion at a dose of approximately 1 mg of the guide RNA and mRNA combined total weight per kg of cynomolgus monkey weight is capable of reducing triglyceride level in the plasma of the dosed cynomolgus monkeys on average of at least 60 percent as compared to baseline.

[1327] 161. The composition for editing the ANGPTL3 gene of clause 88, wherein the composition when administered to a group of cynomolgus monkeys via intravenous infusion at a dose of approximately 1.5 mg of the guide RNA and mRNA combined total weight per kg of cynomolgus monkey weight is capable of reducing triglyceride level in the plasma of the dosed cynomolgus monkeys on average of at least 20 percent as compared to baseline.

[1328] 162. The composition for editing the ANGPTL3 gene of clause 88, wherein the composition when administered to a group of cynomolgus monkeys via intravenous infusion at a dose of approximately 1.5 mg of the guide RNA and mRNA combined total weight per kg of cynomolgus monkey weight is capable of reducing triglyceride level in the plasma of the dosed cynomolgus monkeys on average of at least 25 percent as compared to baseline.

[1329] 163. The composition for editing the ANGPTL3 gene of clause 88, wherein the composition when administered to a group of cynomolgus monkeys via intravenous infusion at a dose of approximately 1.5 mg of the guide RNA and mRNA combined total weight per kg of cynomolgus monkey weight is capable of reducing triglyceride level in the plasma of the dosed cynomolgus monkeys on average of at least 30 percent as compared to baseline.

[1330] 164. The composition for editing the ANGPTL3 gene of clause 88, wherein the composition when administered to a group of cynomolgus monkeys via intravenous infusion at a dose of approximately 1.5 mg of the guide RNA and mRNA combined total weight per kg of cynomolgus monkey weight is capable of reducing triglyceride level in the plasma of the dosed cynomolgus monkeys on average of at least 35 percent as compared to baseline.

[1331] 165. The composition for editing the ANGPTL3 gene of clause 88, wherein the composition when administered to a group of cynomolgus monkeys via intravenous infusion at a dose of approximately 1.5 mg of the guide RNA and mRNA combined total weight per kg of cynomolgus monkey weight is capable of reducing triglyceride level in the plasma of the dosed cynomolgus monkeys on average of at least 40 percent as compared to baseline.

[1332] 166. The composition for editing the ANGPTL3 gene of clause 88, wherein the composition when administered to a group of cynomolgus monkeys via intravenous infusion at a dose of approximately 1.5 mg of the guide RNA and mRNA combined total weight per kg of cynomolgus monkey weight is capable of reducing triglyceride level in the plasma of the dosed cynomolgus monkeys on average of at least 45 percent as compared to baseline.

[1333] 167. The composition for editing the ANGPTL3 gene of clause 88, wherein the composition when administered to a group of cynomolgus monkeys via intravenous infusion at a dose of approximately 1.5 mg of the guide RNA and mRNA combined total weight per kg of cynomolgus monkey weight is capable of reducing triglyceride level in the plasma of the dosed cynomolgus monkeys on average of at least 50 percent as compared to baseline.

[1334] 168. The composition for editing the ANGPTL3 gene of clause 88, wherein the composition when administered to a group of cynomolgus monkeys via intravenous infusion at a dose of approximately 1.5 mg of the guide RNA and mRNA combined total weight per kg of cynomolgus monkey weight is capable of reducing triglyceride level in the plasma of the dosed cynomolgus monkeys on average of at least 55 percent as compared to baseline.

[1335] 169. The composition for editing the ANGPTL3 gene of clause 88, wherein the composition when administered to a group of cynomolgus monkeys via intravenous infusion at a dose of approximately 1.5 mg of the guide RNA and mRNA combined total weight per kg of cynomolgus monkey weight is capable of reducing triglyceride level in the plasma of the dosed cynomolgus monkeys on average of at least 60 percent as compared to baseline.

[1336] 170. The composition for editing the ANGPTL3 gene of clause 88, wherein the composition when administered to a group of cynomolgus monkeys via intravenous infusion at a dose of approximately 1.5 mg of the guide RNA and mRNA combined total weight per kg of cynomolgus monkey weight is capable of reducing triglyceride level in the plasma of the dosed cynomolgus monkeys on average of at least 65 percent as compared to baseline.

[1337] 171. The composition for editing the ANGPTL3 gene of clause 88, wherein the composition when administered to a group of cynomolgus monkeys via intravenous infusion at a dose of approximately 3 mg of the guide RNA and mRNA combined total weight per kg of cynomolgus monkey weight is capable of reducing triglyceride level in the plasma of the dosed cynomolgus monkeys on average of at least 20 percent as compared to baseline.

[1338] 172. The composition for editing the ANGPTL3 gene of clause 88, wherein the composition when administered to a group of cynomolgus monkeys via intravenous infusion at a dose of approximately 3 mg of the guide RNA and mRNA combined total weight per kg of cynomolgus monkey weight is capable of reducing triglyceride level in the plasma of the dosed cynomolgus monkeys on average of at least 25 percent as compared to baseline.

[1339] 173. The composition for editing the ANGPTL3 gene of clause 88, wherein the composition when administered to a group of cynomolgus monkeys via intravenous infusion at a dose of approximately 3 mg of the guide RNA and mRNA combined total weight per kg of cynomolgus monkey weight is capable of reducing triglyceride level in the plasma of the dosed cynomolgus monkeys on average of at least 30 percent as compared to baseline.

[1340] 174. The composition for editing the ANGPTL3 gene of clause 88, wherein the composition when administered to a group of cynomolgus monkeys via intravenous infusion at a dose of approximately 3 mg of the guide RNA and mRNA combined total weight per kg of cynomolgus monkey weight is capable of reducing triglyceride level in the plasma of the dosed cynomolgus monkeys on average of at least 35 percent as compared to baseline.

[1341] 175. The composition for editing the ANGPTL3 gene of clause 88, wherein the composition when administered to a group of cynomolgus monkeys via intravenous infusion at a dose of approximately 3 mg of the guide RNA and mRNA combined total weight per kg of cynomolgus monkey weight is capable of reducing triglyceride level in the plasma of the dosed cynomolgus monkeys on average of at least 40 percent as compared to baseline.

[1342] 176. The composition for editing the ANGPTL3 gene of clause 88, wherein the composition when administered to a group of cynomolgus monkeys via intravenous infusion at a dose of approximately 3 mg of the guide RNA and mRNA combined total weight per kg of cynomolgus monkey weight is capable of reducing triglyceride level in the plasma of the dosed cynomolgus monkeys on average of at least 45 percent as compared to baseline.

[1343] 177. The composition for editing the ANGPTL3 gene of clause 88, wherein the composition when administered to a group of cynomolgus monkeys via intravenous infusion at a dose of approximately 3 mg of the guide RNA and mRNA combined total weight per kg of cynomolgus monkey weight is capable of reducing triglyceride level in the plasma of the dosed cynomolgus monkeys on average of at least 50 percent as compared to baseline.

[1344] 178. The composition for editing the ANGPTL3 gene of clause 88, wherein the composition when administered to a group of cynomolgus monkeys via intravenous infusion at a dose of approximately 3 mg of the guide RNA and mRNA combined total weight per kg of cynomolgus monkey weight is capable of reducing triglyceride level in the plasma of the dosed cynomolgus monkeys on average of at least 55 percent as compared to baseline.

[1345] 179. The composition for editing the ANGPTL3 gene of clause 88, wherein the composition when administered to a group of cynomolgus monkeys via intravenous infusion at a dose of approximately 3 mg of the guide RNA and mRNA combined total weight per kg of cynomolgus monkey weight is capable of reducing triglyceride level in the plasma of the dosed cynomolgus monkeys on average of at least 60 percent as compared to baseline.

[1346] 180. The composition for editing the ANGPTL3 gene of clause 88, wherein the composition when administered to a group of cynomolgus monkeys via intravenous infusion at a dose of approximately 3 mg of the guide RNA and mRNA combined total weight per kg of cynomolgus monkey weight is capable of reducing triglyceride level in the plasma of the dosed cynomolgus monkeys on average of at least 65 percent as compared to baseline.

[1347] 181. The compositions for editing the ANGPTL3 gene of clauses 148-182, wherein the reduction in triglyceride level is determined at 15 days after dosing via blood sampling and analysis of the dosed cynomolgus monkey.

[1348] 182. The compositions for editing the ANGPTL3 gene of clauses 148-182, wherein the reduction in triglyceride level is determined to be durably maintained over a span of at least 168 days by periodic blood sampling and analysis of the dosed cynomolgus monkey.

[1349] 183. The compositions for editing the ANGPTL3 gene of clauses 148-182, wherein the reduction in triglyceride level is determined to be durably maintained over a span of at least 300 days by periodic blood sampling and analysis of the dosed cynomolgus monkey.

[1350] 184. The composition for editing the ANGPTL3 gene of clause 88, wherein the composition when administered to a group of cynomolgus monkeys via intravenous infusion at a dose of approximately 3 mg of the guide RNA and mRNA combined total weight per kg of cynomolgus monkey weight is capable of reducing lipoprotein (a) in the plasma of the dosed cynomolgus monkeys on average of at least 10 percent as compared to baseline.

[1351] 185. The composition for editing the ANGPTL3 gene of clause 88, wherein the composition when administered to a group of cynomolgus monkeys via intravenous infusion at a dose of approximately 3 mg of the guide RNA and mRNA combined total weight per kg of cynomolgus monkey weight is capable of reducing lipoprotein (a) level in the plasma of the dosed cynomolgus monkeys on average of at least 15 percent as compared to baseline.

[1352] 186. The composition for editing the ANGPTL3 gene of clause 88, wherein the composition when administered to a group of cynomolgus monkeys via intravenous infusion at a dose of approximately 3 mg of the guide RNA and mRNA combined total weight per kg of cynomolgus monkey weight is capable of reducing lipoprotein (a) level in the plasma of the dosed cynomolgus monkeys on average of at least 20 percent as compared to baseline.

[1353] 187. The composition for editing the ANGPTL3 gene of clause 88, wherein the composition when administered to a group of cynomolgus monkeys via intravenous infusion at a dose of approximately 3 mg of the guide RNA and mRNA combined total weight per kg of cynomolgus monkey weight is capable of reducing lipoprotein (a) level in the plasma of the dosed cynomolgus monkeys on average of at least 25 percent as compared to baseline.

[1354] 188. The composition for editing the ANGPTL3 gene of clause 88, wherein the composition when administered to a group of cynomolgus monkeys via intravenous infusion at a dose of approximately 3 mg of the guide RNA and mRNA combined total weight per kg of cynomolgus monkey weight is capable of reducing lipoprotein (a) level in the plasma of the dosed cynomolgus monkeys on average of at least 30 percent as compared to baseline.

[1355] 189. The composition for editing the ANGPTL3 gene of clause 88, wherein the composition when administered to a group of cynomolgus monkeys via intravenous infusion at a dose of approximately 3 mg of the guide RNA and mRNA combined total weight per kg of cynomolgus monkey weight is capable of reducing lipoprotein (a) level in the plasma of the dosed cynomolgus monkeys on average of approximately 35 percent as compared to baseline.

[1356] 190. The compositions for editing the ANGPTL3 gene of clauses 186-191, wherein the reduction in lipoprotein (a) is determined at 15 days after dosing via blood sampling and analysis of the dosed cynomolgus monkey.

[1357] 191. The compositions for editing the ANGPTL3 gene of clauses 186-191, wherein the reduction in lipoprotein (a) is determined to be durably maintained over a span of at least 224 days by periodic blood sampling and analysis of the dosed cynomolgus monkey.

[1358] 192. The compositions for editing the ANGPTL3 gene of clauses 186-191, wherein the reduction in lipoprotein (a) is determined to be durably maintained over a span of at least 300 days by periodic blood sampling and analysis of the dosed cynomolgus monkey.

[1359] 193. The compositions for editing the ANGPTL3 gene of clauses 101-194, wherein to the extent that the dosing of the cynomolgus monkeys results in elevation of AST, ALT, or Cytokines, the elevations resulting from the dosing of the composition are transient and resolved back to approximately baseline levels within 3-15 days after dosing.

[1360] 194. The composition for editing the ANGPTL3 gene of clauses 101-103, 121-126, 148-153, wherein the percent editing of ANGPTL3 is negligible outside of the liver, spleen and adrenal glands tissues as illustrated in FIG. 27.

[1361] 195. The compositions for editing the ANGPTL3 gene of clauses 101-107, 121-132, 148-162, wherein repeat dosing results is additive with respect to the editing percentage of ANGPTL3 editing percentage.

[1362] 196. The compositions for editing the ANGPTL3 gene of clause 195, wherein the repeat dosing does not elicit cytokine activation nor an immune response.

[1363] 197. The composition for editing the ANGPTL3 gene of clause 88, wherein the spacer sequence has at least 80% nucleotide correlation with the nucleotide sequence of a targeted protospacer on the ANGPTL3 gene, wherein an RNA nucleotide on the spacer sequence is in correlation with a DNA nucleotide of the protospacer if it has the same nucleotide as the DNA nucleotide in the same order and wherein uracil and thymine bases are considered the same nucleotide for purposes of determining correlation.

[1364] 198. The composition for editing the ANGPTL3 gene of clause 197, wherein the spacer sequence has at least 85% nucleotide correlation with the nucleotide sequence of a targeted protospacer on the ANGPTL3 gene.

[1365] 199. The composition for editing the ANGPTL3 gene of clause 197, wherein the spacer sequence has at least 90% nucleotide correlation with the nucleotide sequence of a targeted protospacer on the ANGPTL3 gene.

[1366] 200. The composition for editing the ANGPTL3 gene of clause 197, wherein the spacer sequence has at least 95% nucleotide correlation with the nucleotide sequence of a targeted protospacer on the ANGPTL3 gene.

[1367] 201. The composition for editing the ANGPTL3 gene of clause 197, wherein the spacer sequence has at least 99% nucleotide correlation with the nucleotide sequence of a targeted protospacer on the ANGPTL3 gene.

[1368] 202. The composition for editing the ANGPTL3 gene of clause 197, wherein the spacer sequence has at least 100% nucleotide correlation with the nucleotide sequence of a targeted protospacer on the ANGPTL3 gene.

[1369] 203. A method for treating or preventing an atherosclerotic cardiovascular disease in a subject in need thereof, the method comprising administering to the subject a therapeutically effective amount of
[1370] (a) a mRNA encoding an adenine base editor protein having an editing window,
[1371] (b) a first guide RNA comprising a tracr sequence that serves as a binding scaffold for the base editor protein and a spacer sequence that serves to guide the base editor protein to a protospacer sequence on a PCSK9 gene, wherein the spacer sequence is complimentary, at least in part, to a splice site or an exon region of the PCSK9 gene; and
[1372] (c) a second guide RNA comprising a tracr sequence that serves as a binding scaffold for the base editor protein and a spacer sequence that serves to guide the base editor protein to a protospacer sequence on a ANGPTL3 gene, wherein the spacer sequence is complimentary, at least in part, to a splice site or an exon region of the ANGPTL3 gene.

[1373] 204. The method of clause 203, further comprising a first LNP enclosing (a).

[1374] 205. The method of clause 204, wherein the first LNP encloses (b) and (c).

[1375] 206. The method of clause 204, wherein the first LNP was administered repeatedly.

[1376] 207. The method of clause 204, wherein the first LNP was administered repeatedly at an interval of one to sixty days.

[1377] 208. The method of clause 204, wherein the first LNP was administered repeatedly at an interval of seven days.

[1378] 209. The method of clause 204, wherein the first LNP further encloses (b).

[1379] 210. The method of clause 209, further comprising a second LNP enclosing (a) and (c).

[1380] 211. The method of clause 210, wherein the first LNP and the second LNP are administered sequentially.

[1381] 212. The method of clause 211, wherein the first LNP and the second LNP are administered sequentially at an interval of one day to 12 months.

[1382] 213. The method of clause 212, wherein the interval is one day.

[1383] 214 The method of clause 212, wherein the interval is five days.

[1384] 215. The method of clause 212, wherein the interval is ten days.

[1385] 216. The method of clause 212, wherein the interval is fifteen days.

[1386] 217. The method of clause 212, wherein the interval is twenty days.

[1387] 218. The method of clause 212, wherein the interval is twenty-five days.

[1388] 219. The method of clause 212, wherein the interval is one month.

[1389] 220. The method of clause 212, wherein the interval is two months.

[1390] 221. The method of clause 212, wherein the interval is three months.

[1391] 222. The method of clause 212, wherein the interval is five months.

[1392] 223. The method of clause 212, wherein the interval is eight months.

[1393] 224. The method of clause 212, wherein the interval is ten months.

[1394] 225. The method of clause 212, wherein the interval is twelve months.

[1395] It will also be appreciated from reviewing the present disclosure, that it is contemplated that the one or more aspects or features presented in one of or a group of related clauses may also be included in other clauses or in combination with the one or more aspects or features in other clauses.:

1.-225. (canceled)

226. A composition comprising:
(i) an mRNA encoding a protein comprising a programmable DNA binding domain and a deaminase; and
(ii) a guide polynucleotide, wherein the guide polynucleotide comprises a spacer sequence, wherein the spacer sequence comprises at least 13 nucleotide bases of a nucleotide base sequence of a protospacer, wherein the protospacer is on a gene that encodes Angiopoietin-like protein 3, and wherein uracil is considered the same as thymine.

227. A composition comprising:
(i) (a) a protein comprising a programmable DNA binding domain and an adenosine deaminase, or
(b) a nucleic acid encoding the protein; and
(ii) a guide polynucleotide, wherein the guide polynucleotide comprises a spacer sequence, wherein the spacer sequence comprises at least 13 nucleotide bases of a nucleotide base sequence of a protospacer, wherein the protospacer is on a gene that encodes Angiopoietin-like protein 3, and wherein uracil is considered the same as thymine.

228. A composition comprising:
(i) (a) a protein comprising a programmable DNA binding domain and a deaminase, or
(b) a nucleic acid encoding the protein; and
(ii) a guide polynucleotide, wherein the guide polynucleotide comprises a spacer sequence, wherein the spacer sequence comprises at least 13 nucleotide bases of a nucleotide base sequence of a protospacer, wherein the protospacer is on a gene that encodes Angiopoietin-like protein 3, wherein uracil is considered the same as thymine;
wherein the spacer sequence comprises a nucleotide base sequence, wherein the nucleotide base sequence has at least 80% sequence identity to
(a) GCCAAUGGCCUCCUUCAGUU (nucleotide base sequence of nucleotides 1 to 20 of SEQ ID NO: 287 without any chemically modified nucleotides),
(b) GGCCUCCUUCAGUUGGGACA (nucleotide base sequence of nucleotides 1 to 20 of SEQ ID NO: 285 without any chemically modified nucleotides), or
(c) AAGAUACCUGAAUAACCCUC (nucleotide base sequence of nucleotides 1 to 20 of SEQ ID NO: 59 without any chemically modified nucleotides),
wherein the uppercase A, G, and C represent adenine, guanine, and cytosine, respectively, and wherein the uppercase U represents uracil or thymine.

229. A composition comprising:
(i) (a) a protein comprising a programmable DNA binding domain and a deaminase, or
(b) a nucleic acid encoding the protein; and
(ii) a guide polynucleotide, wherein the guide polynucleotide comprises a spacer sequence, wherein the spacer sequence comprises at least 13 nucleotide bases of a nucleotide base sequence of a protospacer, wherein the protospacer is on a gene that encodes Angiopoietin-like protein 3, wherein uracil is considered the same as thymine;
wherein the protospacer has at least 80% sequence identity to
(SEQ ID NO: 109)
(a) GCCAATGGCCTCCTTCAGTT,
(SEQ ID NO: 107)
(b) GGCCTCCTTCAGTTGGGACA, or
(SEQ ID NO: 15)
(c) AAGATACCTGAATAACCCTC,
wherein the uppercase A, T, G, and C represent adenosine, thymine, guanosine, and cytidine, respectively.

230. A composition comprising:
(i) (a) a protein comprising a programmable DNA binding domain and a deaminase, or
(b) a nucleic acid encoding the protein; and
(ii) a guide polynucleotide comprising a tracr sequence and a spacer sequence, wherein the spacer sequence comprises at least 13 nucleotide bases of a nucleotide base sequence of a protospacer, wherein the protospacer is on a gene that encodes Angiopoietin-like protein 3, wherein uracil is considered the same as thymine;
wherein the tracr sequence comprises a nucleotide base sequence, wherein the nucleotide base sequence has at least 80% sequence identity to a functional portion of a nucleotide base sequence of GUUUUAGAGCUAGAAAUAGCAAGUUAAAAUAAGGCUAGUCCGUUAUCAAC UUGAAAAAGUGGCACCGAGUCGGUGCUUUU (nucleotide base sequence of SEQ ID NO: 61), and
wherein the uppercase A, G, and C represent adenine, guanine, and cytosine, respectively, and wherein the uppercase U represents uracil or thymine.

231. A composition comprising:
(i) a protein comprising a programmable DNA binding domain, or a nucleic acid encoding the protein; and
(ii) a guide polynucleotide, wherein the guide polynucleotide comprises a spacer sequence, wherein the spacer sequence comprises at least 13 nucleotide bases of a nucleotide base sequence of a protospacer, wherein the protospacer is on a gene that encodes Angiopoietin-like protein 3, wherein uracil is considered the same as thymine;
wherein the protein effects a nucleobase pair alteration in the gene that encodes Angiopoietin-like protein 3 and wherein the nucleobase pair alteration is A·T to G·C.

232. A composition comprising:
(i) (a) a protein comprising a programmable DNA binding domain and a deaminase, or
(b) a nucleic acid encoding the protein; and
(ii) a guide polynucleotide, wherein the guide polynucleotide comprises a spacer sequence, wherein the spacer sequence comprises at least 13 nucleotide bases of a nucleotide base sequence of a protospacer, wherein the protospacer is on a gene that encodes Angiopoietin-like protein 3, wherein uracil is considered the same as thymine; and
wherein the protospacer is located at a splice site of the gene that encodes Angiopoietin-like protein 3.

233. The composition of claim 232, wherein the splice site is a splice donor site.

234. The composition of claim 233, wherein the splice donor site is at 5′ end of intron 6 of the gene that encodes Angiopoietin-like protein 3 as referenced in SEQ ID NO: 7.

235. A composition comprising:
(i) a protein comprising a programmable DNA binding domain, or a nucleic acid encoding the protein; and
(ii) a guide polynucleotide comprising a tracr sequence and a spacer sequence, wherein the spacer sequence comprises at least 13 nucleotide bases of a nucleotide base sequence of a protospacer, wherein the protospacer is on a gene that encodes Angiopoietin-like protein 3, wherein uracil is considered the same as thymine;
wherein the tracr sequence has at least 80% identity to any of the following chemically modified sequences:
(a) gUUUUAGagcuaGaaauagcaaGUUaAaAuAaggCUaGUCcGUUAucAAcuuGa aaaaguGgcaccgAgUCggugcusususu (SEQ ID NO: 57),
(b) gUUUUAGagcuagaaauagcaaGUUaAaAuAaggcuaGUccGUUAucAAcuugaaa aagugGcaccgagucggugcusususu (SEQ ID NO: 2241), or
(c) gUUUUAGagcuaGaaauagcaaGUUaAaAuAaggcuaGUccGUUAucAAcuuGaa aaagugGcaccgagucggugcusususu (SEQ ID NO: 3189), and
wherein 1) the uppercase A, U, G, and C represent adenosine, uridine, guanosine, and cytidine, respectively; 2) the lowercase a, u, g, and c represent 2′-O-Methyl-modified adenosine, uridine, guanosine, and cytidine, respectively, and 3) the lowercase s represents phosphorothioate (PS) linkage.

236. A method comprising administering to a subject a therapeutically effective amount of a composition comprising:
(i) an mRNA encoding a protein comprising a programmable DNA binding domain and a deaminase; and
(ii) a guide polynucleotide, wherein the guide polynucleotide comprises a spacer sequence, wherein the spacer sequence comprises at least 13 nucleotide bases of a nucleotide base sequence of a protospacer, wherein the protospacer is on a gene that encodes Angiopoietin-like protein 3, and wherein uracil is considered the same as thymine.

237. A method comprising administering to a subject a therapeutically effective amount of a composition comprising:
(i) (a) a fusion protein comprising a programmable DNA binding domain and an adenosine deaminase, or
(b) a nucleic acid encoding the fusion protein; and
(ii) a guide polynucleotide, wherein the guide polynucleotide comprises a spacer sequence, wherein the spacer sequence comprises at least 13 nucleotide bases of a nucleotide base sequence of a protospacer, wherein the protospacer is on a gene that encodes Angiopoietin-like protein 3, and wherein uracil is considered the same as thymine.

238. A method comprising:
a) administering to a subject a therapeutically effective amount of a composition comprising:
(i) a protein comprising a programmable DNA binding domain, or a nucleic acid encoding the protein; and
(ii) a guide polynucleotide, wherein the guide polynucleotide comprises a spacer sequence, wherein the spacer sequence comprises at least 13 nucleotide bases of a nucleotide base sequence of a protospacer, wherein the protospacer is on a gene that encodes Angiopoietin-like protein 3, wherein uracil is considered the same as thymine;
b) altering a nucleobase pair from A·T to G·C.

239. A method comprising administering to a subject a therapeutically effective amount of a composition comprising:
(i) (a) a protein comprising a programmable DNA binding domain and a deaminase, or
(b) a nucleic acid encoding the protein; and
(ii) a guide polynucleotide, wherein the guide polynucleotide comprises a spacer sequence, wherein the spacer sequence comprises at least 13 nucleotide bases of a nucleotide base sequence of a protospacer, wherein the protospacer is on a gene that encodes Angiopoietin-like protein 3, wherein uracil is considered the same as thymine; and
wherein the protospacer is located at a splice site of the gene that encodes Angiopoietin-like protein 3.

240. The method of claim 239, wherein the splice site is a splice donor site.

241. The method of claim 240, wherein the splice donor site is at 5′ end of intron 6 of the gene that encodes Angiopoietin-like protein 3 as referenced in SEQ ID NO: 7.

242. The composition of claim 226, wherein the programmable DNA binding domain is selected from the group consisting of Cas9, CasX, CasY, Cas12a (Cpf1), Cas12b, C2c1, C2c2, C2C₃, zinc finger nuclease (ZFN), Transcription activator-like effector nucleases (TALEN), and Argonaute.

243. The composition of claim 226, wherein the programmable DNA binding domain is selected from the group consisting of a nuclease inactive spCas9 domain and a spCas9 nickase.

244. The composition of claim 226, wherein the guide polynucleotide is a guide RNA.

245. The composition of claim 227, wherein the composition comprises the nucleic acid encoding the protein.

246. The composition of claim 245, wherein the nucleic acid encoding the protein is an mRNA.

247. The composition of claim 226, wherein the ratio of the guide nucleotide and the mRNA is from about 1:10 to about 10:1 by weight.

248. The composition of claim 226, wherein the ratio of the guide nucleotide and the mRNA is from about 1:3 to about 3:1 by weight.

249. The composition of claim 226, wherein the ratio of the guide nucleotide and the mRNA is from about 1:2 to about 2:1 by weight.

250. The composition of claim 226, wherein the ratio of the guide nucleotide and the mRNA from about 1:1.5 to about 1.5:1 by weight.

251. The composition of claim 226, wherein the ratio of the guide nucleotide and the mRNA is about 1:1 by weight.

252. A method for treating or preventing a condition in a subject in need thereof, the method comprising administering to the subject a therapeutically effective amount of a pharmaceutical composition comprising the composition of claim 226.

253. The method of claim 252, wherein the condition is homozygous familial hypercholesterolemia.

254. The composition of claim 230, wherein the nucleotide base sequence has at least 90% sequence identity to the functional portion of a nucleotide base sequence of SEQ ID NO: 61.

255. The composition of claim 230, wherein the nucleotide base sequence has at least 80% sequence identity to the nucleotide base sequence of SEQ ID NO: 61.

256. The composition of claim 255, wherein the nucleotide base sequence has at least 90% sequence identity to the nucleotide base sequence of SEQ ID NO: 61.

257. The composition of claim 230, wherein the tracr sequence comprises at least one chemically modified nucleotide.

258. The composition of claim 230, wherein the tracr sequence has at least 80% identity to any of the following chemically modified sequences:
(a) gUUUUAGagcuaGaaauagcaaGUUaAaAuAaggCUaGUCcGUUAucAAcuuGa aaaaguGgcaccgAgUCggugcusususu (SEQ ID NO: 57),
(b) gUUUUAGagcuagaaauagcaaGUUaAaAuAaggcuaGUccGUUAucAAcuugaaa aagugGcaccgagucggugcusususu (SEQ ID NO: 2241), or
(c) gUUUUAGagcuaGaaauagcaaGUUaAaAuAaggcuaGUccGUUAucAAcuuGaa aaagugGcaccgagucggugcusususu (SEQ ID NO: 3189), and
wherein 1) the uppercase A, U, G, and C represent adenosine, uridine, guanosine, and cytidine, respectively; 2) the lowercase a, u, g, and c represent 2′-O-Methyl-modified adenosine, uridine, guanosine, and cytidine, respectively, and 3) the lowercase s represents phosphorothioate (PS) linkage.

259. The composition of claim 231, wherein the nucleobase pair alteration is at a splice donor site of the gene that encodes Angiopoietin-like protein 3 as referenced in SEQ ID NO: 7.

260. The composition of claim 259, wherein the splice donor site is at 5′ end of intron 6 of the gene that encodes Angiopoietin-like protein 3 as referenced in SEQ ID NO: 7.

261. The composition of claim 231, wherein the nucleobase pair alteration is at nucleotide 11722 of the gene that encodes Angiopoietin-like protein 3 as referenced in SEQ ID NO: 7.

262. The composition of claim 226, wherein the spacer sequence comprises a nucleotide base sequence, wherein the nucleotide base sequence has at least 80% sequence identity to:
(a) GCCAAUGGCCUCCUUCAGUU (nucleotides 1 to 20 of SEQ ID NO: 287 without any chemically modified nucleotides),
(b) GGCCUCCUUCAGUUGGGACA (nucleotides 1 to 20 of SEQ ID NO: 285 without any chemically modified nucleotides), or
(c) AAGAUACCUGAAUAACCCUC (nucleotides 1 to 20 of SEQ ID NO: 59 without any chemically modified nucleotides),
wherein 1) the uppercase A, U, G, and C represent adenosine, uridine, guanosine, and cytidine, respectively; 2) the lowercase a, u, g, and c represent 2′-O-Methyl-modified adenosine, uridine, guanosine, and cytidine, respectively, and 3) the lowercase s represents phosphorothioate (PS) linkage.

263. The composition of claim 226, wherein the protospacer has at least 80% sequence identity to
(SEQ ID NO: 109)
(a) GCCAATGGCCTCCTTCAGTT,
(SEQ ID NO: 107)
(b) GGCCTCCTTCAGTTGGGACA, or
(SEQ ID NO: 15)
(c) AAGATACCTGAATAACCCTC,
wherein the uppercase A, T, G, and C represent adenosine, thymine, guanosine, and cytidine, respectively.

264. The composition of claim 226, wherein the composition is formulated for intravenous infusion.

265. The method of claim 236, wherein the administration is via intravenous infusion.

266. The composition of claim 226, wherein the mRNA has at least 95% sequence identity to SEQ ID NOs: 2148, 2153 or 2192.

267. The composition of claim 226, wherein the mRNA has at least 95% sequence identity to the coding sequence of SEQ ID NOs: 2148, 2153 or 2192.

268. The composition of claim 226, wherein the spacer sequence comprises at least 14 nucleotide bases of the nucleotide base sequence of the protospacer.

269. The composition of claim 226, wherein the spacer sequence comprises at least 15 nucleotide bases of the nucleotide base sequence of the protospacer.

270. The composition of claim 226, wherein the spacer sequence comprises at least 16 nucleotide bases of the nucleotide base sequence of the protospacer.

271. The composition of claim 226, wherein the spacer sequence comprises at least 17 nucleotide bases of the nucleotide base sequence of the protospacer.

272. The composition of claim 226, wherein the spacer sequence comprises at least 18 nucleotide bases of the nucleotide base sequence of the protospacer.

273. The composition of claim 226, wherein the spacer sequence comprises at least 19 nucleotide bases of the nucleotide base sequence of the protospacer.

274. The composition of claim 226, wherein the spacer sequence comprises at least 20 nucleotide bases of the nucleotide base sequence of the protospacer.

275. The composition of claim 226, wherein the spacer sequence comprises at least 21 nucleotide bases of the nucleotide base sequence of the protospacer.

276. The composition of claim 226, wherein the spacer sequence comprises at least 22 nucleotide bases of the nucleotide base sequence of the protospacer.

277. The composition of claim 226, wherein the spacer sequence comprises at least 23 nucleotide bases of the nucleotide base sequence of the protospacer.

278. The composition of claim 226, wherein the spacer sequence comprises at least 24 nucleotide bases of the nucleotide base sequence of the protospacer.

279. The method of claim 236, wherein the subject has homozygous familial hypercholesterolemia.

280. A composition comprising:
(i) an mRNA encoding a base editor protein comprising a DNA binding domain and a deaminase, wherein the mRNA comprises a sequence having at least 90% sequence identity to SEQ ID NO: 2148, 2153, or 2192, and
(ii) a guide polynucleotide comprises a spacer sequence and a tracr sequence,
a) wherein the spacer sequence comprises a nucleotide base sequence selected from the group consisting of:
a. GCCAAUGGCCUCCUUCAGUU (nucleotide base sequence of nucleotides 1 to 20 of SEQ ID NO: 287 without any chemically modified nucleotides),
b. GGCCUCCUUCAGUUGGGACA (nucleotide base sequence of nucleotides 1 to 20 of SEQ ID NO: 285 without any chemically modified nucleotides), and
c. AAGAUACCUGAAUAACCCUC (nucleotide base sequence of nucleotides 1 to 20 of SEQ ID NO: 59 without any chemically modified nucleotides), Wherein the uppercase A, G, and C represent adenine, guanine, and
cytosine, respectively, and wherein the uppercase U represents uracil or thymine; and
b) wherein the tracr sequence comprises a chemically modified sequence selected from the group consisting of:
(SEQ ID NO: 57)
a. gUUUUAGagcuaGaaauagcaaGUUaAaAuAaggCUaGUCcGUUAu
cAAcuuGaaaaaguGgcaccgAgUCggugcusususu,
(SEQ ID NO: 2241)
b. gUUUUAGagcuagaaauagcaaGUUaAaAuAaggcuaGUccGUUAu
cAAcuugaaaaagugGcaccgagucggugcusususu, and
(SEQ ID NO: 3189)
c. gUUUUAGagcuaGaaauagcaaGUUaAaAuAaggcuaGUccGUUAu
cAAcuuGaaaaagugGcaccgagucggugcusususu,
wherein 1) the uppercase A, U, G, and C represent adenosine, uridine, guanosine, and cytidine, respectively; 2) the lowercase a, u, g, and c represent 2′-O-Methyl-modified adenosine, uridine, guanosine, and cytidine, respectively, and 3) the lowercase s represents phosphorothioate (PS) linkage.

281. A composition comprising:
(i) an mRNA comprises
a) a 5′ untranslated region,
b) a first region encoding a deaminase, wherein the deaminase comprises a protein selected from the group consisting of an adenosine deaminase and a cytidine deaminase,
c) a second region encoding a programmable DNA binding domain, wherein the programmable DNA binding domain is selected from the group consisting of Cas9, CasX, CasY, Cas12a (Cpf1), Cas12b, C₂c1, C₂c2, C₂C₃, zinc finger nuclease (ZFN), Transcription activator-like effector nucleases (TALEN), and Argonaute,
d) a third region encoding a nuclear localization sequence, wherein the nuclear localization sequence comprises a sequence selected from the group consisting of SEQ ID NOs: 27, 28 and 2146, or the third region comprises a sequence selected from the group consisting of SEQ ID NNs: 2145, 2167, 2173 and 2179, and
e) a 3′ untranslated region, and
(ii) a guide polynucleotide comprises a spacer sequence and a tracr sequence,
a) wherein the spacer sequence comprises a nucleotide base sequence selected from the group consisting of:
a. GCCAAUGGCCUCCUUCAGUU (nucleotide base sequence of nucleotides 1 to 20 of SEQ ID NO: 287 without any chemically modified nucleotides),
b. GGCCUCCUUCAGUUGGGACA (nucleotide base sequence of nucleotides 1 to 20 of SEQ ID NO: 285 without any chemically modified nucleotides), and
c. AAGAUACCUGAAUAACCCUC (nucleotide base sequence of nucleotides 1 to 20 of SEQ ID NO: 59 without any chemically modified nucleotides),
Wherein the uppercase A, G, and C represent adenine, guanine, and
cytosine, respectively, and wherein the uppercase U represents uracil or thymine; and
b) wherein the tracr sequence comprises a chemically modified sequence selected from the group consisting of:
d. gUUUUAGagcuaGaaauagcaaGUUaAaAuAaggCUaGUCcGUUAucAAcu uGaaaaaguGgcaccgAgUCggugcusususu (SEQ ID NO: 57),
e. gUUUUAGagcuagaaauagcaaGUUaAaAuAaggcuaGUccGUUAucAAcuug aaaaagugGcaccgagucggugcusususu (SEQ ID NO: 2241), and
f. gUUUUAGagcuaGaaauagcaaGUUaAaAuAaggcuaGUccGUUAucAAcuu GaaaaagugGcaccgagucggugcusususu (SEQ ID NO: 3189), and
wherein 1) the uppercase A, U, G, and C represent adenosine, uridine, guanosine, and cytidine, respectively; 2) the lowercase a, u, g, and c represent 2′-O-Methyl-modified adenosine, uridine, guanosine, and cytidine, respectively, and 3) the lowercase s represents phosphorothioate (PS) linkage.

282. The composition of claim 281, wherein (1) the deaminase comprises a sequence of SEQ ID NO: 2140 or (2) the first region encoding the deaminase comprises a sequence selected from the group consisting of SEQ ID NOs: 2139, 2162, 2169, and 2175.

283. The composition of claim 281, wherein (1) the programmable DNA binding domain comprises a sequence selected from the group consisting of SEQ ID NOs: 40, 2152, 2156, and 2160 or (2) the second region encoding the programmable DNA binding domain comprises a sequence selected from the group consisting of SEQ ID NOs: 2142, 2151, 2155, 2159, 2164, 2171 and 2177.

The application's sequence listing, which the Patent Office published only in electronic form, follows.

SEQUENCE LISTING (3190 sequences)

SEQ ID NO: 1 - protein, 167 aa, Escherichia coli
MSEVEFSHEYWMRHALTLAKRAWDEREVPVGAVLVHNNRVIGEGWNRPIGRHDPTAHAEIMALRQGGLVMQNYRLIDATLYVTLEPCVMCAGAMIHSRIGRVVFGARDAKTGAAGSLMDVLHHPGMNHRVEITEGILADECAALLSDFFRMRRQEIKAQKKAQSSTD

SEQ ID NO: 2 - skipped

SEQ ID NO: 3 - protein, 1566 aa, synthetic construct
  source 1..1566: note = Description of Artificial Sequence: Synthetic polypeptide
MSEVEFSHEYWMRHALTLAKRARDEREVPVGAVLVLNNRVIGEGWNRAIGLHDPTAHAEIMALRQGGLVMQNYRLIDATLYVTFEPCVMCAGAMIHSRIGRVVFGVRNAKTGAAGSLMDVLHHPGMNHRVEITEGILADECAALLCRFFRMPRRVFNAQKKAQSSTDSGGSSGGSSGSETPGTSESATPESSGGSSGGSDKKYSIGLAIGTNSVGWAVITDEYKVPSKKFKVLGNTDRHSIKKNLIGALLFDSGETAEATRLKRTARRRYTRRKNRICYLQEIFSNEMAKVDDSFFHRLEESFLVEEDKKHERHPIFGNIVDEVAYHEKYPTIYHLRKKLVDSTDKADLRLIYLALAHMIKFRGHFLIEGDLNPDNSDVDKLFIQLVQTYNQLFEENPINASGVDAKAILSARLSKSRRLENLIAQLPGEKKNGLFGNLIALSLGLTPNFKSNFDLAEDAKLQLSKDTYDDDLDNLLAQIGDQYADLFLAAKNLSDAILLSDILRVNTEITKAPLSASMIKRYDEHHQDLTLLKALVRQQLPEKYKEIFFDQSKNGYAGYIDGGASQEEFYKFIKPILEKMDGTEELLVKLNREDLLRKQRTFDNGSIPHQIHLGELHAILRRQEDFYPFLKDNREKIEKILTFRIPYYVGPLARGNSRFAWMTRKSEETITPWNFEEVVDKGASAQSFIERMTNFDKNLPNEKVLPKHSLLYEYFTVYNELTKVKYVTEGMRKPAFLSGEQKKAIVDLLFKTNRKVTVKQLKEDYFKKIECFDSVEISGVEDRFNASLGTYHDLLKIIKDKDFLDNEENEDILEDIVLTLTLFEDREMIEERLKTYAHLFDDKVMKQLKRRRYTGWGRLSRKLINGIRDKQSGKTILDFLKSDGFANRNFMQLIHDDSLTFKEDIQKAQVSGQGDSLHEHIANLAGSPAIKKGILQTVKVVDELVKVMGRHKPENIVIEMARENQTTQKGQKNSRERMKRIEEGIKELGSQILKEHPVENTQLQNEKLYLYYLQNGRDMYVDQELDINRLSDYDVDHIVPQSFLKDDSIDNKVLTRSDKNRGKSDNVPSEEVVKKMKNYWRQLLNAKLITQRKFDNLTKAERGGLSELDKAGFIKRQLVETRQITKHVAQILDSRMNTKYDENDKLIREVKVITLKSKLVSDFRKDFQFYKVREINNYHHAHDAYLNAVVGTALIKKYPKLESEFVYGDYKVYDVRKMIAKSEQEIGKATAKYFFYSNIMNFFKTEITLANGEIRKRPLIETNGETGEIVWDKGRDFATVRKVLSMPQVNIVKKTEVQTGGFSKESILPKRNSDKLIARKKDWDPKKYGGFDSPTVAYSVLVVAKVEKGKSKKLKSVKELLGITIMERSSFEKNPIDFLEAKGYKEVKKDLIIKLPKYSLFELENGRKRMLASAGELQKGNELALPSKYVNFLYLASHYEKLKGSPEDNEQKQLFVEQHKHYLDEIIEQISEFSKRVILADANLDKVLSAYNKHRDKPIREQAENIIHLFTLTNLGAPAAFKYFDTTIDRKRYTSTKEVLDATLIHQSITGLYETRIDLSQLGGD

SEQ ID NO: 4 - DNA, 4764 bp, synthetic construct
  source 1..4764: mol_type = other DNA; note = Description of Artificial Sequence: Synthetic polynucleotide
atgagcgaggtcgagttctctcacgaatattggatgagacacgctctcaccctggctaagagagccagggacgaaagagaggtgccagttggcgctgtcctggtgttgaacaatcgcgtcatcggagaaggatggaatcgcgccattggcctgcacgatccaaccgcacatgccgaaattatggctctgcggcaaggcggcctcgtgatgcaaaattacagactgatcgatgctaccctctacgtcaccttcgagccctgtgtcatgtgtgctggggcaatgattcactcccggattggccgcgtggtgtttggagtgcggaatgccaagactggcgccgctggatctctgatggacgtcctgcaccatcctgggatgaaccaccgggtcgagatcacagagggaattctggctgacgagtgcgctgccctgctgtgcaggttctttagaatgcctagaagggtgttcaacgcccagaaaaaagctcagagcagcaccgattccggcggaagcagcggaggatcttctggaagcgaaaccccaggcaccagcgagtctgccacaccagaatcatctggcggtagctccggcggcagcgacaagaagtattctatcggactggccatcggcaccaactctgttggatgggccgtgatcaccgacgagtacaaggtgcccagcaagaaattcaaggtgctgggcaacaccgacaggcacagcatcaagaagaacctgatcggcgcactgctgttcgactctggcgaaacagccgaggccaccagactgaagagaacagcccgcagacggtacaccagaagaaagaaccggatctgctacctccaagagatcttcagcaacgagatggccaaggtggacgacagcttcttccacagactggaagagtccttcctggtggaagaggacaagaagcacgagagacaccccatcttcggcaacatcgtggacgaggtggcctaccacgagaagtaccccaccatctaccacctgagaaagaaactggtggacagcaccgacaaggccgacctgagactgatctatctggccctggctcacatgatcaagttccggggccacttcctgatcgagggcgacctgaatcctgacaacagcgacgtggacaagctgttcatccagctggtgcagacctacaaccagctgttcgaggaaaaccccatcaacgccagcggagtggatgccaaggccatcctgtctgccagactgagcaagagcagacggctggaaaatctgatcgcccagctgcctggcgagaagaagaatggcctgttcggcaacctgattgccctgagcctgggcctgacacctaacttcaagagcaacttcgacctggccgaggacgccaaactgcagctgagcaaggacacctacgacgacgacctggacaatctgctggcccagatcggcgatcagtacgccgacttgtttctggccgccaagaatctgagcgacgccatcctgctgtccgacatcctgagagtgaacaccgagatcaccaaggcacctctgagcgcctctatgatcaagagatacgacgagcaccaccaggatctgaccctgctgaaggccctcgttagacagcagctgccagagaagtacaaagagattttcttcgaccagagcaagaacggctacgccggctacattgatggcggagccagccaagaggaattctacaagttcatcaagcccatcctcgagaagatggacggcaccgaggaactgctggtcaagctgaacagagaggacctgctgagaaagcagagaaccttcgacaacggcagcatccctcaccagatccacctgggagaactgcacgccattctgcggagacaagaggacttttacccattcctgaaggacaaccgggaaaagatcgagaaaatcctgaccttcaggatcccctactacgtgggaccactggccagaggcaatagcagattcgcctggatgaccagaaagagcgaggaaaccatcactccctggaacttcgaggaagtggtggacaagggcgccagcgctcagtccttcatcgagcggatgaccaacttcgataagaacctgcctaacgagaaggtgctgcccaagcacagcctgctgtacgagtacttcaccgtgtacaacgagctgaccaaagtgaaatacgtgaccgagggaatgagaaagcccgcctttctgagcggcgagcagaaaaaggccatcgtggatctgctgttcaagaccaaccggaaagtgaccgtgaagcagctgaaagaggactacttcaagaaaatcgagtgcttcgacagcgtcgagatctccggcgtggaagatcggttcaatgccagcctgggcacataccacgatctgctgaaaattatcaaggacaaggacttcctggacaacgaagagaacgaggacatccttgaggacatcgtgctgacactgaccctgtttgaggacagagagatgatcgaggaacggctgaaaacatacgcccacctgttcgacgacaaagtgatgaagcaactgaagcggcggagatacaccggctggggcagactgtctcggaagctgatcaacggcatccgggataagcagtccggcaagaccatcctggactttctgaagtccgacggcttcgccaacagaaacttcatgcagctgattcacgacgacagcctcaccttcaaagaggatatccagaaagcccaggtgtccggccagggcgattctctgcatgagcacattgccaacctggccggctctcccgccattaagaaaggcatcctgcagacagtgaaggtggtggacgagcttgtgaaagtgatgggcagacacaagcccgagaacatcgtgatcgaaatggccagagagaaccagaccacacagaagggacagaagaacagccgcgagagaatgaagcggatcgaagagggcatcaaagagctgggcagccagatcctgaaagaacaccccgtggaaaacacccagctgcagaacgagaagctgtacctgtactacctgcagaatggacgggatatgtacgtggaccaagagctggacatcaacagactgtccgactacgatgtggaccatatcgtgccccagtcttttctgaaggacgactccatcgacaacaaggtcctgaccagatccgacaagaatcggggcaagagcgacaacgtgccctccgaagaggtggtcaagaagatgaagaactactggcgacagctgctgaacgccaagctgattacccagcggaagttcgacaatctgaccaaggccgaaagaggcggcctgagcgaactggataaggccggcttcatcaagagacagctggtggaaacccggcagatcacaaagcacgtggcacagattctggactctcggatgaacactaagtacgacgagaacgacaaactgatccgcgaagtgaaagtcatcaccctgaagtccaagctggtgtccgatttccggaaggatttccagttctacaaagtgcgcgagatcaacaactaccatcacgcccacgacgcctacctgaatgccgttgttggaacagccctgatcaaaaagtaccctaagctggaaagcgagttcgtgtacggcgactacaaggtgtacgacgtgcggaagatgatcgccaagagcgagcaagagattggcaaggcaaccgccaagtacttcttctacagcaacatcatgaactttttcaagacagagatcaccctcgccaacggcgagatcagaaagcggcctctgatcgagacaaacggcgaaaccggcgagattgtgtgggataagggcagagactttgccacagtgcggaaagtgctgagcatgccccaagtgaatatcgtgaagaaaaccgaggtgcagacaggcggcttcagcaaagagtctatcctgcctaagcggaactccgacaagctgatcgccagaaagaaggactgggaccccaagaagtacggcggcttcgattctcctaccgtggcctatagcgtgctggtggtggccaaagtggaaaagggcaagtccaagaaactcaagagcgtgaaagagctgctggggatcaccatcatggaaagaagcagcttcgagaagaatccgatcgatttcctcgaggccaagggctacaaagaagtgaaaaaggacctgatcatcaagctccccaagtactccctgttcgagctggaaaacggccggaagagaatgctggcctctgctggcgaactgcagaagggaaacgaactggccctgcctagcaaatatgtgaacttcctgtacctggccagccactatgagaagctgaagggcagccccgaggacaatgagcaaaagcagctgtttgtggaacagcacaagcactacctggacgagatcatcgagcagatcagcgagtttagcaagagagtgattctggccgacgccaatctggacaaagtgctgtccgcctacaacaagcaccgggacaagcctatcagagagcaggccgagaatatcatccacctgtttaccctgaccaacctgggagcccctgccgccttcaagtactttgacaccaccatcgaccggaagcggtacacctccaccaaagaggtgctggacgccactctgatccaccagtctatcaccggcctgtacgagacacggatcgacctgtctcaactcggaggcgacgaaggcgccgataagagaaccgccgatggctctgagttcgagagccccaagaaaaagcgcaaagtg

SEQ ID NO: 5 - DNA, 25378 bp, Homo sapiens
  source 1..25378: mol_type = unassigned DNA
gtccgatggggctctggtggcgtgatctgcgcgccccaggcgtcaagcacccacaccctagaaggtttccgcagcgacgtcgaggcgctcatggttgcaggcgggcgccgccgttcagttcagggtctgagcctggaggagtgagccaggcagtgagactggctcgggcgggccgggacgcgtcgttgcagcagcggctcccagctcccagccaggattccgcgcgccccttcacgcgccctgctcctgaacttcagctcctgcacagtcctccccaccgcaaggctcaaggcgccgccggcgtggaccgcgcacggcctctaggtctcctcgccaggacagcaacctctcccctggccctcatgggcaccgtcagctccaggcggtcctggtggccgctgccactgctgctgctgctgctgctgctcctgggtcccgcgggcgcccgtgcgcaggaggacgaggacggcgactacgaggagctggtgctagccttgcgttccgaggaggacggcctggccgaagcacccgagcacggaaccacagccaccttccaccgctgcgccaaggtgcgggtgtagggatgggaggccggggcgaacccgcagccgggacggtgcggtgctgtttcctctcgggcctcagtttccccccatgtaagagaggaagtggagtgcaggtcgccgagggctcttcgcttggcacgatcttggggactgcaggcaaggcggcgggggaggacgggtagtggggagcacggtggagagcggggacggccggctctttggggacttgctggggcgtgcggctgcgctattcagtgggaaggttcgcggggttgggagacccggaggccgaggaagggcgagcagagcactgccaggatatcctgcccagatttcccagtttctgcctcgccgcggcacaggtgggtgaaggagtgaatgcctggaacgtactgggaactgcaccaggcacagagaaagcgggcttgccattatagtgggttccgatttggtttggaaaacatgggcagcggagggtggagggcctggagagaaggccctacccgagacaggggcggggtgggaaggacggcagatgctgggagcacgaggcaatttctttatgacacagaactcatgctctagtattccatctgtttcagccgaagaaaagaaccagctgaaggggcaggggagaaggggcggaggtattctcgaggcccattggcgtcctttaggactcaggcagggaagggcccttggtgctctggagccggaggtggtgcgcctggtactgggaccccggagctgagcccggcgcctcagcccacctggctgtctgccgaccgtgtgcggggcgagtttgctcaacaactctgccagcttctggccctcaggctgtgggaagcttcttcccggggcgagaccactagctttttctaagtattaccagcccaggacttggctgaggttctgtgtcccccagcttggagtcagatgtggggttgaatcttggcttcctctcactagctgtggtgcttgacaagtcacttatccttgagcctccattgcctaatctttaaaagggaggtgacaatcgtccctacggctcagtggcagcagatggggagatgaagggaaagttctgttgaccatgagtgaacttacaatgcaagccccggggggatcacttgcagttttgtccctgtctgcagtgtgacctgttggtgacattgtctttgctccaaaccacagctcctggggcagaggggaaaattctgccactcacagctgcctgcccacgcttctgtctgagtgtgctgggtggcaggatggcaagtccttactcagctcagtatagccctcttccttgttccctgagcctttgactttctcgagggatgttgtggggttgtggccaggataagaaagggcatttcaagttaccactgctccaaaacaactgttctggaaatagtgagtaccccatcctgagaggtgagtaagcagaggctgtatgaccacctgaaccaagcccttgaggatgtttcttctctggtggaagtttggaacaggagcctcctcaagttcatttattcattcattcaatggttattttgtgggaatcgaatttagaatgaaaatattttttggcaagcagaaaataatttttagaccaatccttttcttttagtcatgagaaactgaggcccagagagaggaggtcaccccaggtgcattagaactgggtttccagaactgacactccactgcacagagtactctcccaattcattcaatttttatttagcggaaggcattttcagatgggtctttgaagcattagtaggagttcagcgatgatggtgtcatgagaattttattctaggattaggaggtaccatgaacaaagatacagagctgggaaaaccagaggtggaagataaggagcacatgtccacagttctttttcttttttttttgagatggagtttcgctcttgttgcccaggctggagtgcaatggtgcagtctcagctcactgcaacatctgtctcccgggttcaagtggttctcctgcctcagcctcccaagaagctgggattacaggtacctgccaccacgcccggctaatttttgtatttttagtagagaaggggtttcaccacgttggccaggctagtcgcaaactcctgacctcctcagtggatccgaggaggtgatcctcccgcctcagcctcccaaagtgctcgaattacaggtgtgagccaccacgcctggcctccacagttctttatccaccgtctgaaatgtaaaatgttacgaaaaccaaaagttttttttgtgatttatttgatggtagcacctgacgtgaactgacatgagattatttttaatttagttgtgtgaatatgcatattcatatattttgctgcatagattacagtatgcagctccagattcttccaagcagactctgattgcccattactgcctttctaaaatccaaacaagttctgaggttcaaaaccgttttggccctaaggctttgggtaaagggggtggactctgttctactctgactggagtccaagatgcatatatacagagatatgggtgatggggctgcaaggtaggttgaggtaggggccaaggaggagcatggagtttggacttgattcatgaggctgtggggagccagtgaaggttcttaagcaggtatgtctgcctgagagcagttggagcagacaagagctaaaaaccaaacaaatcaccatagatagtggctgctataatttgtttgtcccctccaaatctcatgtggaaatttggtcctcagtgttggaagtggggcctaatgggaggtgtttgggtcatgggggaggaacccctgtgaaaggcttggtgccgtccttgtgataatgagtaagttctcccgctatgatttcccttgaaggctgattattaaaaagagcttggcacctccctctcttctctcttgcttcttctcttgccatgtgattgatctctgcacatgtaggctccccttcaccttctgccatcagtgaaagcagcttaaggccctcaccagaagcagatgctggtgccatgcttcctggagagcttgcagaatcatgagctgaataaatcccttttccttgtaaattactcaccttcaggtattcctttatatagcaacacaaaaggactaagacagtggccttgacttttctctctctttaagaagtgttgcctttgctcacttagtcatcccttctgcctgcatttgtagagcatctggatgggagatttatataaccgtcactcttgactttcccagcaggcctatgtcataggtactgtggtctctacaatacagcagaggtatctgaggctccgagaggttgagtgacttgctcatggctgcacaaccagtaaatattggagctggaattcaggtccacggtttcctggctccaaagcccatgattttttccctcaatttattctgactggggcatgggggagggggtggcctttgggcagggccaccaggagcgaccaggcccgtagagagctgggtgcaggtacagaggaaaacctgttgtcgagtgtggcccgtagttcccatttttgcctgaatggcacatttgaaagtgttatataaccatgtgaataataatagttggcctatatgagttctttaatttgctttttggtccgcatttggtaacttctttatcatctactatactctgttgtgtctcttttgttgtaatttgtaagtaggggtgagataaagtacacctagggtttgctgggtttcttccatgtcatcatgttcctccttgcatggggccaggatccgtggaggttgcctggcacctacgtggtggtgctgaaggaggagacccacctctcgcagtcagagcgcactgcccgccgcctgcaggcccaggctgcccgccggggatacctcaccaagatcctgcatgtcttccatggccttcttcctggcttcctggtgaagatgagtggcgacctgctggagctggtgagccaccctttttgggaatggcacttcctgatagggctgggccactgcatatacactggggactgtgcttagtaggcccattgctgaaaatcagaaggggacagcaagtatgtattgagcacttatcgggtaccaagcacagtaactactggctttctgtatagaattccctttaagcctggccatgccccagtggtacgtctatcttcatttgaaagacgaggagactgaagttcagaggggaccacacagacagctaggggtagagcctggatcaaacccattggtctgcctgccagccattcttgtgccaatgcatctgctgcctacggaaacctgtagggacaaggccctgggatgttcagtggagcctgagtcattttataaaaaagcatgactctagggtccaaaattcctttgaagctgttgctatccagagtgaagtcccttctttaggacagggtggccctcctccctcctggatgtcacatcttcggtggaggggcagaaaggggactgggtattctcctcaccctggccctagtgcttcaaatcttaaaaaaacgtttttatttgtgcttctgcaccaccttctagcccacctcgtttcctggcctctaacttgatgagagcgtgtgtcattttcacactgattctccacatggcaggcggtgcttcttagcctcctgcagacagtgaggccccacggtcttgtccaaggtcacacagcgtgtaatgggcagggtcagagtctggagtctggacctgggtctcctagctgcactgcactgctgccccatgggttaatcagctcagcataccgtggctgaacagctacctcataccaaggcctgtggcgccatgacagggattgacagggtccctgccttggaaacccgtagtctaagtagaggagactgacaagtcaatgccttccatcagtctgctcaacacacgtttaccaagtgcctactgtgtgctgcagaggcgaagatgacacagctcaggcctttcccttgagcttacagttcaggaggagagactgaccagtgactgccagtacagttgactatgggacaatgtgctcagccttggggagagacgaagaaggtacccgtatagcaccagatgacaggcacgagccccacaggccagggcagctgctcagaggagagtaggccaagcagaaggcaaacagaaggctgcaggcatttgccatcgagagctggacttcaaactgggcatcataccagcctgggttcgagtcctgcccagccccttattggctgtctaaccctgagcaaatcccttcacctctctgagcctcattcctctatctgtaaaccagttataataattggaacattcatttaaggactaaatgaggtcgtgaagcattcagcagatgctaggtacggaaactcgctgaagtgggggcaggttaagaagcctctggggatacgaaggcatccagggactagttgtggcaggaggctgttaccacttaggtctgaagggtaaggagagggaatagctttccctctgcccagttggagccggtggcatggaggagaggctgcctgtggggaatcacccgagggttcaccgctgccatgcgcagggagtcaggaggtagggagggagtggggcagatgcacaccatttttttttttttttgagactctgttgcccagactggagtgcagtggtgccatatctgcacctctgcctcccgggttcaagctcactgcaacctctgcctcccgggttcaagcgattctcctgcctcagcctcccgagtagctgggactacaggtgtgtgccaccatgcctggctaatttttgtatttttaatagagatggggtttcaccatgttggccaggctggtctcgaactctcgacctcaggtgatcccccacctcggcctcccaaagtgctgggattacaggcgtgagtcaccgctcccagctgctgatgcactcttgtccttctaactcctgctagtgcctcccattggctgagcccaactggaagctttgcaagggagctggtgctgcagtttgcactgagcaggctggagaaggctggagaatagactaggggacaaaccgaattgccagtgctgttatgtcatgatttaggcatggagtccagggcctgagcttcactccatgtccatcctgcccagagccttggcacagcctggctcccagacaagatgtcaagttcagaatccttcctaaaaggaatcctctatgccagaccgtgttgcagggatatgggagtgctgggctcccagcctgatcaaggagcgagaaaactcaggctcctagtctgtcctccggggcactagcagggacaaggtgggaggctgctgggctgggatgtggggacaggtttgatcaggtaaggccaggctgtggctgtgtttgctgctgtccaaatggcttaagcagagtcccccggcctctctggcttctgcaggccttgaagttgccccatgtcgactacatcgaggaggactcctctgtctttgcccagagcatcccgtggaacctggagcggattacccctccacggtaccgggcggatgaataccagccccccggtaagacccccatctgtgccctgccccaccccatctgagctgaatccatttgctctgccctggcctggcctccctgctggtggtttccacttctcggggggctttgggactcagcacctccactgacccctttttttctgtcccatccccatcccctgcagcccccactgcctgccttcctgttgccccacaaatgcaaaagtcttgccttaaatgatcctcttttccttcttttctcttgttttccttttctcaccatttggaatggcccagcaggctgcacttaccttggaaggagggttcatctgatggtgactctacctagggcccccaggcctctataactcccagtgccctgcagactggaccagatcctttaatgggatagacacaaccctgtctgggatgcctctgcctaccttcctgttttgctgctccacctgcctccagctccgtttggcttcctggggctccctgcctgggccactttgtgtcttccctctaggcctttctttccactgttccctctgcctggtgtggcctggctatggaagggagggaggaggagcggccatggaaaacggtctgcattctagcagggacttgcaggtggcaattcagtcggggaagactctagatgcacctggcctgaggagagaatgaagggttctagttggactgtgttaagtttgaggtgcccatggtgtgaggtctggagctcagcgcagagatgatgcaatgtggtgggtccatgcaacatggtgccaggacgcagagcttggggtgaactcagctttcaccccttaccggttctcgtgggatcttgggaagccactttcttctatgagctttgtcgttcttgtctgtaaaatgggcacataaccctgtccctgtccttctcacaggttgctgtgagactccaatgagttgaaggatgtgcagatgcttttggaagtgaaaagttggggggctactgtgtgactttgcatacacccaaactgtgtgaccttgcatatgtctgagttgctgccattgcaacagatcagagctggtgggctgggtgtggagaaagggtttgtgtgggggacatcctctggcaagggtggcagcagcagaagtgaggggcctggtcggtcatgtgtgctgacccggcctgggcagcctgtggccagggagaggacagctcctctgtaggaagagcctgttcctttccaaccaggtgagacctcttcagtggagccctggagccccctgtactccacatcagtgcctcagggacctcccggagcaggctaatatcagagaccaagagggacactggcagaggatcacagagaccccagtccaggcagggactgagaagatcttgccccctaagttagtttcctagcactgctgtgacaaattaccaccccctcggttggaacaagttgattctctgcagtcctggaggccagaagcctgaatcagtgtcggcaggaccactttctcccggggggctccagggagaagcttctcttgcctcttccgtgtcccaacagcggcagcacaccaatcccagcctctgtcttcacacagccttctctgtgtctctctcctcttcattgtctcataaggacacttgtcattggatttagggcccactggatcctccaggatgatctcatgtggggaaccttaaccacatctgcaaggaccctttttccaaataaggtcacagccacaggttgtgggggttaggatgtgagtgtatctctttggcagccactgttccctcctctcccttgggccagaagcagacgtggggccctttcttccccataggatgcccatggattgccccccttcccgcttcccccgagtgtctgtgggaggtggcaggaatggcaggcaggggtgtggaaccccttctggagtcatatcaagggcttggctggaggaagtcctcctggagctgttgggctggcatggggcaggctggctgggcccagcagcagcttcttcattcatggggaggccacaagcatgggccctagagctggctgccgccctcaaacccagaccctgcactcttaactgtgtgaccttgcatacgtcactcaccctctctgatcttcaggttcctctgcaaaagggaggtaatgataaccctcactctggggggctgtttggagggttaaatcagttattgctgtagcatgcatttctctgtcaggtattgagtgaggtgctgtgattttagccctgcatttttcttttcttaccattcaataataacgttttgagcacccactgtgcgccaggcaccatattaggtgctggggatacaaatgtgaatgaaatgaatgtggtctcttcccccaacagtgtatccagaagattaatccattccttaaacaaatgctacttgacacagattagttctggataggctgagagctctgaaggagtgcaggcagctgcgagcctgtgtatccagcagaaggatcaggaaaggattcctggaggaagcgctgttctagccaagacctacgggggcattattaaccaggcaaaggggacggtgtccaagcagtggaatgaacgtggattgaagctgtgaggcaggagggagtgtggcctgtgcagaagggaccgaggctggtgagaccaggagggcctgggtggcctccaggtcagatgtgaaaggaagaacttggccacagtctgagcttctcaggcgtatggcagggctgcctggtgagagggaatgagctccctgctctggaggtatgcaagcaggactgggctctcacctgccagaggccacagagctttccagaggctggaagaggccactccaaggcctctttgcccctgagagtggtggctcttcttgaggccaccttgccacgctgtcacagggaactagcagcccctgcctcacccgggggtttggaagatagagggaggcctaggaagggccctgtgtctcatccgagctgggcccctttccagcctctcactggaaggaagcccaaggatgttcctgtgggggcttttaccaggcccacctgccctctgctggccatgcttgcagcctcctgaccctgtcccagcaggacagtgggctggtgtgagcgggcaggaaccgcctgcacttagaaggtgtggggctgcctccccgagcttccatctgccgctggggccacaccccaggcccagggatgggaccccacagtggtcacatcatcttgcagcagaacccaggtacagctcctggagcagatggtggtcccaagcacgggtgggaccagaaaggactctcacctgggctaactcagctgcagcctcagttccctcctcacacacgacgaggaacatggactggaagcctgcccagcaggccttctgctcgatgtgcgttgtgtggcttacgtccagggagggaagcagcctctgtgctgtcttctagataagcctgtattccccgggctgtctgccaatgtatccagttgtcccgtcagcctggaagctctgagggaaaaccttgggctgcttcctgagcacctgtatcccctgcagccagcccggggcctctgctaggagcagactgagcatggcttatgggcctggcaccatctggcctctgcccaccttgctggccttgtcttgtgtctgccccttcgacattccatagcccagctcaatatctagtggttcctctagggtggcgagcactgtttggtctccagatgtcttcaggtcggagctcacagcgctctcagccaccccttcccagtgtagcaccgggcacatggtagatgcctattgatgagtgaaagctcctaacacactcagagagcaaggactccgcctcatcccacagcctgggaggagaggcagactgccaaggacctgctcagcatgctacagaagaaaccaaagtgcccacgggactgatcagtggagcttcctgccgagactggaggccttagggcagggtagacagtgtgtgtgcaggctggggactcacagttcggactgtgcccagacctactagcatagtgggtgggtgggaggatgcgggactgggggccgaccttgcctgaaattcatgtgggatctcagagcagccactgaattgctctgtagggggctaaatagtggcccccacagatacacacacccagacagagcctgtgagccagaccttatttggagaaaaggtctttgtagatgtaattaagcatctcaagatggcatcatctggattatgcggtgggctgtaagtcctgtgatgtgtctttatgagagaaaggcagagggagatttgacacacacaggaggggccacgtggagacagaggtggagattggagaaatgtggccacaagccagggaacaccagcagccaccagaagccggaagacgtgaggcagggttcttcccagagccttcgctgctgagtctgggaatttgtgaccgaagccataagaagtgggtacacgccctgagcctcccacacttgctcacctgtcctgagatgagaatctctactctgcagcatatttggaggatcactgcgggggccacagaggtgctgttcagatggcacttcagaagactcaggagaccctggggcaggagcagtttgactgacagcccagagggctgccctctgattccacctgaggccctgcttttcctggctgcaggggttccagggccaggccatttccgctggcgcaggactctgctagcagcaacctgcctgaagtcttcctttggcctggctgagagtttctgagacctgcgctggagcggaggtgcttccttccttgcttcctttcttcctctctcccttctccatccagcaggctggacctgcctggcatctgtgagctctccctactttctcctataccctaacctttgtcctgcatgggcgactcccccagtgagtctcttgcagcttttaccccagtgcctgcttcttggagaatccaaactgatccagttagggatgataaagtgtagggtaggcgctcggtgactgttttctctgaggttgtgactcgtgtgaggcagaagcagtccccgtgagccctcctggtatcttgtggagtggagaacgcttggacctggagccaggaggcccagacatacatcctgtccgagctgcagcttcctgtctctaaaatgagccggccagcgcaggtggccagacatcactgttattctcctttgagtctttaaatcttgttgtctttcttgcagactcggtgagctgtgaaaggctataataggggctttattttacactttgatactattttttgaacattcatattattgttagatattgatattcatatgaaggagcaggatgacttgggtccttcttggcagtagcattgccagctgatggccttggacagttacctgccctctctaggcctccctttccttgtctatgaaatacattatagaataggatgtagtgtgtgaggattttttggaggttaaacgagtgaatatatttaaggcgctttcaccagtgcctgggatgtgctctgtagtttctgtgtgttaactataaggttgactttatgctcattccctcctctcccacaaatgtcgccttggaaagacggaggcagcctggtggaggtgtatctcctagacaccagcatacagagtgaccaccgggaaatcgagggcagggtcatggtcaccgacttcgagaatgtgcccgaggaggacgggacccgcttccacagacaggtaagcacggccgtctgatgggagggctgcctctgcccatatccccatcctggaggtgggtggggactgccaccccagagcgttgcagctgtactcctgggttgcaccccccccagctgtcactgtcccctccctgccatcagttgtgggaagggcgttcatccatccagccacctgctgatttgttatagggtggagggggggtctttctcatgtggtccttgtgttcgtcgagcaggccagcaagtgtgacagtcatggcacccacctggcaggggtggtcagcggccgggatgccggcgtggccaagggtgccagcatgcgcagcctgcgcgtgctcaactgccaagggaagggcacggttagcggcaccctcataggtaagtgatggccccagacgctggtctctctccatctggacctggcctgggaggtggcttgggctgggcccagggagagctaatgtctcctaaccaagaatgctgtggcagcctctgccgcagagccagagaaccagagtgccaaggctggcagggttcccagtggccacgagtgcagatgaagaaacccaggccccaagagggtcatgcaggtagcccagggagttcagccttgaccctgggtcaatgacctttccacagttccacactgctccccttttaaaatccggtgatgtctttatgtcttttgttatgttatcttcaatgtggagggactcgaggtgatctaagcaaactttttctatcttctgcttgcatacctctgagaccaggggactcactcacttgcatgactgggccctgcaggtcacactggccaggcagatgtggtggaggaactggcagaggactttttctagactgtgactacatttagtccacccagcggcccccctatgaagtccagttgagaactaggactctgggggccggtggacagagaagagggagggttctctcccttactgacttccttctgtggccagacattgagcaaggcctctgtacagcatgtcctggggctggccttgccgtagctgctaaatagttgacgaaaccagtccagagaggggaggtgactgccagggtcgcacagctcaagctggggaactcgctgggaaaactgtcagctctgggcagcagcttgacttccactgtaagccccagcccccagggtcaaacactggctctggtgctggcagaggcagcccactagcctgtttcaaaggctgagaaggcccaggagtctgccctgtgctccaccagttctgccctgagactttcctacagagtacaggttttgatgttcagttttaaaggcaagaatcaataaccttctgccccatcaggtgaccccttgtgcctgtcccacccctttattgactgacctcggctcagtcaggtcagttcctgaaggtcagtgtgtggaggggaggctgttctttcccagaaaggccttccccaggcctggtgctctggcctctggaggacttcctggagaagtcccttctttggggtcccagtcagtgtatgggaagcccttattgcatgacctggcacggggcaggggctcaacagtcactattgccttccttgccactgccatttcctcctctgtaagcaggtgattgtgtgtccagtctgagcacagagataagcacacagcaggtgcttaataactagcagctgtaggctgggcgcggtggctcatgcctgtaatcccagcactttgggaggccgaggtgggcagatcacctgaggtcaggagttcgagaccagcctgttcaacatggtgaaaccccgtctctactaaaaatacaaaaattagccaggcatggtggtgggtgtctgtatcccagctacttgggaggctaaggcaggagaatcgcttgaacccaggaggtggaggttgcagtgagctgagatcgtgccactgcaatccagcctgagtgatagagcgagattccatctcaaaaataaataagtaaataactagcagctgtaaatgtggctgttgttcttcacctccacactcagtgccactccactccctccctccgtggtgtgaggggcctcactagctgtctcctaggaggagcatggctgtgagattccagctccatccttggccacggctcctggagacatcttagaggccaggatccagaaggctcccacacctcatttgacaggggagaagctgtcagttccaggtccccttgcacatcagggccagagctgcgttaggcctccagtctccaggccactgggccagagctcacaggctggcagagggttagaactgttactggtggctgggtgcagtggctcacgcctgtaatcttagcactttgggagggcaaggcgggaggatcatgaggtcaggacatcgagaccatccttgctaacacggtgaagccccgtctctactaaaactacaaaaaattagccgggcgtggtggcaggcgcctgtagtcccagctactcaggaggctgaggcaggagaatggcgtgaacccgggaggcggagcttgcagtgagccgagattgcgccactgcactccagcctgggcaatagagcgagactccgtctggaaagaaaaaaaaaaaaaagagctgttactgttgacagtagcatgaggtagaccatggcctgcaccaaaatgggggagtggagtgccactgaggccagaaggaaccacaccctcaagggtggggagttatggtatggggggtcctaggcatggagtcttttaattctttagacaatcctgggagcaactgtccctgtttcacagagggcggggccacacagctggtgagtgggcagccaagactctgttcaagtttgtgtgggtccaacacttgcggccacggtggaggggcatctgagccaggcctcagagagtggcgggggaagttgggtggggaagtgtgcccttctcattcctctgaggctcatcctcttggtgcctctctttcatggaaagggataataaggttattgtgaggatcccctgagttcgtatattcagacgcttagacagagccaggcacagagaagggcccggggttggctagtttgattgctggtgtaattgctaatatcttccagtttgtattggtcaaggttctgcagagaagcagaaccagtaggatgtatatattaagagtttcaagctcatgtgaccgtgcgggctggcaagtctgaaatccgcagggcaggccaggcaggctggcaattcctgcagaatttgatgttgcaatactgagtcctaaggcagtcctggggcagaattccttcttccctgggaggcctcagtctgttctcttaaggccttcaactgattaaatgaggcctgcccaagttatagagagtaacctgccttactccgtcttctgatttaaatgttagtcacatctaaaaaatattttcgcagcagcatttccactggcttttgaccaaacatcaggccacaaagttgatccccaaaattaaccatcactctgtgcctgtaagggaggggctgggaaaggggagcaggtctccccaaggggtgaccttggctttgttcctcccaggcctggagtttattcggaaaagccagctggtccagcctgtggggccactggtggtgctgctgcccctggcgggtgggtacagccgcgtcctcaacgccgcctgccagcgcctggcgagggctggggtcgtgctggtcaccgctgccggcaacttccgggacgatgcctgcctctactccccagcctcagctcccgaggtaggtgctggggctgctgccccaaggcgcgggtagggggcggagggcggagggcggagggagggcgggcgggcaggcgggcttcttgtggcacgtgggcttcttgtggcacgttcctggaggccgaacccttctggctttggaaggagtcgtcagagacccccgccatgcgggaggctggggaggaaggggctcgaaacctccatcatcgcagagtctgaatagcagtggccccgccatgcgcccacgtagcggcgcctacgtagccacgcccccacaccccgtcctggccactctccctcctgaaggtcttctggtacccgccccctccccatctccatccccaggccctgcgtcctctgcccaatactctttgggcctccctgttgtccagctctctccgcggctccatgactgacaacttgagcaaggctaatgtgaatgggagcggttgagggctcagacctctcacccgaggaacatccacagagtgtgccgcatgcccggtgcagtgtggctgcggggacacagacacggagcctcggccctgaggagctggggggcagtgaccgtccctcctctgacccaccactcctccagtgtcaggacactgcgggtatctaggggaaggaatcttgttccacttcaagtctggaacttcaagtctgtgtgtgtgcgtgcgcgcgcgcgcgttgggggtgggggttgcagagcagatgcgtacctgacagcggtaacctaggtcccccctggcctatcaaggcttccctggcggccgaatttaaaggcatcaagcaaacaaagcccaacacatctctgccttgtcctctcagtttccccccgtggcacttagaaccacttgatacaccgaatagtttcctatctcccccactaggatgtaaactccacaggggcattgggaatgctgcctggctatggtagggacagaggggagcaccagggcggggcaggggtgccagagttctgcctgggcagtcagattttccttaggaggggacatttgagtgggacccaaacaggtgtatagcagttgtccagcccagctggcaaggcctgagtctgcctctgcaacccctctcttgggctcctttctctgccacccacctcctcacctttccaggtcatcacagttggggccaccaatgcccaagaccagccggtgaccctggggactttggggaccaactttggccgctgtgtggacctctttgccccaggggaggacatcattggtgcctccagcgactgcagcacctgctttgtgtcacagagtgggacatcacaggctgctgcccacgtggctggtaagtcaccaccccactgcctcggccaccgtgatgctaacagcccctttggcagtcagggtctgtgccgggacctccagtgccaggctctgtgcagggggaccagagatgaagtaggcctgatggtgccttcaaggacactcagtctgatgagggaggcgagtgcacagaggaaacacgaggtcagggctgtattagagggagcccagaggaggcacctgcccagcccgagggtcagagaaggcatcttggaggagggacatttgatcgggagcttgatggatgaataggagttcacctggccgataagacagcaactaccaaggcttagaggtgtgagaggaggctgtcttacctcactgagtaaggactgcaggcggcttaccttcgagaagagagcttagtgtctgtgtgcacgtgtgtttgtgtgtatgtgtgtgcgtgtgtgcactggcaggagtcccctgctggggcaggagggccgggccatcaccatctttcaccattcacccctgcaccaggcattgcagccatgatgctgtctgccgagccggagctcaccctggccgagttgaggcagagactgatccacttctctgccaaagatgtcatcaatgaggcctggttccctgaggaccagcgggtactgacccccaacctggtggccgccctgccccccagcacccatggggcaggtaagcaggatggcagggtgggcaagtccaggctggggcttgggaggtctgtgtgaccttgacagtctctcccttctcccttgtctgtgtaaggaggatgacgccaccttaaataggattaaatgagaatggggctctgaaagggctgtgcaatattttcataacgtgtttttatagagacagttgagtatgttctttaagccctcctctctcctaccatgaactaaagatttctgtggaggtcccctcactcccagcaccccctcctcatcccaggccctttttgcaggttggcagctgttttgcaggactgtatggtcagcacactcggggcctacacggatggccacagccgtcgcccgctgcgccccagatgaggagctgctgagctgctccagtttctccaggagtgggaagcggcggggcgagcgcatggaggtgactgtacccctccttcgtgtgtgtgtgtgtgtgtgtgtgtgtgtgtgtgtgtgtgtgtgtgtgtgtgtcagtgctgggccctcagggacccccagcaagcccctccatcctccagactccagctcttctgtaagcttacagggctggccagaccaggagtggggcactcctcacttcacgcggctgggggctgctggagagagccacagcgggaagggtttcctagaggctgcaggacagtgctggatggattttcaatgctcacctgggtgtgagcgtgcggcagggccgcgtgagggtcagcgatctgctactctggactcagccatctctaggcccctctcactcaggtgctccatggttctgggagctgagaaatctcaaaccagcaaaaaagtggaattgatgttgatgctacaggatagtgcacagatgccatctggttgcagcattttggtggaagggcagtgcccagctaggagagtgaggaggggcaggcatttctggcttgaggagatggggtcttaatgctcgtgtgagaggcagagtgggtggagtggagctggctggatccttgctttggcctcctggatttctctctatctccattttgaaaccactctgtgtttggaagaacttttgagtattcagagctgcccactggcagaacagtcttccttgggcaggagtgagctccttgtccccagaaggctgggtctggctggcccctggcagggacactgatgagggtgcttgagttgatcctgtctagtccctttctgtgttttcaaagcccattctaaagcagattcccatttccgtctttgactctaaggcccaagggggcaagctggtctgccgggcccacaacgcttttgggggtgagggtgtctacgccattgccaggtgctgcctgctaccccaggccaactgcagcgtccacacagctccaccagctgaggccagcatggggacccgtgtccactgccaccaacagggccacgtcctcacaggtaggaggctgggcttgccctggggtgaggaggggtctctttctccttatgcacccactgcccgcgaggcttggtcctcacaagtgtgatccatgagactcaagcctgacttgcagttccatactctggttctgccacttccatgccctttgagcctgggcaggtgaccttacttctcctcatctcagcttcctcctccataagagggaaaaaggtattacctgcctcattgtgttgcaaggagatgggcagcatctagggcactggcctggagtatcgcaggtgctttgcctaaggtggtgcagtccaggagaggcagctccagagagaggcccccggctggggctgaaaggagggcagacctcggtttgaatttcaccctgccgctctatagctgtgtgacttgggcaaattacttaacatctctgtatgaggaaatgatgagtgctaagcacttagcttagtgccgggacaatataaattctagctatcgttactattgttttcatcacccgttgctttaaaatccagcctctggtataggcaactattgacgggctaccctgtgtcgaaaacatgcccaggcaggtagcaggaagtcacagatggggacctcttggggcatcaagggatggtgccctgaggctgagctgttctggttgggtggagcatgagaggtctgggaagacagtgggactccagcctggaataagaggctcagagttgattctcgtctgagcacgtccaggggaaccactgagggtttgggaacaggagagtgagggtgagaacctggttctgggcacagcaggctggcatgtaggatggatgttcaggaaagatgagcatagtcaggtggctggtgcccttgtccaggggagaggctccgtcaggttcaggggtcctggcttggagggaagtccgccatgctctaatcacgctcccctttggaagtgctcagccgatgagctcacaggcacatgtcagtttgaagtcatggaatctgactccatgaagcgcacctcaaagagcaccattttgcagctaagggaactgcaggctggacatgctgagtggctgccccgagcccttgcagctaggacatagagaatgctagtaaccacaaccctaccatgttcagagcacatgccaggctccatgctggggcttcgcacgtgtcatcttcacagtgtccctgtgagtaggtgtggtttctctttccatcttacaaatgagtaaacagagcctcagtgtagctaagtaaccactattttaggtttcttagccaatgggtgtgtctgactcctaagcccatggagggcattctgaggtggttcagacagaccccggcttacccttgaacttctgcctgctggctgcatagggaggggctggggggagtttgagcatctcaggccatagagcccctgcctcactgtctccatctctgggtggaaagatggtgttttccctgagaaactaaggctcagagaggttgaatggctctcccaaggtcacacagctggtcagctgcagagttgagaacacaggagtcctggtgctcaggccagcatctctttttttctttgagttgtttctaggtttcctagctcttgcctcagaccttaaagagagagggtctgatggggatgggcactggagacggagcatcccagcatttcacatctgagctggctttcctctgccccaggctgcagctcccactgggaggtggaggaccttggcacccacaagccgcctgtgctgaggccacgaggtcagcccaaccagtgcgtgggccacagggaggccagcatccacgcttcctgctgccatgccccaggtctggaatgcaaagtcaaggagcatggaatcccggcccctcaggagcaggtgaagaggcccgtgaggccgggtgggtggggtgctgcgtgtctctcctgcacagcttttctgtgtcagtttgtgccaccaccataccgccatgcatcagggtggcggtttgccaggtagatgctgtgggcagcttccgccattgtgtggacagcatgtatatgtgtctctgtgtggctgggtctgtttttgcttttgtccagatcagtaaggtttgctacctgggtaccccactccacttggagtagaatgtgcataaatatggcataaagaaatgcaatatgcatgcatttattgattgatctatttttttctgagatggggtcttgctgtgttgcccaggctggtctcaaattcctgggctcaagcaatcctctggtctcagcctccccaagtgttgggattataggcatgagccgctgcacctggcctctctgatctatttaacaaacctgctgggagggtctcagggtcaggagcagcactgggctctgaggacacagagctcactcagccgtgacccagagggggtgcctgagctgcatgctgaaggttgttagcatgaccagcaaggcaagaaaaggccctgccgagattagcaaggcatgtgccaagccctggaatgtgacagccgggccttctagaaacctgagtgtataactctccttaaaagccagtaggagctcctcaaaaggcagccctaaggagtccactcttaaatgaactcagagtcagttttaaaatgcaagtctgtgttgattctggtctggatggtgcattcctcgagagcaaaagacagtcttggtcttggatccacttgccctgggtacactgagggctgctaggttccaggtgctcttcctggcactggggagggatacaggcccaagagacatgctgttctccctcctggagcatctattttagtggaggaagacagaaaacaaaccattaatatagagtactgaaaagatgcgatggagaaaactatagcaaggaagggaatggggtgggagagaggtcaggagaggtctcgctgacaaggtggacgaaacaggccatgaggcagagaacatgttccaggcaaagcaaaggcccccaggtggggatgtgcagggagtaccaggaaaccagagaggtgggaatagttatgagatggggggtgcctcagaggggacagggccaagtcaggtgagacctgagggtcacagtcagcagtgagctggggccatgcaggggtctggcctcagaggagtgtggtctggcctggatctgaacctctcactgtggcctagctgctgagctgagaagagatgacaaggaccttgggcagaagcagggagactggagggaggcggtggagggtccaggcgttggggcggggctcaggctggagtctgaagggagcctgcaggcctggtgggtggatgtgggtgggagagggggaggatggcaccaaggctcgggcccctggacagatggagttgccattaagtgggatggggcaggctatggggccatcagtttcagagggatgagtttggcactggcatggtaggcatctgtctatctccacggccctcaaaccaggcatgaagcaggagctcacgtgtttggtcagccatggtgcagaaccgcctgggtgggaggtgcggggtgggagatacacggttgtgtcccaaatgggctctgagccagcgagggccgtctgcactttggcctcacagaaggatgtcggagggagaaatgaagtgtgggtgggggtcccgggccacgctagacatgtgctttcttttcctcgggctctggcaggtgaccgtggcctgcgaggagggctggaccctgactggctgcagtgccctccctgggacctcccacgtcctgggggcctacgccgtagacaacacgtgtgtagtcaggagccgggacgtcagcactacaggcagcaccagcgaaggggccgtgacagccgttgccatctgctgccggagccggcacctggcgcaggcctcccaggagctccagtgacagccccatcccaggatgggtgtctggggagggtcaagggctggggctgagctttaaaatggttccgacttgtccctctctcagccctccatggcctggcacgaggggatggggatgcttccgcctttccggggctgctggcctggcccttgagtggggcagcctccttgcctggaactcactcactctgggtgcctcctccccaggtggaggtgccaggaagctccctccctcactgtggggcatttcaccattcaaacaggtcgagctgtgctcgggtgctgccagctgctcccaatgtgccgatgtccgtgggcagaatgacttttattgagctcttgttccgtgccaggcattcaatcctcaggtctccaccaaggaggcaggattcttcccatggataggggagggggcggtaggggctgcagggacaaacatcgttggggggtgagtgtgaaaggtgctgatggccctcatctccagctaactgtggagaagcccctgggggctccctgattaatggaggcttagctttctggatggcatctagccagaggctggagacaggtgcgcccctggtggtcacaggctgtgccttggtttcctgagccacctttactctgctctatgccaggctgtgctagcaacacccaaaggtggcctgcggggagccatcacctaggactgactcggcagtgtgcagtggtgcatgcactgtctcagccaacccgctccactacccggcagggtacacattcgcacccctacttcacagaggaagaaacctggaaccagagggggcgtgcctgccaagctcacacagcaggaactgagccagaaacgcagattgggctggctctgaagccaagcctcttcttacttcacccggctgggctcctcatttttacgggtaacagtgaggctgggaaggggaacacagaccaggaagctcggtgagtgatggcagaacgatgcctgcaggcatggaactttttccgttatcacccaggcctgattcactggcctggcggagatgcttctaaggcatggtcgggggagagggccaacaactgtccctccttgagcaccagccccacccaagcaagcagacatttatcttttgggtctgtcctctctgttgcctttttacagccaacttttctagacctgttttgcttttgtaacttgaagatatttattctgggttttgtagcatttttattaatatggtgactttttaaaataaaaacaaacaaacgttgtcctaac

SEQ ID NO: 6 - protein, 692 aa, Homo sapiens
MGTVSSRRSWWPLPLLLLLLLLLGPAGARAQEDEDGDYEELVLALRSEEDGLAEAPEHGTTATFHRCAKDPWRLPGTYVVVLKEETHLSQSERTARRLQAQAARRGYLTKILHVFHGLLPGFLVKMSGDLLELALKLPHVDYIEEDSSVFAQSIPWNLERITPPRYRADEYQPPDGGSLVEVYLLDTSIQSDHREIEGRVMVTDFENVPEEDGTRFHRQASKCDSHGTHLAGVVSGRDAGVAKGASMRSLRVLNCQGKGTVSGTLIGLEFIRKSQLVQPVGPLVVLLPLAGGYSRVLNAACQRLARAGVVLVTAAGNFRDDACLYSPASAPEVITVGATNAQDQPVTLGTLGTNFGRCVDLFAPGEDIIGASSDCSTCFVSQSGTSQAAAHVAGIAAMMLSAEPELTLAELRQRLIHFSAKDVINEAWFPEDQRVLTPNLVAALPPSTHGAGWQLFCRTVWSAHSGPTRMATAVARCAPDEELLSCSSFSRSGKRRGERMEAQGGKLVCRAHNAFGGEGVYAIARCCLLPQANCSVHTAPPAEASMGTRVHCHQQGHVLTGCSSHWEVEDLGTHKPPVLRPRGQPNQCVGHREASIHASCCHAPGLECKVKEHGIPAPQEQVTVACEEGWTLTGCSALPGTSHVLGAYAVDNTCVVRSRDVSTTGSTSEGAVTAVAICCRSRHLAQASQELQ

SEQ ID NO: 7 - DNA, 14994 bp, Homo sapiens
  source 1..14994: mol_type = unassigned DNA
aatgacaaactgaaaaaatctattgtttgttatatatataacaaagaattagtatccacaatatgtaaataattcctaaaattagtcagaaagagacaaacttaaaaagagggtaacaaggaggggagcaaattatgtacataaccagatgattcgcaaagacggcaacagagatggccagcaaaacaaactagatatatacttgtctattagatttatcaacattttttgcctttttcattaaaagcatttgtaaaaggatataggaaaagaggaactctcatatactcctggcagggatgtaaattggtacaacccttttgaaggacaatctgacaaaagcaatcgtaagttacaagtcaacatctatgaatgtatatgaaaatatttatatacatacatcaccaccataaaagcattttctatacatactgtttataattagaaaattggaaacaaatgattaaaagggggctgattaaattaaggttcatctatataacaggattatgcagctattaaaaaggacgtggtaactctatagacattcataggaaaataaattttaaaatactaagatcctgaatgatatatatatcatgagctattatacataacaagatcccacttgtgttataaaaaattatgtttagtcattcaaagggtctggtatgatagacccaaaatgttaatagagtcgagatttttattttttataggtttttgaaatacctgaattttcacaataagtactttgcacattaaaaatcttagctgggcatggtggctcacgcttgtaatcccagcactctgggaggccaaggtaggcagatcacctgaggtcaggagttcgagaccagtctggccaacatggtgaaaccccgtctctactaaaaatacaaaaattagccaggcttggttgggggtgcctgtaattccagatactcgggaagctgagacaggagaatcgcttgaacccaggagggggaagttgcagtgagctgagatcacgacgctgcactccagcctgggcaacaaagagcaaaactccgtctcaaaaataaataaagaaaaaatctttacatgtccaaagatacggctgttcaactaaaaaatatatatgtataaaacttaacatgttaatagtgaacacacaaaacagtaagatagataaaattattccttcaaagctcacttaacctctggatctacactgtccaaaaagacggtctaatgagacaattgagcacttgataggtgagtggttctaactgagatatgttctcagtataaaacatacaataggatcttcctatacaacattaattaaaaaacaaactattgtagttaaaaaggaaaaaattagagatactatgtaaaaaagagccaaaataccttgtattttatttgaaagacatatctccataagattacacaacctcgtgtaggataaaggactttgctttgcttggaatttaaacaatttaggctcttaaatgtcctaaaattctctgtagctaagaaatttttatattggttcctaggaactaggaatccttaaattaggccctacatttgcttacaagtttattttccttggcataaaattttttagtttttacattactggttatatttgatcagggttctatttaaataggcacaagttcaagcaaagatcagattctgcttttagcagtgtgtactcagacaggaagtattaaaaggcaggcagaaaatcctttataaaattactactttcaatgcattttcccacgttgaaatgcttctgcagtttataattaggcaaattactttaattataatcaataatgctgttcaaattactataagaattatacagatatttataccaagagacaatatactagaaaccaagactacgtgaccattacctctactctgtcagtgttatttgtgagaaattgcacaaattttgcaaaaagtgttagtatcctactacagtaggatataatatagaaggaaataatttcataaagcctgtctttggtactagtgctcagttactttcattaactaaaaaaggggctactcttcaaattcccttctctaaaaagaatgtactatatcaaaagggggtaaacactactacgtatacattctgcacttagaaatccctatatgttgattttatcattctcttattcaataaatattgtttctacaatgtgtaaggcattactgtactaaagcattataaggaatataagttaaaaacacatacaaatcttgccaatcaacagcttatagtgtaataggggagagaagctggcccatctatattctccctcaactagcaagtggatgaaatatcagggtcaatagttataagccacaaaagctgacagcttaattaagagaagttttgaaatatgtatttcatgaccaataattacaactgtaacttttctatttaaagaaggagaaaatttgaatttcttctctagctcaacatacacttctataattccattacatgaaccagagtaaagggtaagatggaaatgaagaatattttcttacccttttgtggttctatattggacacttaaaaatcatacacaacctaatcaaaagatgtaattctttaaaaaggtacgagaccaaaattcagaaaatctagactataacaaaatttctcaatttacattatcttaatatgcaattaattttcaccagtaaaatactatagtatgggtacaaatgcattgattagttctaattacaaaaatggctaatatataatactgtgtagtgtttatgatacatcagataatgttctaagtgctctgaaaatataaacttttaatcttttatacgaccctataaaataggtgttattctcactggagagatgagaaaacaggggttcagagatgtgaagtaatttgaccaaaggtcacaaagctgaagaatatgaaatccgggattctgattcaggcagtcttattccagaatcatgctcttaaccactatggaatactgcctctactgtaactattatacccaaaacccttaatcctaagtcatcaaaaggaagagcctctattttacacaatgaagaggcatttctaagaatagaaatttagggacgagcacagtggcttactcctttaatatcagcactttgagaggctgatatgggaggttcacttgaagtcaggagttcaaggtcagcttgggcaacatagtgaaacacagtctctacaaaatatttaaaaattagctgggtgtggtggcatgcatctatagtctcagctacttgggagacagagggaggaggcttgctcgagcccaggagttcgtggctatagtgagctatgatcatgccactgcactccagcctggacaacagagcaagaccctgtctctaaaaaagaaaagaaatttggaaatggtttattttgtattaacaatttataatttacactgaaatttattatgataaaacttttccctgtgttaaaaagctattaactttatgaaaaatttcttttaggtaaggttgattatatatacccacacacatacacaggttaaaagttagtttcatgtgacataataactagcattttgagcactacctgtttgcccagcactgttctaagtgctctacatgtattattgttaaattatcataacactatgaattatgtactataattaccccagctttacagatgaggagactaatccatggggaggttaagtaacttgtccaaggccagacagctagagccggcttttggacccacaccacagtctgactccagcacccatattcttaacaatttcaccatattaatatgtcaagattaagcagttttaaaggatgctattttctcacaaatttcttaatatgaacactcaataagaataatcactaatataagcatttagtatttttttaacactaagttggaagcatagtggaacatttatttttagaaatattattaattggctgggctcacgcttgtaatcggctgggctcatgcctgtaaattttgggaggccaaggtaaaagaattgcttgagcccagtatttccagaccagcatgggcaatacattaagacatcatctttaaaaaaaaaatgttattaatctcctctttttgttaaatgtatattatcaaaattgttactaagctaacaaacttcagaaaaacttatgatgggcaagctgcttgtgacattgaaggtatttaagattcaattctagtttggtcctagatgaccacatatccattgttccttcaacgagcacatggtaaagagcctagaacacagagacacagaacacagtggagaaaagggagtgaaatgtctttaatgacacttactatatatgggattttgtgacaatatacaaggatggttaagacatataaggtgatgcaaaaaaacatattaacaattatagtgacaaaaaatgaggagcatataattatacattgatttatacagagtaccagaggaacacagcattgagagccgtaacaccacctgagggagtggagaaaggcttcagagagaaagtgttttttggaatggatcactgtttccaaaagaactaaagtacagtttgagaaatgcatacttaattcattacttttttcccctcaactttaataataaatttacccaacaaaaaagtttatttttgacttgtaaatctcttaaaatcataaaaaagtaaaattagcttttaaaaacaggtagtcaccatagcattgaatgtgtagtttataatacagcaaagttaaatacaatttcaaattacctattaagttagttgctcatttctttgatttcatttagcattgatctaactcaatgtggaagaaggttacattcgtgcaagttaacacggcttaatgattaactatgttcacctaccaaccttaccttttctgggcaaatattggtatatatagagttaagaagtctaggtctgcttccagaagaaaacagttccacgttgcttgaaattgaaaatcaagataaaaatgttcacaattaagctccttctttttattgttcctctagttatttcctccagaattgatcaagacaattcatcatttgattctctatctccagagccaaaatcaagatttgctatgttagacgatgtaaaaattttagccaatggcctccttcagttgggacatggtcttaaagactttgtccataagacgaagggccaaattaatgacatatttcaaaaactcaacatatttgatcagtctttttatgatctatcgctgcaaaccagtgaaatcaaagaagaagaaaaggaactgagaagaactacatataaactacaagtcaaaaatgaagaggtaaagaatatgtcacttgaactcaactcaaaacttgaaagcctcctagaagaaaaaattctacttcaacaaaaagtgaaatatttagaagagcaactaactaacttaattcaaaatcaacctgaaactccagaacacccagaagtaacttcacttaaagtaagtagaaaataaagagggttcatgtttatgttttcaatgtggatcttttaaaaaaaatatttctaaggcatgccatttgaaatactttgttgcattgttgaaatacttttttttccaagaaaaataatctccagaaaataaaatttcctattataatttcaagttagttttttgtttccctaatgttatatatgaaaacactgaaaatttgcattttatatgaaaattacaaatcggttaaattatacaatctagaacactatgtcattacactattgtaaattactgaaggtaagtaaaaagttaaaaaaaatttaaaactattctccagtgtttaaaacagattaaataatacagtaaatggaaaagatttattcatatgaaaatatgctgggctttttcttttaattgaagttcagaaaatcaaattttagagatagtacaatttaaataaaatgttaaggacaaaaatatgtgctatttgaaagaagcatacaaggggaaggaattgccaatattcatttttcaaatccattattagtttaaaaatttagattatgatagtgttacaggaaattaatagaaaagaaagaggaaagcaacttataaccaacctactctctatatccagacttttgtagaaaaacaagataatagcatcaaagaccttctccagaccgtggaagaccaatataaacaattaaaccaacagcatagtcaaataaaagaaatagaaaatcaggtaagtcagtattttaatggtatgtcccatctttcacacaggtctgtaaaaacactgaatcctaaaattatttacaagctttaactggatcatgagtaaaattatcacatcagcataactgttaaaattgcaggctctgaagctaataaactacctgcatttaaaccatggctctaaaactttgtgtgaccttgaataaattacttcacccctttatctctcagtttcctcacatatactacaaagataataacagaacttataggattattgtaagaaaaaaaattaattcatagcagccaatgtcatcttactaaaattcaaattagatcatgtttctctttgctcaaaaccacacaatagctttccatttcactcatattggctctttagaccaagattacccaacccttcgtcatctcactgacttcacctcctctactctagttattctgaccgctttaccagtattcaaacacatcaaacatactgccacctcaaagcctttgcccttgttgtttcctctaactggaacgctcttctgccctggtatctacgtggcccactctctgatttcccttagggtcgttatcaaacaaaaaattcccaatgaagacttacaaggtcacttaaccaaaaatcacaaccgcctggtcccatccctgaaaacttctacttccttagctacttttctcctgcacactcacctttatttaacataacataaattttagttatttatctcttctattcctgcactaaaatgtaagctctgtgaatacagggattttttccattatcttcatattttccattatttgtatatactccagaatatagaatactgtatggcacacagtaggcatttctgttgaattaataaatgtaatgtcatattcacacagaagcgtgtgctatgattattattacttggattactagaaatagtgtgcctcataattaaaggtcaacattcaacaatgtaattaatctacaatgtaaacatctggtgaagtgacagagggaagcacttgtttagaaaaaagctatgtcagaatccatgtattctaatatgcagtacaatagtttaaaaatattaataatactctcaaacagctattcaagaggattcaaaaaacataatataaactcagagaaactggtaaacaaaatcattttcaagagatataaaacaaatattattaccaatttccactaaacaaacataatgttagtagtgctgctaaaaggttttttatcaactacttttggtttccatactttccttcttatgatgttattattctaaattcttttcaattatatcttttactatgattaaatgaacctgctccccaaagcaaaatgttactatagtaatatacattgtgtctaaaaataaaaatgtgtgaagaaaccaaaacaatgaatttctgagttggaagaagagttagatcatttaactttctcatatttaaattaaaaaaacaaaactctaaaaatttaagtaactttaagatcacatagttacttagtagaaaagagtaatacccagcaagcaaactttacaatagatccttttaaataaggtcctaggaaatatcattcatgccagcatcaaaaaactaacactaataatgcaagatattatatattctgcttttcttactgtcaatgagaaaaactatcattcaataaattgcaaacccaacacacttaaataaaaataaaatgttactgctaaactaacgataaactactgaatatatagaaagtaagcaaacaaacttgccaacctgccaacatctacagatatgtttacaggtcaaaaattatcaaattatcaagaaagcctggttcaaattatgtattatgtctttatcacaggtctgaagatcagtaagacctaaaactgaaaattattaaacttaaaatctgaacagaatatcaaatatattttattcatataaataaaagaatacattacaatattctaagcaaagcagtctctacttttggccttgctctgttttccgaccaatgtctgcttttttgccttgctttatttttttatcttattaaataatgtccctgattaaatattttgagaacaggtaatctgtacaatctgaataacactgtttatctaaatatcaaacaccgttataacattatgaactgaaagacaaactgtacttctgacatccttactcagatttcccctaattgtatattcagtatcattttaaaaaacagatttatattcttttatcagctcagaaggactagtattcaagaacccacagaaatttctctatcttccaagccaagagcaccaagaactactccctttcttcagttgaatgaaataagaaatgtaaaacatgatggtaagacactttggtgggtttccttcttgaagctattattatcaaattccctattcttaggacttgttctagactaaaagatagttaagagatatccatcaaatacaatgtatcaacctaaactggatgctggggttctttttacaccctataaaagacatacctaagacaatcagagaaatacaaatatggacttgattattagataatatagaaggtttattaattttcttagatgtgatcatggtattgcagttttaaaggagaacaatctcctgtttaagagatacatgctgaaatatttacggagttaaaggtcactggactccagactggtgatagaacaagactctgtctctaaaaaataattaattttttaaaagaaaatagtttggtaagatgattcttacattcttaaataacacgccatctaagaaaaatgctttaacataaacattactgaaaaaatgctacatttgccacaacttcataaaatgtcaagtgaaatctcaagctccaaagatattattcctattactaaatctgatgtaataacattttattgattctaggcattcctgctgaatgtaccaccatttataacagaggtgaacatacaagtggcatgtatgccatcagacccagcaactctcaagtttttcatgtctactgtgatgttatatcaggtaaaacctgtctaaggagaatagacagtagttagttcaacttactcattacgtattaggaagattaacctggttatcattgttttatacatatatatatgaaatatatatgagtattcgtataaatataatacttttaccttgtttatgtatttactcaatattctccttttcctctaaaataatctgaagtgactattatcaataagtttactatgccaaaattcattaattgcctttcacttaacttttgggaccataataaataataaaatgtattgccataacattaataaactaccttacaaaaccaccaattaaaatcaaacaaacaaaaaagtgttatttacatctgtcaacataaatctactaaaaatacatgatttcattcattatattcaggtagtccatggacattaattcaacatcgaatagatggatcacaaaacttcaatgaaacgtgggagaactacaaatatggttttgggaggcttgatggtaaggggactacattcaatcattcattcacttgctaatctacaaatatttactgagaacctcttatggaccaggtattaggaaaagtagtaacgaacgagaagcagtctcagccttcatataatttattatcaaacaattacacatttgttagtaaattacacttattacaactgttattatttgaattatatttatcacaattacatgtctgttcttaaatatacttatcacaatttaattccacggcttacaatgatcataactataattattaaagacaattttgattaaatgttatgtcataagtagtaactgttacaaataagctgtgaaaagaaccactcctagcattagtcactctattctctcattaacgttttacatatcaattaattggaagttaaaaggaccaggaaactcagacatacagtatacattttaaaatttcaattatttaaatataatatatagaatgtatggcttataatgaattagttaactcaatgcaaattattctattttgattacaaatagtaaaataagcaagataaaataacagatgtttaaaatccaaaaagcacatacaaaaatccatgaatgatgtctaagtactcacttataaagtagaagacattcattattatatcaaatttttaaatgctcagtactatttgaccatttaaaaattttgtattcaaactaccagtgaaagccctacctagaaggtatactcagtgataagttttgtagctccaaatcttctaatagtgagtgtaaccccaaaataaaaggctgacaggtaagtcgagaatactcacttaattctggtaagaaagcaacccatttgtacttgtatttaccagcaatccttaaaatgaagcttcctactaactcaatagcaataagacaatagtgaatgtttaatgaaaacagtattttataaatactttaataaaaaggattgtgatgaagaacaatctatttatatttgttatttgtttttaattccaataaaaataatttttaaaattacagaaaaaagttattaagaaccatgcttttaaatttaaaatgattttttaaatttattcctgtctttttctacaaagaaagcatacattaagcaaataccaaaggccaggtttacatttgaagaaagtgacattattattactcaagtctctaggaatacttaacacatctcttgactgtatatggatgttaataaatagctgacagtaaagtttatccatataaagacttgcaaatattcctctaccaatgacgagactttaaaatatctataataatgtaacacatttcactggtgaaacatgtcttgtcatatgcattatagaaaggataatcagactttcagttatattaatatttttaacatttttgtgcacatagctatcttcaataaaattgttttaaaaggtattattttaagatacactaaaatgatcaagggattcaagactaaacaactcaattagttgcaccaataaaaaacacttaaaaaaactgtcagtgtccaacctgtacttaataactcacagatttttaaaacttttcttttcaggagaattttggttgggcctagagaagatatactccatagtgaagcaatctaattatgttttacgaattgagttggaagactggaaagacaacaaacattatattgaatattctttttacttgggaaatcacgaaaccaactatacgctacatctagttgcgattactggcaatgtccccaatgcaatcccggaaaacaaagatttggtgttttctacttgggatcacaaagcaaaaggacacttcaactgtccagagggttattcaggtatctttttctgataccaatactttattttcatatcttcaaagtatcttcccacattattagctattatctgcaatgacaacttttaaaaatccgaatcccaaataagcgttttctctctagacgaaaacctcttaactataatgaaagtgttcattctagttcaatcaggtattttacctctaatcttcctcagattttctattttttggtagtgtatagattatttatacagattatttaaaattgggacttatacagattatttaaaactgggatacatgcatctaaaacactgtaatatttataagaaaggaagataaacttacggggaaatacagtaacagtaactacatacgagtctgtacccattaaattgcatatctatctcctttaggaggctggtggtggcatgatgagtgtggagaaaacaacctaaatggtaaatataacaaaccaagagcaaaatctaagccagagaggagaagaggattatcttggaagtctcaaaatggaaggttatactctataaaatcaaccaaaatgttgatccatccaacagattcagaaagctttgaatgaactgaggcaaatttaaaaggcaataatttaaacattaacctcattccaagttaatgtggtctaataatctggtattaaatccttaagagaaagcttgagaaatagattttttttatcttaaagtcactgtctatttaagattaaacatacaatcacataaccttaaagaataccgtttacatttctcaatcaaaattcttataatactatttgttttaaattttgtgatgtgggaatcaattttagatggtcacaatctagattataatcaataggtgaacttattaaataacttttctaaataaaaaatttagagacttttattttaaaaggcatcatatgagctaatatcacaactttcccagtttaaaaaactagtactcttgttaaaactctaaacttgactaaatacagaggactggtaattgtacagttcttaaatgttgtagtattaatttcaaaactaaaaatcgtcagcacagagtatgtgtaaaaatctgtaatacaaatttttaaactgatgcttcattttgctacaaaataatttggagtaaatgtttgatatgatttatttatgaaacctaatgaagcagaattaaatactgtattaaaataagttcgctgtctttaaacaaatggagatgactactaagtcacattgactttaacatgaggtatcactataccttatttgttaaaatatatactgtatacattttatatattttaacacttaatactatgaaaacaaataattgtaaaggaatcttgtcagattacagtaagaatgaacatatttgtggcatcgagttaaagtttatatttcccctaaatatgctgtgattctaatacattcgtgtaggttttcaagtagaaataaacctcgtaacaagttactgaacgtttaaacagcctgacaagcatgtatatatgtttaaaattcaataaacaaagacccagtccctaaattatagaaatttaaattattcttgcatgtttatcgacatcacaacagatccctaaatccctaaatccctaaagattagatacaaattttttaccacagtatcacttgtcagaatttatttttaaatatgattttttaaaactgccagtaagaaattttaaattaaacccatttgttaaaggatatagtgcccaagttatatggtgacctacctttgtcaatacttagcattatgtatttcaaattatccaatatacatgtcatatatatttttatatgtcacatatataaaagatatgtatgatctatgtgaatcctaagtaaatattttgttccagaaaagtacaaaataataaaggtaaaaataatctataattttcaggaccacagactaagctgtcgaaattaacgctgatttttttagggccagaataccaaaatggctcctctcttcccccaaaattggacaatttcaaatgcaaaataattcattatttaatatatgagttgcttcctctatttggtttccttaaaaaaaaaaaaaactctcataggacatgtttcattttgttcctttcaggagtagtaaattagacgttttccccatataaagcttttttctaccagaaagatacttctggtagaagaagagaaaggagctctttatggttcacacgactgtctcctgtcctaactactttgcttaaagtgctcaaattccatcactactcacagttgtctaatctaagtctaatcccctttgatctctcagactaccttcccttttatctctctactacttaataataagaatatctttttttcaaacttgaccttcattttgctttcacaatactatactctccatggattatcccttatctgaatccatctttataaccctattcctttctcatatttagtactgtgggccaatggacaaccttcaatcatcttttctacactgaccctcagacattctatctgctctcacggactcctttatttaccatgaataaagttccaaaatctacatattcatcccaagtctctttccagttccccttcttacattgcctatttgccatttctcccttcaataccctatacttcactcaaattcaacataccaaaaataaaaggccaggcacggtggctcacacctgtaatcccaggactttgggaggctgaggcaggtggatcacctgaggtcaggagtctgaccagcctgaccaatatggtgaaaccccgtctctacctaaaatacaaaaattagccaggcgtggtggcatgtgcctacagtcccagctactcaagaggctgagacaggagaatcgcttgaacccaggaggcggaggttgcagtgagctgagatcacaccaatgcactgggtgacagaacaagactgactcaaaaaaaaataaataacaaattccccagccccttactgctactgctatccctttctacccacctttccctcctttatactctttcacaccatcttcctcacttctttatatccattaatatgaccagcatgttcccagtcacagaagcctggaacccggaagacatctctggcttttcactcaactttgtaaactacctcttttgtatcataagccaccaagttcaatacaatcttctcttgaaacgtctcttaatcttataagctttcttccccaaagactgtctttaacttcagtgctagattatataagt

SEQ ID NO: 8 - protein, 460 aa, Homo sapiens
MFTIKLLLFIVPLVISSRIDQDNSSFDSLSPEPKSRFAMLDDVKILANGLLQLGHGLKDFVHKTKGQINDIFQKLNIFDQSFYDLSLQTSEIKEEEKELRRTTYKLQVKNEEVKNMSLELNSKLESLLEEKILLQQKVKYLEEQLTNLIQNQPETPEHPEVTSLKTFVEKQDNSIKDLLQTVEDQYKQLNQQHSQIKEIENQLRRTSIQEPTEISLSSKPRAPRTTPFLQLNEIRNVKHDGIPAECTTIYNRGEHTSGMYAIRPSNSQVFHVYCDVISGSPWTLIQHRIDGSQNFNETWENYKYGFGRLDGEFWLGLEKIYSIVKQSNYVLRIELEDWKDNKHYIEYSFYLGNHETNYTLHLVAITGNVPNAIPENKDLVFSTWDHKAKGHFNCPEGYSGGWWWHDECGENNLNGKYNKPRAKSKPERRRGLSWKSQNGRLYSIKSTKMLIHPTDSESFE

SEQ ID NO: 9 - RNA, 100 nt, synthetic construct
  source 1..100: mol_type = other RNA; note = Description of Artificial Sequence: Synthetic polynucleotide
  modified_base 1: mod_base = OTHER; note = 2'-O-Methyl-cytidine phosphorothioate
  modified_base 2: mod_base = OTHER; note = 2'-O-Methyl-cytidine phosphorothioate
  modified_base 3: mod_base = OTHER; note = 2'-O-Methyl-cytidine phosphorothioate
  modified_base 21: mod_base = OTHER; note = 2'-O-Methyl-guanosine
  modified_base 28: mod_base = OTHER; note = 2'-O-Methyl-adenosine
  modified_base 29: mod_base = OTHER; note = 2'-O-Methyl-guanosine
  modified_base 30: mod_base = OTHER; note = 2'-O-Methyl-cytidine
  modified_base 31: mod_base = OTHER; note = 2'-O-Methyl-uridine
  modified_base 32: mod_base = OTHER; note = 2'-O-Methyl-adenosine
  modified_base 34: mod_base = OTHER; note = 2'-O-Methyl-adenosine
  modified_base 35: mod_base = OTHER; note = 2'-O-Methyl-adenosine
  modified_base 36: mod_base = OTHER; note = 2'-O-Methyl-adenosine
  modified_base 37: mod_base = OTHER; note = 2'-O-Methyl-uridine
  modified_base 38: mod_base = OTHER; note = 2'-O-Methyl-adenosine
  modified_base 39: mod_base = OTHER; note = 2'-O-Methyl-guanosine
  modified_base 40: mod_base = OTHER; note = 2'-O-Methyl-cytidine
  modified_base 41: mod_base = OTHER; note = 2'-O-Methyl-adenosine
  modified_base 42: mod_base = OTHER; note = 2'-O-Methyl-adenosine
  modified_base 46: mod_base = OTHER; note = 2'-O-Methyl-adenosine
  modified_base 48: mod_base = OTHER; note = 2'-O-Methyl-adenosine
  modified_base 50: mod_base = OTHER; note = 2'-O-Methyl-uridine
  modified_base 52: mod_base = OTHER; note = 2'-O-Methyl-adenosine
  modified_base 53: mod_base = OTHER; note = 2'-O-Methyl-guanosine
  modified_base 54: mod_base = OTHER; note = 2'-O-Methyl-guanosine
  modified_base 57: mod_base = OTHER; note = 2'-O-Methyl-adenosine
  modified_base 61: mod_base = OTHER; note = 2'-O-Methyl-cytidine
  modified_base 66: mod_base = OTHER; note = 2'-O-Methyl-uridine
  modified_base 67: mod_base = OTHER; note = 2'-O-Methyl-cytidine
  modified_base 70: mod_base = OTHER; note = 2'-O-Methyl-cytidine
  modified_base 71: mod_base = OTHER; note = 2'-O-Methyl-uridine
  modified_base 72: mod_base = OTHER; note = 2'-O-Methyl-uridine
  modified_base 74: mod_base = OTHER; note = 2'-O-Methyl-adenosine
  modified_base 75: mod_base = OTHER; note = 2'-O-Methyl-adenosine
  modified_base 76: mod_base = OTHER; note = 2'-O-Methyl-adenosine
  modified_base 77: mod_base = OTHER; note = 2'-O-Methyl-adenosine
  modified_base 78: mod_base = OTHER; note = 2'-O-Methyl-adenosine
  modified_base 79: mod_base = OTHER; note = 2'-O-Methyl-guanosine
  modified_base 80: mod_base = OTHER; note = 2'-O-Methyl-uridine
  modified_base 82: mod_base = OTHER; note = 2'-O-Methyl-guanosine
  modified_base 83: mod_base = OTHER; note = 2'-O-Methyl-cytidine
  modified_base 84: mod_base = OTHER; note = 2'-O-Methyl-adenosine
  modified_base 85: mod_base = OTHER; note = 2'-O-Methyl-cytidine
  modified_base 86: mod_base = OTHER; note = 2'-O-Methyl-cytidine
  modified_base 87: mod_base = OTHER; note = 2'-O-Methyl-guanosine
  modified_base 89: mod_base = OTHER; note = 2'-O-Methyl-guanosine
  modified_base 92: mod_base = OTHER; note = 2'-O-Methyl-guanosine
  modified_base 93: mod_base = OTHER; note = 2'-O-Methyl-guanosine
  modified_base 94: mod_base = OTHER; note = 2'-O-Methyl-uridine
  modified_base 95: mod_base = OTHER; note = 2'-O-Methyl-guanosine
  modified_base 96: mod_base = OTHER; note = 2'-O-Methyl-cytidine
  modified_base 97: mod_base = OTHER; note = 2'-O-Methyl-uridine phosphorothioate
  modified_base 98: mod_base = OTHER; note = 2'-O-Methyl-uridine phosphorothioate
  modified_base 99: mod_base = OTHER; note = 2'-O-Methyl-uridine phosphorothioate
  modified_base 100: mod_base = OTHER; note = 2'-O-Methyl-uridine
cccgcaccttggcgcagcgggttttagagctagaaatagcaagttaaaataaggctagtccgttatcaacttgaaaaagtggcaccgagtcggtgctttt

SEQ ID NO: 10 - RNA, 100 nt, synthetic construct
  source 1..100: mol_type = other RNA; note = Description of Artificial Sequence: Synthetic polynucleotide
  modified_base 1: mod_base = OTHER; note = 2'-O-Methyl-cytidine phosphorothioate
  modified_base 2: mod_base = OTHER; note = 2'-O-Methyl-cytidine phosphorothioate
  modified_base 3: mod_base = OTHER; note = 2'-O-Methyl-cytidine phosphorothioate
  modified_base 21: mod_base = OTHER; note = 2'-O-Methyl-guanosine
  modified_base 28: mod_base = OTHER; note = 2'-O-Methyl-adenosine
  modified_base 29: mod_base = OTHER; note = 2'-O-Methyl-guanosine
  modified_base 30: mod_base = OTHER; note = 2'-O-Methyl-cytidine
  modified_base 31: mod_base = OTHER; note = 2'-O-Methyl-uridine
  modified_base 32: mod_base = OTHER; note = 2'-O-Methyl-adenosine
  modified_base 33: mod_base = OTHER; note = 2'-O-Methyl-guanosine
  modified_base 34: mod_base = OTHER; note = 2'-O-Methyl-adenosine
  modified_base 35: mod_base = OTHER; note = 2'-O-Methyl-adenosine
  modified_base 36: mod_base = OTHER; note = 2'-O-Methyl-adenosine
  modified_base 37: mod_base = OTHER; note = 2'-O-Methyl-uridine
  modified_base 38: mod_base = OTHER; note = 2'-O-Methyl-adenosine
  modified_base 39: mod_base = OTHER; note = 2'-O-Methyl-guanosine
  modified_base 40: mod_base = OTHER; note = 2'-O-Methyl-cytidine
  modified_base 41: mod_base = OTHER; note = 2'-O-Methyl-adenosine
  modified_base 42: mod_base = OTHER; note = 2'-O-Methyl-adenosine
  modified_base 46: mod_base = OTHER; note = 2'-O-Methyl-adenosine
  modified_base 48: mod_base = OTHER; note = 2'-O-Methyl-adenosine
  modified_base 50: mod_base = OTHER; note = 2'-O-Methyl-uridine
  modified_base 52: mod_base = OTHER; note = 2'-O-Methyl-adenosine
  modified_base 53: mod_base = OTHER; note = 2'-O-Methyl-guanosine
  modified_base 54: mod_base = OTHER; note = 2'-O-Methyl-guanosine
  modified_base 55: mod_base = OTHER; note = 2'-O-Methyl-cytidine
  modified_base 56: mod_base = OTHER; note = 2'-O-Methyl-uridine
  modified_base 57: mod_base = OTHER; note = 2'-O-Methyl-adenosine
  modified_base 60: mod_base = OTHER; note = 2'-O-Methyl-cytidine
  modified_base 61: mod_base = OTHER; note = 2'-O-Methyl-cytidine
  modified_base 66: mod_base = OTHER; note = 2'-O-Methyl-adenosine
  modified_base 67: mod_base = OTHER; note = 2'-O-Methyl-cytidine
  modified_base 70: mod_base = OTHER; note = 2'-O-Methyl-cytidine
  modified_base 71: mod_base = OTHER; note = 2'-O-Methyl-uridine
  modified_base 72: mod_base = OTHER; note = 2'-O-Methyl-uridine
  modified_base 73: mod_base = OTHER; note = 2'-O-Methyl-guanosine
  modified_base 74: mod_base = OTHER; note = 2'-O-Methyl-adenosine
  modified_base 75: mod_base = OTHER; note = 2'-O-Methyl-adenosine
  modified_base 76: mod_base = OTHER; note = 2'-O-Methyl-adenosine
  modified_base 77: mod_base = OTHER; note = 2'-O-Methyl-adenosine
  modified_base 78: mod_base = OTHER; note = 2'-O-Methyl-adenosine
  modified_base 79: mod_base = OTHER; note = 2'-O-Methyl-guanosine
  modified_base 80: mod_base = OTHER; note = 2'-O-Methyl-uridine
  modified_base 81: mod_base = OTHER; note = 2'-O-Methyl-guanosine
  modified_base 83: mod_base = OTHER; note = 2'-O-Methyl-cytidine
  modified_base 84: mod_base = OTHER; note = 2'-O-Methyl-adenosine
  modified_base 85: mod_base = OTHER; note = 2'-O-Methyl-cytidine
  modified_base 86: mod_base = OTHER; note = 2'-O-Methyl-cytidine
  modified_base 87: mod_base = OTHER; note = 2'-O-Methyl-guanosine
  modified_base 88: mod_base = OTHER; note = 2'-O-Methyl-adenosine
  modified_base 89: mod_base = OTHER; note = 2'-O-Methyl-guanosine
  modified_base 90: mod_base = OTHER; note = 2'-O-Methyl-uridine
  modified_base 91: mod_base = OTHER; note = 2'-O-Methyl-cytidine
  modified_base 92: mod_base = OTHER; note = 2'-O-Methyl-guanosine
  modified_base 93: mod_base = OTHER; note = 2'-O-Methyl-guanosine
  modified_base 94: mod_base = OTHER; note = 2'-O-Methyl-uridine
  modified_base 95: mod_base = OTHER; note = 2'-O-Methyl-guanosine
  modified_base 96: mod_base = OTHER; note = 2'-O-Methyl-cytidine
  modified_base 97: mod_base = OTHER; note = 2'-O-Methyl-uridine phosphorothioate
  modified_base 98: mod_base = OTHER; note = 2'-O-Methyl-uridine phosphorothioate
  modified_base 99: mod_base = OTHER; note = 2'-O-Methyl-uridine phosphorothioate
  modified_base 100: mod_base = OTHER; note = 2'-O-Methyl-uridine
cccgcaccttggcgcagcgggttttagagctagaaatagcaagttaaaataaggctagtccgttaacaacttgaaaaagtggcaccgagtcggtgctttt

SEQ ID NO: 11 - RNA, 103 nt, synthetic construct
  source 1..103: mol_type = other RNA; note = Description of Artificial Sequence: Synthetic polynucleotide
  modified_base 1: mod_base = OTHER; note = 2'-O-Methyl-cytidine phosphorothioate
  modified_base 2: mod_base = OTHER; note = 2'-O-Methyl-cytidine phosphorothioate
  modified_base 3: mod_base = OTHER; note = 2'-O-Methyl-cytidine phosphorothioate
  modified_base 21: mod_base = OTHER; note = 2'-O-Methyl-guanosine
  modified_base 28: mod_base = OTHER; note = 2'-O-Methyl-adenosine
  modified_base 29: mod_base = OTHER; note = 2'-O-Methyl-guanosine
  modified_base 30: mod_base = OTHER; note = 2'-O-Methyl-cytidine
  modified_base 31: mod_base = OTHER; note = 2'-O-Methyl-uridine
  modified_base 32: mod_base = OTHER; note = 2'-O-Methyl-adenosine
  modified_base 33: mod_base = OTHER; note = 2'-O-Methyl-guanosine
  modified_base 34: mod_base = OTHER; note = 2'-O-Methyl-adenosine
  modified_base 35: mod_base = OTHER; note = 2'-O-Methyl-adenosine
  modified_base 36: mod_base = OTHER; note = 2'-O-Methyl-adenosine
  modified_base 37: mod_base = OTHER; note = 2'-O-Methyl-uridine
  modified_base 38: mod_base = OTHER; note = 2'-O-Methyl-adenosine
  modified_base 39: mod_base = OTHER; note = 2'-O-Methyl-guanosine
  modified_base 40: mod_base = OTHER; note = 2'-O-Methyl-cytidine
  modified_base 41: mod_base = OTHER; note = 2'-O-Methyl-adenosine
  modified_base 42: mod_base = OTHER; note = 2'-O-Methyl-adenosine
  modified_base 46: mod_base = OTHER; note = 2'-O-Methyl-adenosine
  modified_base 48: mod_base = OTHER; note = 2'-O-Methyl-adenosine
  modified_base 50: mod_base = OTHER; note = 2'-O-Methyl-uridine
  modified_base 52: mod_base = OTHER; note = 2'-O-Methyl-adenosine
  modified_base 53: mod_base = OTHER; note = 2'-O-Methyl-guanosine
  modified_base 54: mod_base = OTHER; note = 2'-O-Methyl-guanosine
  modified_base 55: mod_base = OTHER; note = 2'-O-Methyl-cytidine
  modified_base 56: mod_base = OTHER; note = 2'-O-Methyl-uridine
  modified_base 57: mod_base = OTHER; note = 2'-O-Methyl-adenosine
  modified_base 60: mod_base = OTHER; note = 2'-O-Methyl-cytidine
  modified_base 61: mod_base = OTHER; note = 2'-O-Methyl-cytidine
  modified_base 66: mod_base = OTHER; note = 2'-O-Methyl-uridine
  modified_base 67: mod_base = OTHER; note = 2'-O-Methyl-cytidine
  modified_base 70: mod_base = OTHER; note = 2'-O-Methyl-cytidine
  modified_base 71: mod_base = OTHER; note = 2'-O-Methyl-uridine
  modified_base 72: mod_base = OTHER; note = 2'-O-Methyl-uridine
  modified_base 73: mod_base = OTHER; note = 2'-O-Methyl-guanosine
  modified_base 74: mod_base = OTHER; note = 2'-O-Methyl-adenosine
  modified_base 75: mod_base = OTHER; note = 2'-O-Methyl-adenosine
  modified_base 76: mod_base = OTHER; note = 2'-O-Methyl-adenosine
  modified_base 77: mod_base = OTHER; note = 2'-O-Methyl-adenosine
  modified_base 78: mod_base = OTHER; note = 2'-O-Methyl-adenosine
  modified_base 79: mod_base = OTHER; note = 2'-O-Methyl-guanosine
  modified_base 80: mod_base = OTHER; note = 2'-O-Methyl-uridine
  modified_base 81: mod_base = OTHER; note = 2'-O-Methyl-guanosine
  modified_base 83: mod_base = OTHER; note = 2'-O-Methyl-cytidine
  modified_base 84: mod_base = OTHER; note = 2'-O-Methyl-adenosine
  modified_base 85: mod_base = OTHER; note = 2'-O-Methyl-cytidine
  modified_base 86: mod_base = OTHER; note = 2'-O-Methyl-cytidine
  modified_base 87: mod_base = OTHER; note = 2'-O-Methyl-guanosine
  modified_base 88: mod_base = OTHER; note = 2'-O-Methyl-adenosine
  modified_base 89: mod_base = OTHER; note = 2'-O-Methyl-guanosine
  modified_base 90: mod_base = OTHER; note = 2'-O-Methyl-uridine
  modified_base 91: mod_base = OTHER; note = 2'-O-Methyl-cytidine
  modified_base 92: mod_base = OTHER; note = 2'-O-Methyl-guanosine
  modified_base 93: mod_base = OTHER; note = 2'-O-Methyl-guanosine
  modified_base 94: mod_base = OTHER; note = 2'-O-Methyl-uridine
  modified_base 95: mod_base = OTHER; note = 2'-O-Methyl-guanosine
  modified_base 96: mod_base = OTHER; note = 2'-O-Methyl-cytidine
  modified_base 97: mod_base = OTHER; note = 2'-O-Methyl-uridine phosphorothioate
  modified_base 98: mod_base = OTHER; note = 2'-O-Methyl-uridine phosphorothioate
  modified_base 99: mod_base = OTHER; note = 2'-O-Methyl-uridine phosphorothioate
  modified_base 100: mod_base = OTHER; note = 2'-O-Methyl-uridine
  modified_base 101: mod_base = OTHER; note = 2'-O-Methyl-uridine
  modified_base 102: mod_base = OTHER; note = 2'-O-Methyl-uridine
  modified_base 103: mod_base = OTHER; note = 2'-O-Methyl-uridine
cccgcaccttggcgcagcgggttttagagctagaaatagcaagttaaaataaggctagtccgttatcaacttgaaaaagtggcaccgagtcggtgcttttttt

SEQ ID NO: 12 - RNA, 102 nt, synthetic construct
  source 1..102: mol_type = other RNA; note = Description of Artificial Sequence: Synthetic polynucleotide
  modified_base 1: mod_base = OTHER; note = 2'-O-Methyl-cytidine phosphorothioate
  modified_base 2: mod_base = OTHER; note = 2'-O-Methyl-cytidine phosphorothioate
  modified_base 3: mod_base = OTHER; note = 2'-O-Methyl-cytidine phosphorothioate
  modified_base 20: mod_base = OTHER; note = 2'-O-Methyl-guanosine
  modified_base 27: mod_base = OTHER; note = 2'-O-Methyl-adenosine
  modified_base 28: mod_base = OTHER; note = 2'-O-Methyl-guanosine
  modified_base 29: mod_base = OTHER; note = 2'-O-Methyl-cytidine
  modified_base 30: mod_base = OTHER; note = 2'-O-Methyl-uridine
  modified_base 31: mod_base = OTHER; note = 2'-O-Methyl-adenosine
  modified_base 33: mod_base = OTHER; note = 2'-O-Methyl-adenosine
  modified_base 34: mod_base = OTHER; note = 2'-O-Methyl-adenosine
  modified_base 35: mod_base = OTHER; note = 2'-O-Methyl-adenosine
  modified_base 36: mod_base = OTHER; note = 2'-O-Methyl-uridine
  modified_base 37: mod_base = OTHER; note = 2'-O-Methyl-adenosine
  modified_base 38: mod_base = OTHER; note = 2'-O-Methyl-guanosine
  modified_base 39: mod_base = OTHER; note = 2'-O-Methyl-cytidine
  modified_base 40: mod_base = OTHER; note = 2'-O-Methyl-adenosine
  modified_base 41: mod_base = OTHER; note = 2'-O-Methyl-adenosine
  modified_base 45: mod_base = OTHER; note = 2'-O-Methyl-adenosine
  modified_base 47: mod_base = OTHER; note = 2'-O-Methyl-adenosine
  modified_base 49: mod_base = OTHER; note = 2'-O-Methyl-uridine
  modified_base 51: mod_base = OTHER; note = 2'-O-Methyl-adenosine
  modified_base 52: mod_base = OTHER; note = 2'-O-Methyl-guanosine
  modified_base 53: mod_base = OTHER; note = 2'-O-Methyl-guanosine
  modified_base 54: mod_base = OTHER; note = 2'-O-Methyl-cytidine
  modified_base 55: mod_base = OTHER; note = 2'-O-Methyl-uridine
  modified_base 56: mod_base = OTHER; note = 2'-O-Methyl-adenosine
  modified_base 59: mod_base = OTHER; note = 2'-O-Methyl-cytidine
  modified_base 60: mod_base = OTHER; note = 2'-O-Methyl-cytidine
  modified_base 65: mod_base = OTHER; note = 2'-O-Methyl-uridine
  modified_base 66: mod_base = OTHER; note = 2'-O-Methyl-cytidine
  modified_base 69: mod_base = OTHER; note = 2'-O-Methyl-cytidine
  modified_base 70: mod_base = OTHER; note = 2'-O-Methyl-uridine
  modified_base 71: mod_base = OTHER; note = 2'-O-Methyl-uridine
  modified_base 73: mod_base = OTHER; note = 2'-O-Methyl-adenosine
  modified_base 74: mod_base = OTHER; note = 2'-O-Methyl-adenosine
  modified_base 75: mod_base = OTHER; note = 2'-O-Methyl-adenosine
  modified_base 76: mod_base = OTHER; note = 2'-O-Methyl-adenosine
  modified_base 77: mod_base = OTHER; note = 2'-O-Methyl-adenosine
  modified_base 78: mod_base = OTHER; note = 2'-O-Methyl-guanosine
  modified_base 79: mod_base = OTHER; note = 2'-O-Methyl-uridine
  modified_base 80: mod_base = OTHER; note = 2'-O-Methyl-guanosine
  modified_base 82: mod_base = OTHER; note = 2'-O-Methyl-cytidine
  modified_base 83: mod_base = OTHER; note = 2'-O-Methyl-adenosine
  modified_base 84: mod_base = OTHER; note = 2'-O-Methyl-cytidine
  modified_base 85: mod_base = OTHER; note = 2'-O-Methyl-cytidine
  modified_base 86: mod_base = OTHER; note = 2'-O-Methyl-guanosine
  modified_base 87: mod_base = OTHER; note = 2'-O-Methyl-adenosine
  modified_base 88: mod_base = OTHER; note = 2'-O-Methyl-guanosine
  modified_base 89: mod_base = OTHER; note = 2'-O-Methyl-uridine
  modified_base 90: mod_base = OTHER; note = 2'-O-Methyl-cytidine
  modified_base 91: mod_base = OTHER; note = 2'-O-Methyl-guanosine
  modified_base 92: mod_base = OTHER; note = 2'-O-Methyl-guanosine
  modified_base 93: mod_base = OTHER; note = 2'-O-Methyl-uridine
  modified_base 94: mod_base = OTHER; note = 2'-O-Methyl-guanosine
  modified_base 95: mod_base = OTHER; note = 2'-O-Methyl-cytidine
  modified_base 96: mod_base = OTHER; note = 2'-O-Methyl-uridine
  modified_base 97: mod_base = OTHER; note = 2'-O-Methyl-uridine phosphorothioate
  modified_base 98: mod_base = OTHER; note = 2'-O-Methyl-uridine phosphorothioate
  modified_base 99: mod_base = OTHER; note = 2'-O-Methyl-uridine
  modified_base 100: mod_base = OTHER; note = 2'-O-Methyl-uridine
  modified_base 101: mod_base = OTHER; note = 2'-O-Methyl-uridine
  modified_base 102: mod_base = OTHER; note = 2'-O-Methyl-uridine
cccgcaccttggcgcagcggttttagagctagaaatagcaagttaaaataaggctagtccgttatcaacttgaaaaagtggcaccgagtcggtgcttttttt

SEQ ID NO: 13 - DNA, 20 bp, synthetic construct
  source 1..20: mol_type = other DNA; note = Description of Artificial Sequence: Synthetic oligonucleotide
cccgcaccttggcgcagcgg

SEQ ID NO: 14 - DNA, 20 bp, synthetic construct
  source 1..20: mol_type = other DNA; note = Description of Artificial Sequence: Synthetic oligonucleotide
aagatacctgaataactctc

SEQ ID NO: 15 - DNA, 20 bp, synthetic construct
  source 1..20: mol_type = other DNA; note = Description of Artificial Sequence: Synthetic oligonucleotide
aagatacctgaataaccctc

SEQ ID NO: 16 - protein, 84 aa, unidentified
  source 1..84: note = Description of Unknown: Bacillus phage PBS2 sequence
MTNLSDIIEKETGKQLVIQESILMLPEEVEEVIGNKPESDILVHTAYDESTDENVMLLTSDAPEYKPWALVIQDSNGENKIKML

SEQ ID NO: 17 - protein, 16 aa, synthetic construct
  source 1..16: note = Description of Artificial Sequence: Synthetic peptide
SGSETPGTSESATPES

SEQ ID NO: 18 - protein, 4 aa, synthetic construct
  source 1..4: note = Description of Artificial Sequence: Synthetic peptide
SGGS

SEQ ID NO: 19 - protein, 24 aa, synthetic construct
  source 1..24: note = Description of Artificial Sequence: Synthetic peptide
SGGSSGSETPGTSESATPESSGGS

SEQ ID NO: 20 - protein, 32 aa, synthetic construct
  source 1..32: note = Description of Artificial Sequence: Synthetic polypeptide
SGGSSGGSSGSETPGTSESATPESSGGSSGGS

SEQ ID NO: 21 - protein, 104 aa, synthetic construct
  source 1..104: note = Description of Artificial Sequence: Synthetic polypeptide
GGSGGSPGSPAGSPTSTEEGTSESATPESGPGTSTEPSEGSAPGSPAGSPTSTEEGTSTEPSEGSAPGTSTEPSEGSAPGTSESATPESGPGSEPATSGGSGGS

SEQ ID NO: 22 - protein, 5 aa, synthetic construct
  source 1..5: note = Description of Artificial Sequence: Synthetic peptide
GGGGS

SEQ ID NO: 23 - protein, 24 aa, synthetic construct
  source 1..24: note = Description of Artificial Sequence: Synthetic peptide
SGGSSGGSSGSETPGTSESATPES

SEQ ID NO: 24 - protein, 40 aa, synthetic construct
  source 1..40: note = Description of Artificial Sequence: Synthetic polypeptide
SGGSSGGSSGSETPGTSESATPESSGGSSGGSSGGSSGGS

SEQ ID NO: 25 - protein, 64 aa, synthetic construct
  source 1..64: note = Description of Artificial Sequence: Synthetic polypeptide
SGGSSGGSSGSETPGTSESATPESSGGSSGGSSGGSSGGSSGSETPGTSESATPESSGGSSGGS

SEQ ID NO: 26 - protein, 92 aa, synthetic construct
  source 1..92: note = Description of Artificial Sequence: Synthetic polypeptide
PGSPAGSPTSTEEGTSESATPESGPGTSTEPSEGSAPGSPAGSPTSTEEGTSTEPSEGSAPGTSTEPSEGSAPGTSESATPESGPGSEPATS

SEQ ID NO: 27 - protein, 7 aa, Macaca mulatta polyomavirus 1
PKKKRKV

SEQ ID NO: 28 - protein, 30 aa, unidentified
  source 1..30: note = Description of Unknown: NLS sequence
MDSLLMNRRKFLYQFKNVRWAKGRRETYLC

SEQ ID NO: 29 - protein, 36 aa, unidentified
  source 1..36: note = Description of Unknown: Zn -coordinating motif sequence
  VARIANT 2: note = MOD_RES - Any amino acid
  VARIANT 4: note = MOD_RES - Any amino acid
  VARIANT 5: note = MOD_RES - Any amino acid
  VARIANT 6: note = MOD_RES - Any amino acid
  VARIANT 7: note = MOD_RES - Any amino acid
  VARIANT 8: note = MOD_RES - Any amino acid
  VARIANT 9: note = MOD_RES - Any amino acid
  VARIANT 10: note = MOD_RES - Any amino acid
  VARIANT 11: note = MOD_RES - Any amino acid
  VARIANT 12: note = MOD_RES - Any amino acid
  VARIANT 13: note = MOD_RES - Any amino acid
  VARIANT 14: note = MOD_RES - Any amino acid
  VARIANT 15: note = MOD_RES - Any amino acid
  VARIANT 16: note = MOD_RES - Any amino acid
  VARIANT 17: note = MOD_RES - Any amino acid
  VARIANT 18: note = MOD_RES - Any amino acid
  VARIANT 19: note = MOD_RES - Any amino acid
  VARIANT 20: note = MOD_RES - Any amino acid
  VARIANT 21: note = MOD_RES - Any amino acid
  VARIANT 22: note = MOD_RES - Any amino acid
  VARIANT 23: note = MOD_RES - Any amino acid
  VARIANT 24: note = MOD_RES - Any amino acid
  VARIANT 25: note = MOD_RES - Any amino acid
  VARIANT 26: note = MOD_RES - Any amino acid
  VARIANT 27: note = MOD_RES - Any amino acid
  VARIANT 28: note = MOD_RES - Any amino acid
  VARIANT 29: note = MOD_RES - Any amino acid
  VARIANT 32: note = MOD_RES - Any amino acid
  VARIANT 33: note = MOD_RES - Any amino acid
  VARIANT 34: note = MOD_RES - Any amino acid
  VARIANT 35: note = MOD_RES - Any amino acid
  VARIANT 4..29: note = SITE - This sequence may encompass 23-26 residues
  VARIANT 32..35: note = SITE - This sequence may encompass 2-4 residues
HXEXXXXXXXXXXXXXXXXXXXXXXXXXXPCXXXXC

SEQ ID NO: 30 - protein, 160 aa, Staphylococcus aureus
MGSHMTNDIYFMTLAIEEAKKAAQLGEVPIGAIITKDDEVIARAHNLRETLQQPTAHAEHIAIERAAKVLGSWRLEGCTLYVTLEPCVMCAGTIVMSRIPRVVYGADDPKGGCSGSLMNLLQQSNFNHRAIVDKGVLKEACSTLLTTFFKNLRANKKSTN

SEQ ID NO: 31 - protein, 161 aa, Bacillus subtilis
MTQDELYMKEAIKEAKKAEEKGEVPIGAVLVINGEIIARAHNLRETEQRSIAHAEMLVIDEACKALGTWRLEGATLYVTLEPCPMCAGAVVLSRVEKVVFGAFDPKGGCSGTLMNLLQEERFNHQAEVVSGVLEEECGGMLSAFFRELRKKKKAARKNLSE

SEQ ID NO: 32 - protein, 183 aa, Salmonella typhimurium
MPPAFITGVTSLSDVELDHEYWMRHALTLAKRAWDEREVPVGAVLVHNHRVIGEGWNRPIGRHDPTAHAEIMALRQGGLVLQNYRLLDTTLYVTLEPCVMCAGAMVHSRIGRVVFGARDAKTGAAGSLIDVLHHPGMNHRVEIIEGVLRDECATLLSDFFRMRRQEIKALKKADRAEGAGPAV

SEQ ID NO: 33 - protein, 164 aa, Shewanella putrefaciens
MDEYWMQVAMQMAEKAEAAGEVPVGAVLVKDGQQIATGYNLSISQHDPTAHAEILCLRSAGKKLENYRLLDATLYITLEPCAMCAGAMVHSRIARVVYGARDEKTGAAGTVVNLLQHPAFNHQVEVTSGVLAEACSAQLSRFFKRRRDEKKALKLAQRAQQGIE

SEQ ID NO: 34 - protein, 173 aa, Haemophilus influenzae
MDAAKVRSEFDEKMMRYALELADKAEALGEIPVGAVLVDDARNIIGEGWNLSIVQSDPTAHAEIIALRNGAKNIQNYRLLNSTLYVTLEPCTMCAGAILHSRIKRLVFGASDYKTGAIGSRFHFFDDYKMNHTLEITSGVLAEECSQKLSTFFQKRREEKKIEKALLKSLSDK

SEQ ID NO: 35 - protein, 161 aa, Caulobacter crescentus
MRTDESEDQDHRMMRLALDAARAAAEAGETPVGAVILDPSTGEVIATAGNGPIAAHDPTAHAEIAAMRAAAAKLGNYRLTDLTLVVTLEPCAMCAGAISHARIGRVVFGADDPKGGAVVHGPKFFAQPTCHWRPEVTGGVLADESADLLRGFFRARRKAKI

SEQ ID NO: 36 - protein, 179 aa, Geobacter sulfurreducens
MSSLKKTPIRDDAYWMGKAIREAAKAAARDEVPIGAVIVRDGAVIGRGHNLREGSNDPSAHAEMIAIRQAARRSANWRLTGATLYVTLEPCLMCMGAIILARLERVVFGCYDPKGGAAGSLYDLSADPRLNHQVRLSPGVCQEECGTMLSDFFRDLRRRKKAKATPALFIDERKVPPEP

SEQ ID NO: 37 - DNA, 4107 bp, Streptococcus pyogenes
  source 1..4107: mol_type = unassigned DNA
atggataagaaatactcaataggcttagatatcggcacaaatagcgtcggatgggcggtgatcactgatgaatataaggttccgtctaaaaagttcaaggttctgggaaatacagaccgccacagtatcaaaaaaaatcttataggggctcttttatttgacagtggagagacagcggaagcgactcgtctcaaacggacagctcgtagaaggtatacacgtcggaagaatcgtatttgttatctacaggagattttttcaaatgagatggcgaaagtagatgatagtttctttcatcgacttgaagagtcttttttggtggaagaagacaagaagcatgaacgtcatcctatttttggaaatatagtagatgaagttgcttatcatgagaaatatccaactatctatcatctgcgaaaaaaattggtagattctactgataaagcggatttgcgcttaatctatttggccttagcgcatatgattaagtttcgtggtcattttttgattgagggagatttaaatcctgataatagtgatgtggacaaactatttatccagttggtacaaacctacaatcaattatttgaagaaaaccctattaacgcaagtggagtagatgctaaagcgattctttctgcacgattgagtaaatcaagacgattagaaaatctcattgctcagctccccggtgagaagaaaaatggcttatttgggaatctcattgctttgtcattgggtttgacccctaattttaaatcaaattttgatttggcagaagatgctaaattacagctttcaaaagatacttacgatgatgatttagataatttattggcgcaaattggagatcaatatgctgatttgtttttggcagctaagaatttatcagatgctattttactttcagatatcctaagagtaaatactgaaataactaaggctcccctatcagcttcaatgattaaacgctacgatgaacatcatcaagacttgactcttttaaaagctttagttcgacaacaacttccagaaaagtataaagaaatcttttttgatcaatcaaaaaacggatatgcaggttatattgatgggggagctagccaagaagaattttataaatttatcaaaccaattttagaaaaaatggatggtactgaggaattattggtgaaactaaatcgtgaagatttgctgcgcaagcaacggacctttgacaacggctctattccccatcaaattcacttgggtgagctgcatgctattttgagaagacaagaagacttttatccatttttaaaagacaatcgtgagaagattgaaaaaatcttgacttttcgaattccttattatgttggtccattggcgcgtggcaatagtcgttttgcatggatgactcggaagtctgaagaaacaattaccccatggaattttgaagaagttgtcgataaaggtgcttcagctcaatcatttattgaacgcatgacaaactttgataaaaatcttccaaatgaaaaagtactaccaaaacatagtttgctttatgagtattttacggtttataacgaattgacaaaggtcaaatatgttactgaaggaatgcgaaaaccagcatttctttcaggtgaacagaagaaagccattgttgatttactcttcaaaacaaatcgaaaagtaaccgttaagcaattaaaagaagattatttcaaaaaaatagaatgttttgatagtgttgaaatttcaggagttgaagatagatttaatgcttcattaggtacctaccatgatttgctaaaaattattaaagataaagattttttggataatgaagaaaatgaagatatcttagaggatattgttttaacattgaccttatttgaagatagggagatgattgaggaaagacttaaaacatatgctcacctctttgatgataaggtgatgaaacagcttaaacgtcgccgttatactggttggggacgtttgtctcgaaaattgattaatggtattagggataagcaatctggcaaaacaatattagattttttgaaatcagatggttttgccaatcgcaattttatgcagctgatccatgatgatagtttgacatttaaagaagacattcaaaaagcacaagtgtctggacaaggcgatagtttacatgaacatattgcaaatttagctggtagccctgctattaaaaaaggtattttacagactgtaaaagttgttgatgaattggtcaaagtaatggggcggcataagccagaaaatatcgttattgaaatggcacgtgaaaatcagacaactcaaaagggccagaaaaattcgcgagagcgtatgaaacgaatcgaagaaggtatcaaagaattaggaagtcagattcttaaagagcatcctgttgaaaatactcaattgcaaaatgaaaagctctatctctattatctccaaaatggaagagacatgtatgtggaccaagaattagatattaatcgtttaagtgattatgatgtcgatcacattgttccacaaagtttccttaaagacgattcaatagacaataaggtcttaacgcgttctgataaaaatcgtggtaaatcggataacgttccaagtgaagaagtagtcaaaaagatgaaaaactattggagacaacttctaaacgccaagttaatcactcaacgtaagtttgataatttaacgaaagctgaacgtggaggtttgagtgaacttgataaagctggttttatcaaacgccaattggttgaaactcgccaaatcactaagcatgtggcacaaattttggatagtcgcatgaatactaaatacgatgaaaatgataaacttattcgagaggttaaagtgattaccttaaaatctaaattagtttctgacttccgaaaagatttccaattctataaagtacgtgagattaacaattaccatcatgcccatgatgcgtatctaaatgccgtcgttggaactgctttgattaagaaatatccaaaacttgaatcggagtttgtctatggtgattataaagtttatgatgttcgtaaaatgattgctaagtctgagcaagaaataggcaaagcaaccgcaaaatatttcttttactctaatatcatgaacttcttcaaaacagaaattacacttgcaaatggagagattcgcaaacgccctctaatcgaaactaatggggaaactggagaaattgtctgggataaagggcgagattttgccacagtgcgcaaagtattgtccatgccccaagtcaatattgtcaagaaaacagaagtacagacaggcggattctccaaggagtcaattttaccaaaaagaaattcggacaagcttattgctcgtaaaaaagactgggatccaaaaaaatatggtggttttgatagtccaacggtagcttattcagtcctagtggttgctaaggtggaaaaagggaaatcgaagaagttaaaatccgttaaagagttactagggatcacaattatggaaagaagttcctttgaaaaaaatccgattgactttttagaagctaaaggatataaggaagttaaaaaagacttaatcattaaactacctaaatatagtctttttgagttagaaaacggtcgtaaacggatgctggctagtgccggagaattacaaaaaggaaatgagctggctctgccaagcaaatatgtgaattttttatatttagctagtcattatgaaaagttgaagggtagtccagaagataacgaacaaaaacaattgtttgtggagcagcataagcattatttagatgagattattgagcaaatcagtgaattttctaagcgtgttattttagcagatgccaatttagataaagttcttagtgcatataacaaacatagagacaaaccaatacgtgaacaagcagaaaatattattcatttatttacgttgacgaatcttggagctcccgctgcttttaaatattttgatacaacaattgatcgtaaacgatatacgtctacaaaagaagttttagatgccactcttatccatcaatccatcactggtctttatgaaacacgcattgatttgagtcagctaggaggtgactga

SEQ ID NO: 38 - protein, 1368 aa, Streptococcus pyogenes [sequence omitted]

SEQ ID NO: 39 - protein, 1368 aa, synthetic construct
  source 1..1368: note = Description of Artificial Sequence: Synthetic polypeptide
MDKKYSIGLAIGTNSVGWAVITDEYKVPSKKFKVLGNTDRHSIKKNLIGALLFDSGETAEATRLKRTARRRYTRRKNRICYLQEIFSNEMAKVDDSFFHRLEESFLVEEDKKHERHPIFGNIVDEVAYHEKYPTIYHLRKKLVDSTDKADLRLIYLALAHMIKFRGHFLIEGDLNPDNSDVDKLFIQLVQTYNQLFEENPINASGVDAKAILSARLSKSRRLENLIAQLPGEKKNGLFGNLIALSLGLTPNFKSNFDLAEDAKLQLSKDTYDDDLDNLLAQIGDQYADLFLAAKNLSDAILLSDILRVNTEITKAPLSASMIKRYDEHHQDLTLLKALVRQQLPEKYKEIFFDQSKNGYAGYIDGGASQEEFYKFIKPILEKMDGTEELLVKLNREDLLRKQRTFDNGSIPHQIHLGELHAILRRQEDFYPFLKDNREKIEKILTFRIPYYVGPLARGNSRFAWMTRKSEETITPWNFEEVVDKGASAQSFIERMTNFDKNLPNEKVLPKHSLLYEYFTVYNELTKVKYVTEGMRKPAFLSGEQKKAIVDLLFKTNRKVTVKQLKEDYFKKIECFDSVEISGVEDRFNASLGTYHDLLKIIKDKDFLDNEENEDILEDIVLTLTLFEDREMIEERLKTYAHLFDDKVMKQLKRRRYTGWGRLSRKLINGIRDKQSGKTILDFLKSDGFANRNFMQLIHDDSLTFKEDIQKAQVSGQGDSLHEHIANLAGSPAIKKGILQTVKVVDELVKVMGRHKPENIVIEMARENQTTQKGQKNSRERMKRIEEGIKELGSQILKEHPVENTQLQNEKLYLYYLQNGRDMYVDQELDINRLSDYDVDAIVPQSFLKDDSIDNKVLTRSDKNRGKSDNVPSEEVVKKMKNYWRQLLNAKLITQRKFDNLTKAERGGLSELDKAGFIKRQLVETRQITKHVAQILDSRMNTKYDENDKLIREVKVITLKSKLVSDFRKDFQFYKVREINNYHHAHDAYLNAVVGTALIKKYPKLESEFVYGDYKVYDVRKMIAKSEQEIGKATAKYFFYSNIMNFFKTEITLANGEIRKRPLIETNGETGEIVWDKGRDFATVRKVLSMPQVNIVKKTEVQTGGFSKESILPKRNSDKLIARKKDWDPKKYGGFDSPTVAYSVLVVAKVEKGKSKKLKSVKELLGITIMERSSFEKNPIDFLEAKGYKEVKKDLIIKLPKYSLFELENGRKRMLASAGELQKGNELALPSKYVNFLYLASHYEKLKGSPEDNEQKQLFVEQHKHYLDEIIEQISEFSKRVILADANLDKVLSAYNKHRDKPIREQAENIIHLFTLTNLGAPAAFKYFDTTIDRKRYTSTKEVLDATLIHQSITGLYETRIDLSQLGGD

SEQ ID NO: 40 - protein, 1367 aa, synthetic construct
  source 1..1367: note = Description of Artificial Sequence: Synthetic polypeptide
DKKYSIGLAIGTNSVGWAVITDEYKVPSKKFKVLGNTDRHSIKKNLIGALLFDSGETAEATRLKRTARRRYTRRKNRICYLQEIFSNEMAKVDDSFFHRLEESFLVEEDKKHERHPIFGNIVDEVAYHEKYPTIYHLRKKLVDSTDKADLRLIYLALAHMIKFRGHFLIEGDLNPDNSDVDKLFIQLVQTYNQLFEENPINASGVDAKAILSARLSKSRRLENLIAQLPGEKKNGLFGNLIALSLGLTPNFKSNFDLAEDAKLQLSKDTYDDDLDNLLAQIGDQYADLFLAAKNLSDAILLSDILRVNTEITKAPLSASMIKRYDEHHQDLTLLKALVRQQLPEKYKEIFFDQSKNGYAGYIDGGASQEEFYKFIKPILEKMDGTEELLVKLNREDLLRKQRTFDNGSIPHQIHLGELHAILRRQEDFYPFLKDNREKIEKILTFRIPYYVGPLARGNSRFAWMTRKSEETITPWNFEEVVDKGASAQSFIERMTNFDKNLPNEKVLPKHSLLYEYFTVYNELTKVKYVTEGMRKPAFLSGEQKKAIVDLLFKTNRKVTVKQLKEDYFKKIECFDSVEISGVEDRFNASLGTYHDLLKIIKDKDFLDNEENEDILEDIVLTLTLFEDREMIEERLKTYAHLFDDKVMKQLKRRRYTGWGRLSRKLINGIRDKQSGKTILDFLKSDGFANRNFMQLIHDDSLTFKEDIQKAQVSGQGDSLHEHIANLAGSPAIKKGILQTVKVVDELVKVMGRHKPENIVIEMARENQTTQKGQKNSRERMKRIEEGIKELGSQILKEHPVENTQLQNEKLYLYYLQNGRDMYVDQELDINRLSDYDVDHIVPQSFLKDDSIDNKVLTRSDKNRGKSDNVPSEEVVKKMKNYWRQLLNAKLITQRKFDNLTKAERGGLSELDKAGFIKRQLVETRQITKHVAQILDSRMNTKYDENDKLIREVKVITLKSKLVSDFRKDFQFYKVREINNYHHAHDAYLNAVVGTALIKKYPKLESEFVYGDYKVYDVRKMIAKSEQEIGKATAKYFFYSNIMNFFKTEITLANGEIRKRPLIETNGETGEIVWDKGRDFATVRKVLSMPQVNIVKKTEVQTGGFSKESILPKRNSDKLIARKKDWDPKKYGGFDSPTVAYSVLVVAKVEKGKSKKLKSVKELLGITIMERSSFEKNPIDFLEAKGYKEVKKDLIIKLPKYSLFELENGRKRMLASAGELQKGNELALPSKYVNFLYLASHYEKLKGSPEDNEQKQLFVEQHKHYLDEIIEQISEFSKRVILADANLDKVLSAYNKHRDKPIREQAENIIHLFTLTNLGAPAAFKYFDTTIDRKRYTSTKEVLDATLIHQSITGLYETRIDLSQLGGD

SEQ ID NO: 41 - protein, 120 aa, synthetic construct
  source 1..120: note = Description of Artificial Sequence: Synthetic polypeptide
  VARIANT 1..120: note = SITE - This sequence may encompass 1-30 SGGS repeating units
SGGSSGGSSGGSSGGSSGGSSGGSSGGSSGGSSGGSSGGSSGGSSGGSSGGSSGGSSGGSSGGSSGGSSGGSSGGSSGGSSGGSSGGSSGGSSGGSSGGSSGGSSGGSSGGSSGGSSGGS

SEQ ID NO: 42 - protein, 120 aa, synthetic construct
  source 1..120: note = Description of Artificial Sequence: Synthetic polypeptide
  VARIANT 1..120: note = SITE - This sequence may encompass 1-30 GGGS repeating units
GGGSGGGSGGGSGGGSGGGSGGGSGGGSGGGSGGGSGGGSGGGSGGGSGGGSGGGSGGGSGGGSGGGSGGGSGGGSGGGSGGGSGGGSGGGSGGGSGGGSGGGSGGGSGGGSGGGSGGGS

SEQ ID NO: 43 - protein, 150 aa, synthetic construct
  source 1..150: note = Description of Artificial Sequence: Synthetic polypeptide
  VARIANT 1..150: note = SITE - This sequence may encompass 1-30 GGGGS repeating units
GGGGSGGGGSGGGGSGGGGSGGGGSGGGGSGGGGSGGGGSGGGGSGGGGSGGGGSGGGGSGGGGSGGGGSGGGGSGGGGSGGGGSGGGGSGGGGSGGGGSGGGGSGGGGSGGGGSGGGGSGGGGSGGGGSGGGGSGGGGSGGGGSGGGGS

SEQ ID NO: 44 - protein, 30 aa, synthetic construct
  source 1..30: note = Description of Artificial Sequence: Synthetic polypeptide
  VARIANT 1..30: note = SITE - This sequence may encompass 1-30 residues
GGGGGGGGGGGGGGGGGGGGGGGGGGGGGG

SEQ ID NO: 45 - protein, 150 aa, synthetic construct
  source 1..150: note = Description of Artificial Sequence: Synthetic polypeptide
  VARIANT 1..150: note = SITE - This sequence may encompass 1-30 EAAAK repeating units
EAAAKEAAAKEAAAKEAAAKEAAAKEAAAKEAAAKEAAAKEAAAKEAAAKEAAAKEAAAKEAAAKEAAAKEAAAKEAAAKEAAAKEAAAKEAAAKEAAAKEAAAKEAAAKEAAAKEAAAKEAAAKEAAAKEAAAKEAAAKEAAAKEAAAK

SEQ ID NO: 46 - protein, 90 aa, synthetic construct
  source 1..90: note = Description of Artificial Sequence: Synthetic polypeptide
  VARIANT 1..90: note = SITE - This sequence may encompass 1-30 GGS repeating units
GGSGGSGGSGGSGGSGGSGGSGGSGGSGGSGGSGGSGGSGGSGGSGGSGGSGGSGGSGGSGGSGGSGGSGGSGGSGGSGGSGGSGGSGGS

SEQ ID NO: 47 - protein, 60 aa, synthetic construct
  source 1..60: note = Description of Artificial Sequence: Synthetic polypeptide
  VARIANT 1: note = MOD_RES - Any amino acid
  VARIANT 3: note = MOD_RES - Any amino acid
  VARIANT 5: note = MOD_RES - Any amino acid
  VARIANT 7: note = MOD_RES - Any amino acid
  VARIANT 9: note = MOD_RES - Any amino acid
  VARIANT 11: note = MOD_RES - Any amino acid
  VARIANT 13: note = MOD_RES - Any amino acid
  VARIANT 15: note = MOD_RES - Any amino acid
  VARIANT 17: note = MOD_RES - Any amino acid
  VARIANT 19: note = MOD_RES - Any amino acid
  VARIANT 21: note = MOD_RES - Any amino acid
  VARIANT 23: note = MOD_RES - Any amino acid
  VARIANT 25: note = MOD_RES - Any amino acid
  VARIANT 27: note = MOD_RES - Any amino acid
  VARIANT 29: note = MOD_RES - Any amino acid
  VARIANT 31: note = MOD_RES - Any amino acid
  VARIANT 33: note = MOD_RES - Any amino acid
  VARIANT 35: note = MOD_RES - Any amino acid
  VARIANT 37: note = MOD_RES - Any amino acid
  VARIANT 39: note = MOD_RES - Any amino acid
  VARIANT 41: note = MOD_RES - Any amino acid
  VARIANT 43: note = MOD_RES - Any amino acid
  VARIANT 45: note = MOD_RES - Any amino acid
  VARIANT 47: note = MOD_RES - Any amino acid
  VARIANT 49: note = MOD_RES - Any amino acid
  VARIANT 51: note = MOD_RES - Any amino acid
  VARIANT 53: note = MOD_RES - Any amino acid
  VARIANT 55: note = MOD_RES - Any amino acid
  VARIANT 57: note = MOD_RES - Any amino acid
  VARIANT 59: note = MOD_RES - Any amino acid
  VARIANT 1..60: note = SITE - This sequence may encompass 1-30 XP repeating units
XPXPXPXPXPXPXPXPXPXPXPXPXPXPXPXPXPXPXPXPXPXPXPXPXPXPXPXPXPXP

SEQ ID NO: 48 - protein, 5 aa, synthetic construct
  source 1..5: note = Description of Artificial Sequence: Synthetic peptide
EAAAK

SEQ ID NO: 49 - protein, 4 aa, synthetic construct
  source 1..4: note = Description of Artificial Sequence: Synthetic peptide
SGGS

SEQ ID NO: 50 - DNA, 20 bp, synthetic construct
  source 1..20: mol_type = other DNA; note = Description of Artificial Sequence: Synthetic oligonucleotide
gccaatggcctccttcagtt

SEQ ID NO: 51 - protein, 21 aa, synthetic construct
  source 1..21: note = Description of Artificial Sequence: Synthetic peptide
  VARIANT 1..21: note = SITE - This sequence may encompass 1, 3, or 7 GGS repeating units
GGSGGSGGSGGSGGSGGSGGS

SEQ ID NO: 52 - protein, 1052 aa, Staphylococcus aureus
KRNYILGLDIGITSVGYGIIDYETRDVIDAGVRLFKEANVENNEGRRSKRGARRLKRRRRHRIQRVKKLLFDYNLLTDHSELSGINPYEARVKGLSQKLSEEEFSAALLHLAKRRGVHNVNEVEEDTGNELSTKEQISRNSKALEEKYVAELQLERLKKDGEVRGSINRFKTSDYVKEAKQLLKVQKAYHQLDQSFIDTYIDLLETRRTYYEGPGEGSPFGWKDIKEWYEMLMGHCTYFPEELRSVKYAYNADLYNALNDLNNLVITRDENEKLEYYEKFQIIENVFKQKKKPTLKQIAKEILVNEEDIKGYRVTSTGKPEFTNLKVYHDIKDITARKEIIENAELLDQIAKILTIYQSSEDIQEELTNLNSELTQEEIEQISNLKGYTGTHNLSLKAINLILDELWHTNDNQIAIFNRLKLVPKKVDLSQQKEIPTTLVDDFILSPVVKRSFIQSIKVINAIIKKYGLPNDIIIELAREKNSKDAQKMINEMQKRNRQTNERIEEIIRTTGKENAKYLIEKIKLHDMQEGKCLYSLEAIPLEDLLNNPFNYEVDHIIPRSVSFDNSFNNKVLVKQEENSKKGNRTPFQYLSSSDSKISYETFKKHILNLAKGKGRISKTKKEYLLEERDINRFSVQKDFINRNLVDTRYATRGLMNLLRSYFRVNNLDVKVKSINGGFTSFLRRKWKFKKERNKGYKHHAEDALIIANADFIFKEWKKLDKAKKVMENQMFEEKQAESMPEIETEQEYKEIFITPHQIKHIKDFKDYKYSHRVDKKPNRELINDTLYSTRKDDKGNTLIVNNLNGLYDKDNDKLKKLINKSPEKLLMYHHDPQTYQKLKLIMEQYGDEKNPLYKYYEETGNYLTKYSKKDNGPVIKKIKYYGNKLNAHLDITDDYPNSRNKVVKLSLKPYRFDVYLDNGVYKFVTVKNLDVIKKENYYEVNSKCYEEAKKLKKISNQAEFIASFYNNDLIKINGELYRVIGVNNDLLNRIEVNMIDITYREYLENMNDKRPPRIIKTIASKTQSIKKYSTDILGNLYEVKSKKHPQIIKKG

SEQ ID NO: 53 - protein, 1300 aa, Francisella sp.
MSIYQEFVNKYSLSKTLRFELIPQGKTLENIKARGLILDDEKRAKDYKKAKQIIDKYHQFFIEEILSSVCISEDLLQNYSDVYFKLKKSDDDNLQKDFKSAKDTIKKQISEYIKDSEKFKNLFNQNLIDAKKGQESDLILWLKQSKDNGIELFKANSDITDIDEALEIIKSFKGWTTYFKGFHENRKNVYSSNDIPTSIIYRIVDDNLPKFLENKAKYESLKDKAPEAINYEQIKKDLAEELTFDIDYKTSEVNQRVFSLDEVFEIANFNNYLNQSGITKFNTIIGGKFVNGENTKRKGINEYINLYSQQINDKTLKKYKMSVLFKQILSDTESKSFVIDKLEDDSDVVTTMQSFYEQIAAFKTVEEKSIKETLSLLFDDLKAQKLDLSKIYFKNDKSLTDLSQQVFDDYSVIGTAVLEYITQQIAPKNLDNPSKKEQELIAKKTEKAKYLSLETIKLALEEFNKHRDIDKQCRFEEILANFAAIPMIFDEIAQNKDNLAQISIKYQNQGKKDLLQASAEDDVKAIKDLLDQTNNLLHKLKIFHISQSEDKANILDKDEHFYLVFEECYFELANIVPLYNKIRNYITQKPYSDEKFKLNFENSTLANGWDKNKEPDNTAILFIKDDKYYLGVMNKKNNKIFDDKAIKENKGEGYKKIVYKLLPGANKMLPKVFFSAKSIKFYNPSEDILRIRNHSTHTKNGSPQKGYEKFEFNIEDCRKFIDFYKQSISKHPEWKDFGFRFSDTQRYNSIDEFYREVENQGYKLTFENISESYIDSVVNQGKLYLFQIYNKDFSAYSKGRPNLHTLYWKALFDERNLQDVVYKLNGEAELFYRKQSIPKKITHPAKEAIANKNKDNPKKESVFEYDLIKDKRFTEDKFFFHCPITINFKSSGANKFNDEINLLLKEKANDVHILSIDRGERHLAYYTLVDGKGNIIKQDTFNIIGNDRMKTNYHDKLAAIEKDRDSARKDWKKINNIKEMKEGYLSQVVHEIAKLVIEYNAIVVFEDLNFGFKRGRFKVEKQVYQKLEKMLIEKLNYLVFKDNEFDKTGGVLRAYQLTAPFETFKKMGKQTGIIYYVPAGFTSKICPVTGFVNQLYPKYESVSKSQEFFSKFDKICYNLDKGYFEFSFDYKNFGDKAAKGKWTIASFGSRLINFRNSDKNHNWDTREVYPTKELEKLLKDYSIEYGHGECIKAAICGESDKKFFAKLTSVLNTILQMRNSKTGTELDYLISPVADVNGNFFDSRQAPKNMPQDADANGAYHIGLKGLMLLGRIKNNQEGKKLNLVIKNEEYFEFVQNRNN

SEQ ID NO: 54 - protein, 1140 aa, Bacillus sp.
MAPKKKRKVGIHGVPAAATRSFILKIEPNEEVKKGLWKTHEVLNHGIAYYMNILKLIRQEAIYEHHEQDPKNPKKVSKAEIQAELWDFVLKMQKCNSFTHEVDKDEVFNILRELYEELVPSSVEKKGEANQLSNKFLYPLVDPNSQSGKGTASSGRKPRWYNLKIAGDPSWEEEKKKWEEDKKKDPLAKILGKLAEYGLIPLFIPYTDSNEPIVKEIKWMEKSRNQSVRRLDKDMFIQALERFLSWESWNLKVKEEYEKVEKEYKTLEERIKEDIQALKALEQYEKERQEQLLRDTLNTNEYRLSKRGLRGWREIIQKWLKMDENEPSEKYLEVFKDYQRKHPREAGDYSVYEFLSKKENHFIWRNHPEYPYLYATFCEIDKKKKDAKQQATFTLADPINHPLWVRFEERSGSNLNKYRILTEQLHTEKLKKKLTVQLDRLIYPTESGGWEEKGKVDIVLLPSRQFYNQIFLDIEEKGKHAFTYKDESIKFPLKGTLGGARVQFDRDHLRRYPHKVESGNVGRIYFNMTVNIEPTESPVSKSLKIHRDDFPKVVNFKPKELTEWIKDSKGKKLKSGIESLEIGLRVMSIDLGQRQAAAASIFEVVDQKPDIEGKLFFPIKGTELYAVHRASFNIKLPGETLVKSREVLRKAREDNLKLMNQKLNFLRNVLHFQQFEDITEREKRVTKWISRQENSDVPLVYQDELIQIRELMYKPYKDWVAFLKQLHKRLEVEIGKEVKHWRKSLSDGRKGLYGISLKNIDEIDRTRKFLLRWSLRPTEPGEVRRLEPGQRFAIDQLNHLNALKEDRLKKMANTIIMHALGYCYDVRKKKWQAKNPACQIILFEDLSNYNPYEERSRFENSKLMKWSRREIPRQVALQGEIYGLQVGEVGAQFSSRFHAKTGSPGIRCSVVTKEKLQDNRFFKNLQREGRLTLDKIAVLKEGDLYPDKGGEKFISLSKDRKCVTTHADINAAQNLQKRFWTRTHGFYKVYCKAYQVDGQTVYIPESKDQKQKIIEEFGEGYFILKDGVYEWVNAGKLKIKKGSSKQSSSELVDSDILKDSFDLASELKGEKLMLYRDPSGNVFPSDKWMAAGVFFGKLERILISKLTNQYSISTIEDDSSKQSMKRPAATKKAGQAKKKK

SEQ ID NO: 55 - RNA, 100 nt, synthetic construct
  source 1..100: mol_type = other RNA; note = Description of Artificial Sequence: Synthetic polynucleotide
  modified_base 1: mod_base = OTHER; note = 2'-O-Methyl-cytidine phosphorothioate
  modified_base 2: mod_base = OTHER; note = 2'-O-Methyl-adenosine phosphorothioate
  modified_base 3: mod_base = OTHER; note = 2'-O-Methyl-guanosine phosphorothioate
  modified_base 21: mod_base = OTHER; note = 2'-O-Methyl-guanosine
  modified_base 28: mod_base = OTHER; note = 2'-O-Methyl-adenosine
  modified_base 29: mod_base = OTHER; note = 2'-O-Methyl-guanosine
  modified_base 30: mod_base = OTHER; note = 2'-O-Methyl-cytidine
  modified_base 31: mod_base = OTHER; note = 2'-O-Methyl-uridine
  modified_base 32: mod_base = OTHER; note = 2'-O-Methyl-adenosine
  modified_base 34: mod_base = OTHER; note = 2'-O-Methyl-adenosine
  modified_base 35: mod_base = OTHER; note = 2'-O-Methyl-adenosine
  modified_base 36: mod_base = OTHER; note = 2'-O-Methyl-adenosine
  modified_base 37: mod_base = OTHER; note = 2'-O-Methyl-uridine
  modified_base 38: mod_base = OTHER; note = 2'-O-Methyl-adenosine
  modified_base 39: mod_base = OTHER; note = 2'-O-Methyl-guanosine
  modified_base 40: mod_base = OTHER; note = 2'-O-Methyl-cytidine
  modified_base 41: mod_base = OTHER; note = 2'-O-Methyl-adenosine
  modified_base 42: mod_base = OTHER; note = 2'-O-Methyl-adenosine
  modified_base 46: mod_base = OTHER; note = 2'-O-Methyl-adenosine
  modified_base 48: mod_base = OTHER; note = 2'-O-Methyl-adenosine
  modified_base 50: mod_base = OTHER; note = 2'-O-Methyl-uridine
  modified_base 52: mod_base = OTHER; note = 2'-O-Methyl-adenosine
  modified_base 53: mod_base = OTHER; note = 2'-O-Methyl-guanosine
  modified_base 54: mod_base = OTHER; note = 2'-O-Methyl-guanosine
  modified_base 57: mod_base = OTHER; note = 2'-O-Methyl-adenosine
  modified_base 61: mod_base = OTHER; note = 2'-O-Methyl-cytidine
  modified_base 66: mod_base = OTHER; note = 2'-O-Methyl-uridine
  modified_base 67: mod_base = OTHER; note = 2'-O-Methyl-cytidine
  modified_base 70: mod_base = OTHER; note = 2'-O-Methyl-cytidine
  modified_base 71: mod_base = OTHER; note = 2'-O-Methyl-uridine
  modified_base 72: mod_base = OTHER; note = 2'-O-Methyl-uridine
  modified_base 74: mod_base = OTHER; note = 2'-O-Methyl-adenosine
  modified_base 75: mod_base = OTHER; note = 2'-O-Methyl-adenosine
  modified_base 76: mod_base = OTHER; note = 2'-O-Methyl-adenosine
  modified_base 77: mod_base = OTHER; note = 2'-O-Methyl-adenosine
  modified_base 78: mod_base = OTHER; note = 2'-O-Methyl-adenosine
  modified_base 79: mod_base = OTHER; note = 2'-O-Methyl-guanosine
  modified_base 80: mod_base = OTHER; note = 2'-O-Methyl-uridine
  modified_base 82: mod_base = OTHER; note = 2'-O-Methyl-guanosine
  modified_base 83: mod_base = OTHER; note = 2'-O-Methyl-cytidine
  modified_base 84: mod_base = OTHER; note = 2'-O-Methyl-adenosine
  modified_base 85: mod_base = OTHER; note = 2'-O-Methyl-cytidine
  modified_base 86: mod_base = OTHER; note = 2'-O-Methyl-cytidine
  modified_base 87: mod_base = OTHER; note = 2'-O-Methyl-guanosine
  modified_base 89: mod_base = OTHER; note = 2'-O-Methyl-guanosine
  modified_base 92: mod_base = OTHER; note = 2'-O-Methyl-guanosine
  modified_base 93: mod_base = OTHER; note = 2'-O-Methyl-guanosine
  modified_base 94: mod_base = OTHER; note = 2'-O-Methyl-uridine
  modified_base 95: mod_base = OTHER; note = 2'-O-Methyl-guanosine
  modified_base 96: mod_base = OTHER; note = 2'-O-Methyl-cytidine
  modified_base 97: mod_base = OTHER; note = 2'-O-Methyl-uridine phosphorothioate
  modified_base 98: mod_base = OTHER; note = 2'-O-Methyl-uridine phosphorothioate
  modified_base 99: mod_base = OTHER; note = 2'-O-Methyl-uridine phosphorothioate
  modified_base 100: mod_base = OTHER; note = 2'-O-Methyl-uridine
caggttccatgggatgctctgttttagagctagaaatagcaagttaaaataaggctagtccgttatcaacttgaaaaagtggcaccgagtcggtgctttt

SEQ ID NO: 56 - RNA, 20 nt, synthetic construct
  source 1..20: mol_type = other RNA; note = Description of Artificial Sequence: Synthetic oligonucleotide
  modified_base 1: mod_base = OTHER; note = 2'-O-Methyl-cytidine phosphorothioate
  modified_base 2: mod_base = OTHER; note = 2'-O-Methyl-adenosine phosphorothioate
  modified_base 3: mod_base = OTHER; note = 2'-O-Methyl-guanosine phosphorothioate
caggttccatgggatgctct

SEQ ID NO: 57 - RNA, 80 nt, synthetic construct
  source 1..80: mol_type = other RNA; note = Description of Artificial Sequence: Synthetic oligonucleotide
  modified_base 1: mod_base = OTHER; note = 2'-O-Methyl-guanosine
  modified_base 8: mod_base = OTHER; note = 2'-O-Methyl-adenosine
  modified_base 9: mod_base = OTHER; note = 2'-O-Methyl-guanosine
  modified_base 10: mod_base = OTHER; note = 2'-O-Methyl-cytidine
  modified_base 11: mod_base = OTHER; note = 2'-O-Methyl-uridine
  modified_base 12: mod_base = OTHER; note = 2'-O-Methyl-adenosine
  modified_base 14: mod_base = OTHER; note = 2'-O-Methyl-adenosine
  modified_base 15: mod_base = OTHER; note = 2'-O-Methyl-adenosine
  modified_base 16: mod_base = OTHER; note = 2'-O-Methyl-adenosine
  modified_base 17: mod_base = OTHER; note = 2'-O-Methyl-uridine
  modified_base 18: mod_base = OTHER; note = 2'-O-Methyl-adenosine
  modified_base 19: mod_base = OTHER; note = 2'-O-Methyl-guanosine
  modified_base 20: mod_base = OTHER; note = 2'-O-Methyl-cytidine
  modified_base 21: mod_base = OTHER; note = 2'-O-Methyl-adenosine
  modified_base 22: mod_base = OTHER; note = 2'-O-Methyl-adenosine
  modified_base 26: mod_base = OTHER; note = 2'-O-Methyl-adenosine
  modified_base 28: mod_base = OTHER; note = 2'-O-Methyl-adenosine
  modified_base 30: mod_base = OTHER; note = 2'-O-Methyl-uridine
  modified_base 32: mod_base = OTHER; note = 2'-O-Methyl-adenosine
  modified_base 33: mod_base = OTHER; note = 2'-O-Methyl-guanosine
  modified_base 34: mod_base = OTHER; note = 2'-O-Methyl-guanosine
  modified_base 37: mod_base = OTHER; note = 2'-O-Methyl-adenosine
  modified_base 41: mod_base = OTHER; note = 2'-O-Methyl-cytidine
  modified_base 46: mod_base = OTHER; note = 2'-O-Methyl-uridine
  modified_base 47: mod_base = OTHER; note = 2'-O-Methyl-cytidine
  modified_base 50: mod_base = OTHER; note = 2'-O-Methyl-cytidine
  modified_base 51: mod_base = OTHER; note = 2'-O-Methyl-uridine
  modified_base 52: mod_base = OTHER; note = 2'-O-Methyl-uridine
  modified_base 54: mod_base = OTHER; note = 2'-O-Methyl-adenosine
  modified_base 55: mod_base = OTHER; note = 2'-O-Methyl-adenosine
  modified_base 56: mod_base = OTHER; note = 2'-O-Methyl-adenosine
  modified_base 57: mod_base = OTHER; note = 2'-O-Methyl-adenosine
  modified_base 58: mod_base = OTHER; note = 2'-O-Methyl-adenosine
  modified_base 59: mod_base = OTHER; note = 2'-O-Methyl-guanosine
  modified_base 60: mod_base = OTHER; note = 2'-O-Methyl-uridine
  modified_base 62: mod_base = OTHER; note = 2'-O-Methyl-guanosine
  modified_base 63: mod_base = OTHER; note = 2'-O-Methyl-cytidine
  modified_base 64: mod_base = OTHER; note = 2'-O-Methyl-adenosine
  modified_base 65: mod_base = OTHER; note = 2'-O-Methyl-cytidine
  modified_base 66: mod_base = OTHER; note = 2'-O-Methyl-cytidine
  modified_base 67: mod_base = OTHER; note = 2'-O-Methyl-guanosine
  modified_base 69: mod_base = OTHER; note = 2'-O-Methyl-guanosine
  modified_base 72: mod_base = OTHER; note = 2'-O-Methyl-guanosine
  modified_base 73: mod_base = OTHER; note = 2'-O-Methyl-guanosine
  modified_base 74: mod_base = OTHER; note = 2'-O-Methyl-uridine
  modified_base 75: mod_base = OTHER; note = 2'-O-Methyl-guanosine
  modified_base 76: mod_base = OTHER; note = 2'-O-Methyl-cytidine
  modified_base 77: mod_base = OTHER; note = 2'-O-Methyl-uridine phosphorothioate
  modified_base 78: mod_base = OTHER; note = 2'-O-Methyl-uridine phosphorothioate
  modified_base 79: mod_base = OTHER; note = 2'-O-Methyl-uridine phosphorothioate
  modified_base 80: mod_base = OTHER; note = 2'-O-Methyl-uridine
gttttagagctagaaatagcaagttaaaataaggctagtccgttatcaacttgaaaaagtggcaccgagtcggtgctttt

SEQ ID NO: 58 - RNA, 100 nt, synthetic construct; identical to SEQ ID NO: 9
  source 1..100: mol_type = other RNA; note = Description of Artificial Sequence: Synthetic oligonucleotide; note = Description of Combined DNA/RNA Molecule: Synthetic oligonucleotide
  modified_base 1: mod_base = OTHER; note = 2'-O-Methyl-cytidine phosphorothioate
  modified_base 2: mod_base = OTHER; note = 2'-O-Methyl-cytidine phosphorothioate
  modified_base 3: mod_base = OTHER; note = 2'-O-Methyl-cytidine phosphorothioate
  modified_base 9: mod_base = OTHER; note = thymine
  modified_base 10: mod_base = OTHER; note = thymine
  modified_base 97: mod_base = OTHER; note = uridine phosphorothioate
  modified_base 98: mod_base = OTHER; note = 2'-O-Methyl-uridine phosphorothioate
  modified_base 99: mod_base = OTHER; note = 2'-O-Methyl-uridine phosphorothioate
  modified_base 100: mod_base = OTHER; note = 2'-O-Methyl-uridine

SEQ ID NO: 59 - RNA, 100 nt, synthetic construct
  source 1..100: mol_type = other RNA; note = Description of Artificial Sequence: Synthetic polynucleotide
  modified_base 1: mod_base = OTHER; note = 2'-O-Methyl-adenosine phosphorothioate
  modified_base 2: mod_base = OTHER; note = 2'-O-Methyl-adenosine phosphorothioate
  modified_base 3: mod_base = OTHER; note = 2'-O-Methyl-guanosine phosphorothioate
  modified_base 97: mod_base = OTHER; note = uridine phosphorothioate
  modified_base 98: mod_base = OTHER; note = 2'-O-Methyl-uridine phosphorothioate
  modified_base 99: mod_base = OTHER; note = 2'-O-Methyl-uridine phosphorothioate
  modified_base 100: mod_base = OTHER; note = 2'-O-Methyl-uridine
aagatacctgaataaccctcgttttagagctagaaatagcaagttaaaataaggctagtccgttatcaacttgaaaaagtggcaccgagtcggtgctttt

SEQ ID NO: 60 - RNA, 100 nt, synthetic construct; identical to SEQ ID NO: 59
  source 1..100: mol_type = other RNA; note = Description of Artificial Sequence: Synthetic polynucleotide
  modified_base 1: mod_base = OTHER; note = 2'-O-Methyl-adenosine phosphorothioate
  modified_base 2: mod_base = OTHER; note = 2'-O-Methyl-adenosine phosphorothioate
  modified_base 3: mod_base = OTHER; note = 2'-O-Methyl-guanosine phosphorothioate
  modified_base 29: mod_base = OTHER; note = 2'-O-Methyl-guanosine
  modified_base 30: mod_base = OTHER; note = 2'-O-Methyl-cytidine
  modified_base 31: mod_base = OTHER; note = 2'-O-Methyl-uridine
  modified_base 32: mod_base = OTHER; note = 2'-O-Methyl-adenosine
  modified_base 33: mod_base = OTHER; note = 2'-O-Methyl-guanosine
  modified_base 34: mod_base = OTHER; note = 2'-O-Methyl-adenosine
  modified_base 35: mod_base = OTHER; note = 2'-O-Methyl-adenosine
  modified_base 36: mod_base = OTHER; note = 2'-O-Methyl-adenosine
  modified_base 37: mod_base = OTHER; note = 2'-O-Methyl-uridine
  modified_base 38: mod_base = OTHER; note = 2'-O-Methyl-adenosine
  modified_base 39: mod_base = OTHER; note = 2'-O-Methyl-guanosine
  modified_base 40: mod_base = OTHER; note = 2'-O-Methyl-cytidine
  modified_base 69: mod_base = OTHER; note = 2'-O-Methyl-adenosine
  modified_base 70: mod_base = OTHER; note = 2'-O-Methyl-cytidine
  modified_base 71: mod_base = OTHER; note = 2'-O-Methyl-uridine
  modified_base 72: mod_base = OTHER; note = 2'-O-Methyl-uridine
  modified_base 73: mod_base = OTHER; note = 2'-O-Methyl-guanosine
  modified_base 74: mod_base = OTHER; note = 2'-O-Methyl-adenosine
  modified_base 75: mod_base = OTHER; note = 2'-O-Methyl-adenosine
  modified_base 76: mod_base = OTHER; note = 2'-O-Methyl-adenosine
  modified_base 77: mod_base = OTHER; note = 2'-O-Methyl-adenosine
  modified_base 78: mod_base = OTHER; note = 2'-O-Methyl-adenosine
  modified_base 79: mod_base = OTHER; note = 2'-O-Methyl-guanosine
  modified_base 80: mod_base = OTHER; note = 2'-O-Methyl-uridine
  modified_base 81: mod_base = OTHER; note = 2'-O-Methyl-guanosine
  modified_base 82: mod_base = OTHER; note = 2'-O-Methyl-guanosine
  modified_base 83: mod_base = OTHER; note = 2'-O-Methyl-cytidine
  modified_base 84: mod_base = OTHER; note = 2'-O-Methyl-adenosine
  modified_base 85: mod_base = OTHER; note = 2'-O-Methyl-cytidine
  modified_base 86: mod_base = OTHER; note = 2'-O-Methyl-cytidine
  modified_base 87: mod_base = OTHER; note = 2'-O-Methyl-guanosine
  modified_base 88: mod_base = OTHER; note = 2'-O-Methyl-adenosine
  modified_base 89: mod_base = OTHER; note = 2'-O-Methyl-guanosine
  modified_base 90: mod_base = OTHER; note = 2'-O-Methyl-uridine
  modified_base 91: mod_base = OTHER; note = 2'-O-Methyl-cytidine
  modified_base 92: mod_base = OTHER; note = 2'-O-Methyl-guanosine
  modified_base 93: mod_base = OTHER; note = 2'-O-Methyl-guanosine
  modified_base 94: mod_base = OTHER; note = 2'-O-Methyl-uridine
  modified_base 95: mod_base = OTHER; note = 2'-O-Methyl-guanosine
  modified_base 96: mod_base = OTHER; note = 2'-O-Methyl-cytidine
  modified_base 97: mod_base = OTHER; note = 2'-O-Methyl-uridine phosphorothioate
  modified_base 98: mod_base = OTHER; note = 2'-O-Methyl-uridine phosphorothioate
  modified_base 99: mod_base = OTHER; note = 2'-O-Methyl-uridine phosphorothioate
  modified_base 100: mod_base = OTHER; note = 2'-O-Methyl-uridine

SEQ ID NO: 61 - RNA, 80 nt, synthetic construct; identical to SEQ ID NO: 57
  source 1..80: mol_type = other RNA; note = Description of Artificial Sequence: Synthetic oligonucleotide

SEQ ID NO: 62 - DNA, 3166 bp, Homo sapiens
  source 1..3166: mol_type = unassigned DNA
ctgctcagttcatccctagaggcagctgctccaggtaatgccctctggggaggggaaagaggaggggaggaggatgaagaggggcaagaggagctccctgcccagcccagccagcaagcctggagaagcacttgctagagctaaggaagcctcggagctggacgggtgccccccacccctcatcataacctgaagaacatggaggcccgggaggggtgtcacttgcccaaagctacacagggggtggggctggaagtggctccaagtgcaggttcccccctcattcttcaggcttagggctggaggaagccttagacagcccagtcctaccccagacagggaaactgaggcctggagagggccagaaatcacccaaagacacacagcatgttggctggactggacggagatcagtccagaccgcaggtgccttgatgttcagtctggtgggttttctgctccatcccacccacctccctttgggcctcgatccctcgcccctcaccagtcccccttctgagagcccgtattagcagggagccggcccctactccttctggcagacccagctaaggttctaccttaggggccacgccacctccccagggaggggtccagaggcatggggacctggggtgcccctcacaggacacttccttgcaggaacagaggtgccatgcagccccgggtactccttgttgttgccctcctggcgctcctggcctctgcccgtaagcacttggtgggactgggctgggggcagggtggaggcaacttggggatcccagtcccaatgggtggtcaagcaggagcccagggctcgtccagaggccgatccaccccactcagccctgctctttcctcaggagcttcagaggccgaggatgcctcccttctcagcttcatgcagggttacatgaagcacgccaccaagaccgccaaggatgcactgagcagcgtgcaggagtcccaggtggcccagcaggccaggtacacccgctggcctccctccccatcccccctgccagctgcctccattcccacccgcccctgccctggtgagatcccaacaatggaatggaggtgctccagcctcccctgggcctgtgcctcttcagcctcctctttcctcacagggcctttgtcaggctgctgcgggagagatgacagagttgagactgcattcctcccaggtccctcctttctccccggagcagtcctagggcgtgccgttttagccctcatttccattttcctttcctttccctttctttctctttctatttctttctttctttctttctttctttctttctttctttctttctttctttctttctttctttctttcctttctttctttcctttctttctttcctttctttctttctttcctttctttctctttctttctttctttcctttttctttctttccctctcttcctttctctctttctttcttcttcttttttttttaatggagtctccctctgtcacctaggctggagtgcagtggtgccatctcggctcactgcaacctccgtctcccgggttcaacccattctcctgcctcagcctcccaagtagctgggattacaggcacgcgccaccacacccagctaatttttgtatttttagcagagatggggtttcaccatgttggccaggttggtcttgaattcctgacctcaggggatcctcctgcctcggcctcccaaagtgctgggattacaggcatgagccactgcgcctggccccattttccttttctgaaggtctggctagagcagtggtcctcagcctttttggcaccagggaccagttttgtggtggacaatttttccatgggccagcggggatggttttgggatgaagctgttccacctcagatcatcaggcattagattctcataaggagccctccacctagatccctggcatgtgcagttcacaatagggttcacactcctatgagaatgtaaggccacttgatctgacaggaggcggagctcaggcggtattgctcactcacccaccactcacttcgtgctgtgcagcccggctcctaacagtccatggaccagtacctatctatgacttgggggttggggacccctgggctaggggtttgccttgggaggccccacctgacccaattcaagcccgtgagtgcttctgctttgttctaagacctggggccagtgtgagcagaagtgtgtccttcctctcccatcctgcccctgcccatcagtactctcctctcccctactcccttctccacctcaccctgactggcattagctggcatagcagaggtgttcataaacattcttagtccccagaaccggctttggggtaggtgttattttctcactttgcagatgagaaaattgaggctcagagcgattaggtgacctgccccagatcacacaactaatcaatcctccaatgactttccaaatgagaggctgcctccctctgtcctaccctgctcagagccaccaggttgtgcaactccaggcggtgctgtttgcacagaaaacaatgacagccttgacctttcacatctccccaccctgtcactttgtgcctcaggcccaggggcataaacatctgaggtgacctggagatggcagggtttgacttgtgctggggttcctgcaaggatatctcttctcccagggtggcagctgtgggggattcctgcctgaggtctcagggctgtcgtccagtgaagttgagagggtggtgtggtcctgactggtgtcgtccagtggggacatgggtgtgggtcccatggttgcctacagaggagttctcatgccctgctctgttgcttcccctgactgatttaggggctgggtgaccgatggcttcagttccctgaaagactactggagcaccgttaaggacaagttctctgagttctgggatttggaccctgaggtcagaccaacttcagccgtggctgcctgagacctcaataccccaagtccacctgcctatccatcctgcgagctccttgggtcctgcaatctccagggctgcccctgtaggttgcttaaaagggacagtattctcagtgctctcctaccccacctcatgcctggcccccctccaggcatgctggcctcccaataaagctggacaagaagctgctatga

SEQ ID NO: 63 - protein, 99 aa, Homo sapiens
MQPRVLLVVALLALLASARASEAEDASLLSFMQGYMKHATKTAKDALSSVQESQVAQQARGWVTDGFSSLKDYWSTVKDKFSEFWDLDPEVRPTSAVAA

SEQ ID NO: 64 - protein, 4548 aa, Homo sapiens
MEHKEVVLLLLLFLKSAAPEQSHVVQDCYHGDGQSYRGTYSTTVTGRTCQAWSSMTPHQHNRTTENYPNAGLIMNYCRNPDAVAAPYCYTRDPGVRWEYCNLTQCSDAEGTAVAPPTVTPVPSLEAPSEQAPTEQRPGVQECYHGNGQSYRGTYSTTVTGRTCQAWSSMTPHSHSRTPEYYPNAGLIMNYCRNPDAVAAPYCYTRDPGVRWEYCNLTQCSDAEGTAVAPPTVTPVPSLEAPSEQAPTEQRPGVQECYHGNGQSYRGTYSTTVTGRTCQAWSSMTPHSHSRTPEYYPNAGLIMNYCRNPDAVAAPYCYTRDPGVRWEYCNLTQCSDAEGTAVAPPTVTPVPSLEAPSEQAPTEQRPGVQECYHGNGQSYRGTYSTTVTGRTCQAWSSMTPHSHSRTPEYYPNAGLIMNYCRNPDAVAAPYCYTRDPGVRWEYCNLTQCSDAEGTAVAPPTVTPVPSLEAPSEQAPTEQRPGVQECYHGNGQSYRGTYSTTVTGRTCQAWSSMTPHSHSRTPEYYPNAGLIMNYCRNPDAVAAPYCYTRDPGVRWEYCNLTQCSDAEGTAVAPPTVTPVPSLEAPSEQAPTEQRPGVQECYHGNGQSYRGTYSTTVTGRTCQAWSSMTPHSHSRTPEYYPNAGLIMNYCRNPDAVAAPYCYTRDPGVRWEYCNLTQCSDAEGTAVAPPTVTPVPSLEAPSEQAPTEQRPGVQECYHGNGQSYRGTYSTTVTGRTCQAWSSMTPHSHSRTPEYYPNAGLIMNYCRNPDAVAAPYCYTRDPGVRWEYCNLTQCSDAEGTAVAPPTVTPVPSLEAPSEQAPTEQRPGVQECYHGNGQSYRGTYSTTVTGRTCQAWSSMTPHSHSRTPEYYPNAGLIMNYCRNPDAVAAPYCYTRDPGVRWEYCNLTQCSDAEGTAVAPPTVTPVPSLEAPSEQAPTEQRPGVQECYHGNGQSYRGTYSTTVTGRTCQAWSSMTPHSHSRTPEYYPNAGLIMNYCRNPDAVAAPYCYTRDPGVRWEYCNLTQCSDAEGTAVAPPTVTPVPSLEAPSEQAPTEQRPGVQECYHGNGQSYRGTYSTTVTGRTCQAWSSMTPHSHSRTPEYYPNAGLIMNYCRNPDAVAAPYCYTRDPGVRWEYCNLTQCSDAEGTAVAPPTVTPVPSLEAPSEQAPTEQRPGVQECYHGNGQSYRGTYSTTVTGRTCQAWSSMTPHSHSRTPEYYPNAGLIMNYCRNPDAVAAPYCYTRDPGVRWEYCNLTQCSDAEGTAVAPPTVTPVPSLEAPSEQAPTEQRPGVQECYHGNGQSYRGTYSTTVTGRTCQAWSSMTPHSHSRTPEYYPNAGLIMNYCRNPDAVAAPYCYTRDPGVRWEYCNLTQCSDAEGTAVAPPTVTPVPSLEAPSEQAPTEQRPGVQECYHGNGQSYRGTYSTTVTGRTCQAWSSMTPHSHSRTPEYYPNAGLIMNYCRNPDAVAAPYCYTRDPGVRWEYCNLTQCSDAEGTAVAPPTVTPVPSLEAPSEQAPTEQRPGVQECYHGNGQSYRGTYSTTVTGRTCQAWSSMTPHSHSRTPEYYPNAGLIMNYCRNPDAVAAPYCYTRDPGVRWEYCNLTQCSDAEGTAVAPPTVTPVPSLEAPSEQAPTEQRPGVQECYHGNGQSYRGTYSTTVTGRTCQAWSSMTPHSHSRTPEYYPNAGLIMNYCRNPDAVAAPYCYTRDPGVRWEYCNLTQCSDAEGTAVAPPTVTPVPSLEAPSEQAPTEQRPGVQECYHGNGQSYRGTYSTTVTGRTCQAWSSMTPHSHSRTPEYYPNAGLIMNYCRNPDAVAAPYCYTRDPGVRWEYCNLTQCSDAEGTAVAPPTVTPVPSLEAPSEQAPTEQRPGVQECYHGNGQSYRGTYSTTVTGRTCQAWSSMTPHSHSRTPEYYPNAGLIMNYCRNPDAVAAPYCYTRDPGVRWEYCNLTQCSDAEGTAVAPPTVTPVPSLEAPSEQAPTEQRPGVQECYHGNGQSYRGTYSTTVTGRTCQAWSSMTPHSHSRTPEYYPNAGLIMNYCRNPDAVAAPYCYTRDPGVRWEYCNLTQCSDAEGTAVAPPTVTPVPSLEAPSEQAPTEQRPGVQECYHGNGQSYRGTYSTTVTGRTCQAWSSMTPHSHSRTPEYYPNAGLIMNYCRNPDAVAAPYCYTRDPGVRWEYCNLTQCSDAEGTAVAPPTVTPVPSLEAPSEQAPTEQRPGVQECYHGNGQSYRGTYSTTVTGRTCQAWSSMTPHSHSRTPEYYPNAGLIMNYCRNPDAVAAPYCYTRDPGVRWEYCNLTQCSDAEGTAVAPPTVTPVPSLEAPSEQAPTEQRPGVQECYHGNGQSYRGTYSTTVTGRTCQAWSSMTPHSHSRTPEYYPNAGLIMNYCRNPDAVAAPYCYTRDPGVRWEYCNLTQCSDAEGTAVAPPTVTPVPSLEAPSEQAPTEQRPGVQECYHGNGQSYRGTYSTTVTGRTCQAWSSMTPHSHSRTPEYYPNAGLIMNYCRNPDAVAAPYCYTRDPGVRWEYCNLTQCSDAEGTAVAPPTVTPVPSLEAPSEQAPTEQRPGVQECYHGNGQSYRGTYSTTVTGRTCQAWSSMTPHSHSRTPEYYPNAGLIMNYCRNPDAVAAPYCYTRDPGVRWEYCNLTQCSDAEGTAVAPPTVTPVPSLEAPSEQAPTEQRPGVQECYHGNGQSYRGTYSTTVTGRTCQAWSSMTPHSHSRTPEYYPNAGLIMNYCRNPDAVAAPYCYTRDPGVRWEYCNLTQCSDAEGTAVAPPTVTPVPSLEAPSEQAPTEQRPGVQECYHGNGQSYRGTYSTTVTGRTCQAWSSMTPHSHSRTPEYYPNAGLIMNYCRNPDAVAAPYCYTRDPGVRWEYCNLTQCSDAEGTAVAPPTVTPVPSLEAPSEQAPTEQRPGVQECYHGNGQSYRGTYSTTVTGRTCQAWSSMTPHSHSRTPEYYPNAGLIMNYCRNPDAVAAPYCYTRDPGVRWEYCNLTQCSDAEGTAVAPPTVTPVPSLEAPSEQAPTEQRPGVQECYHGNGQSYRGTYSTTVTGRTCQAWSSMTPHSHSRTPEYYPNAGLIMNYCRNPDAVAAPYCYTRDPGVRWEYCNLTQCSDAEGTAVAPPTVTPVPSLEAPSEQAPTEQRPGVQECYHGNGQSYRGTYSTTVTGRTCQAWSSMTPHSHSRTPEYYPNAGLIMNYCRNPDAVAAPYCYTRDPGVRWEYCNLTQCSDAEGTAVAPPTVTPVPSLEAPSEQAPTEQRPGVQECYHGNGQSYRGTYSTTVTGRTCQAWSSMTPHSHSRTPEYYPNAGLIMNYCRNPDAVAAPYCYTRDPGVRWEYCNLTQCSDAEGTAVAPPTVTPVPSLEAPSEQAPTEQRPGVQECYHGNGQSYRGTYSTTVTGRTCQAWSSMTPHSHSRTPEYYPNAGLIMNYCRNPDPVAAPYCYTRDPSVRWEYCNLTQCSDAEGTAVAPPTITPIPSLEAPSEQAPTEQRPGVQECYHGNGQSYQGTYFITVTGRTCQAWSSMTPHSHSRTPAYYPNAGLIKNYCRNPDPVAAPWCYTTDPSVRWEYCNLTRCSDAEWTAFVPPNVILAPSLEAFFEQALTEETPGVQDCYYHYGQSYRGTYSTTVTGRTCQAWSSMTPHQHSRTPENYPNAGLTRNYCRNPDAEIRPWCYTMDPSVRWEYCNLTQCLVTESSVLATLTVVPDPSTEASSEEAPTEQSPGVQDCYHGDGQSYRGSFSTTVTGRTCQSWSSMTPHWHQRTTEYYPNGGLTRNYCRNPDAEISPWCYTMDPNVRWEYCNLTQCPVTESSVLATSTAVSEQAPTEQSPTVQDCYHGDGQSYRGSFSTTVTGRTCQSWSSMTPHWHQRTTEYYPNGGLTRNYCRNPDAEIRPWCYTMDPSVRWEYCNLTQCPVMESTLLTTPTVVPVPSTELPSEEAPTENSTGVQDCYRGDGQSYRGTLSTTITGRTCQSWSSMTPHWHRRIPLYYPNAGLTRNYCRNPDAEIRPWCYTMDPSVRWEYCNLTRCPVTESSVLTTPTVAPVPSTEAPSEQAPPEKSPVVQDCYHGDGRSYRGISSTTVTGRTCQSWSSMIPHWHQRTPENYPNAGLTENYCRNPDSGKQPWCYTTDPCVRWEYCNLTQCSETESGVLETPTVVPVPSMEAHSEAAPTEQTPVVRQCYHGNGQSYRGTFSTTVTGRTCQSWSSMTPHRHQRTPENYPNDGLTMNYCRNPDADTGPWCFTMDPSIRWEYCNLTRCSDTEGTVVAPPTVIQVPSLGPPSEQDCMFGNGKGYRGKKATTVTGTPCQEWAAQEPHRHSTFIPGTNKWAGLEKNYCRNPDGDINGPWCYTMNPRKLFDYCDIPLCASSSFDCGKPQVEPKKCPGSIVGGCVAHPHSWPWQVSLRTRFGKHFCGGTLISPEWVLTAAHCLKKSSRPSSYKVILGAHQEVNLESHVQEIEVSRLFLEPTQADIALLKLSRPAVITDKVMPACLPSPDYMVTARTECYITGWGETQGTFGTGLLKEAQLLVIENEVCNHYKYICAEHLARGTDSCQGDSGGPLVCFEKDKYILQGVTSWGLGCARPNKPGVYARVSRFVTWIEGMMRNN

SEQ ID NO: 65 - RNA, 100 nt, synthetic construct; identical to SEQ ID NO: 10
  source 1..100: mol_type = other RNA; note = Description of Artificial Sequence: Synthetic polynucleotide
  modified_base 1: mod_base = OTHER; note = 2'-O-Methyl-cytidine phosphorothioate
  modified_base 2: mod_base = OTHER; note = 2'-O-Methyl-cytidine phosphorothioate
  modified_base 3: mod_base = OTHER; note = 2'-O-Methyl-cytidine phosphorothioate
  modified_base 21: mod_base = OTHER; note = 2'-O-Methyl-guanosine
  modified_base 28: mod_base = OTHER; note = 2'-O-Methyl-adenosine
  modified_base 29: mod_base = OTHER; note = 2'-O-Methyl-guanosine
  modified_base 30: mod_base = OTHER; note = 2'-O-Methyl-cytidine
  modified_base 31: mod_base = OTHER; note = 2'-O-Methyl-uridine
  modified_base 32: mod_base = OTHER; note = 2'-O-Methyl-adenosine
  modified_base 33: mod_base = OTHER; note = 2'-O-Methyl-guanosine
  modified_base 34: mod_base = OTHER; note = 2'-O-Methyl-adenosine
  modified_base 35: mod_base = OTHER; note = 2'-O-Methyl-adenosine
  modified_base 36: mod_base = OTHER; note = 2'-O-Methyl-adenosine
  modified_base 37: mod_base = OTHER; note = 2'-O-Methyl-uridine
  modified_base 38: mod_base = OTHER; note = 2'-O-Methyl-adenosine
  modified_base 39: mod_base = OTHER; note = 2'-O-Methyl-guanosine
  modified_base 40: mod_base = OTHER; note = 2'-O-Methyl-cytidine
  modified_base 41: mod_base = OTHER; note = 2'-O-Methyl-adenosine
  modified_base 42: mod_base = OTHER; note = 2'-O-Methyl-adenosine
  modified_base 46: mod_base = OTHER; note = 2'-O-Methyl-adenosine
  modified_base 48: mod_base = OTHER; note = 2'-O-Methyl-adenosine
  modified_base 50: mod_base = OTHER; note = 2'-O-Methyl-uridine
  modified_base 52: mod_base = OTHER; note = 2'-O-Methyl-adenosine
  modified_base 53: mod_base = OTHER; note = 2'-O-Methyl-guanosine
  modified_base 54: mod_base = OTHER; note = 2'-O-Methyl-guanosine
  modified_base 55: mod_base = OTHER; note = 2'-O-Methyl-cytidine
  modified_base 56: mod_base = OTHER; note = 2'-O-Methyl-uridine
  modified_base 57: mod_base = OTHER; note = 2'-O-Methyl-adenosine
  modified_base 60: mod_base = OTHER; note = 2'-O-Methyl-cytidine
  modified_base 61: mod_base = OTHER; note = 2'-O-Methyl-cytidine
  modified_base 66: mod_base = OTHER; note = 2'-O-Methyl-adenosine
  modified_base 67: mod_base = OTHER; note = 2'-O-Methyl-cytidine
  modified_base 70: mod_base = OTHER; note = 2'-O-Methyl-cytidine
  modified_base 71: mod_base = OTHER; note = 2'-O-Methyl-uridine
  modified_base 72: mod_base = OTHER; note = 2'-O-Methyl-uridine
  modified_base 73: mod_base = OTHER; note = 2'-O-Methyl-guanosine
  modified_base 74: mod_base = OTHER; note = 2'-O-Methyl-adenosine
  modified_base 75: mod_base = OTHER; note = 2'-O-Methyl-adenosine
  modified_base 76: mod_base = OTHER; note = 2'-O-Methyl-adenosine
  modified_base 77: mod_base = OTHER; note = 2'-O-Methyl-adenosine
  modified_base 78: mod_base = OTHER; note = 2'-O-Methyl-adenosine
  modified_base 79: mod_base = OTHER; note = 2'-O-Methyl-guanosine
  modified_base 80: mod_base = OTHER; note = 2'-O-Methyl-uridine
  modified_base 81: mod_base = OTHER; note = 2'-O-Methyl-guanosine
  modified_base 83: mod_base = OTHER; note = 2'-O-Methyl-cytidine
  modified_base 84: mod_base = OTHER; note = 2'-O-Methyl-adenosine
  modified_base 85: mod_base = OTHER; note = 2'-O-Methyl-cytidine
  modified_base 86: mod_base = OTHER; note = 2'-O-Methyl-cytidine
  modified_base 87: mod_base = OTHER; note = 2'-O-Methyl-guanosine
  modified_base 88: mod_base = OTHER; note = 2'-O-Methyl-adenosine
  modified_base 89: mod_base = OTHER; note = 2'-O-Methyl-guanosine
  modified_base 90: mod_base = OTHER; note = 2'-O-Methyl-uridine
  modified_base 91: mod_base = OTHER; note = 2'-O-Methyl-cytidine
  modified_base 92: mod_base = OTHER; note = 2'-O-Methyl-guanosine
  modified_base 93: mod_base = OTHER; note = 2'-O-Methyl-guanosine
  modified_base 94: mod_base = OTHER; note = 2'-O-Methyl-uridine
  modified_base 95: mod_base = OTHER; note = 2'-O-Methyl-guanosine
  modified_base 96: mod_base = OTHER; note = 2'-O-Methyl-cytidine
  modified_base 97: mod_base = OTHER; note = 2'-O-Methyl-uridine phosphorothioate
  modified_base 98: mod_base = OTHER; note = 2'-O-Methyl-uridine phosphorothioate
  modified_base 99: mod_base = OTHER; note = 2'-O-Methyl-uridine phosphorothioate
  modified_base 100: mod_base = OTHER; note = 2'-O-Methyl-uridine

SEQ ID NO: 66 - DNA, 20 bp, synthetic construct
  source 1..20: mol_type = other DNA; note = Description of Artificial Sequence: Synthetic oligonucleotide
ggtgctagccttgcgttccg

SEQ ID NO: 67 - DNA, 20 bp, synthetic construct
  source 1..20: mol_type = other DNA; note = Description of Artificial Sequence: Synthetic oligonucleotide
gcttacctgtctgtggaagc

SEQ ID NO: 68 - DNA, 20 bp, synthetic construct
  source 1..20: mol_type = other DNA; note = Description of Artificial Sequence: Synthetic oligonucleotide
tgcttacctgtctgtggaag

SEQ ID NO: 69 - DNA, 20 bp, synthetic construct
  source 1..20: mol_type = other DNA; note = Description of Artificial Sequence: Synthetic oligonucleotide
cccataccttggagcaacgg

SEQ ID NO: 70 - DNA, 23 bp, synthetic construct
  source 1..23: mol_type = other DNA; note = Description of Artificial Sequence: Synthetic oligonucleotide
ccagccaagcgcacctaatttcc

SEQ ID NO: 71 - RNA, 98 nt, synthetic construct
  source 1..98: mol_type = other RNA; note = Description of Artificial Sequence: Synthetic oligonucleotide
ggaaattaggtgcgcttggcgttttagagctagaaatagcaagttaaaataaggctagtccgttatcaacttgaaaaagtggcaccgagtcggtgctt

SEQ ID NO: 72 - RNA, 100 nt, synthetic construct
  source 1..100: mol_type = other RNA; note = Description of Artificial Sequence: Synthetic polynucleotide
ggcgcataaagatgagacgcgttttagagctagaaatagcaagttaaaataaggctagtccgttatcaacttgaaaaagtgtcaccgagtcggtgcttcg

SEQ ID NO: 73 - RNA, 100 nt, synthetic construct; identical to SEQ ID NO: 55
  source 1..100: mol_type = other RNA; note = Description of Artificial Sequence: Synthetic polynucleotide

SEQ ID NO: 74 - RNA, 118 nt, synthetic construct
  source 1..118: mol_type = other RNA; note = Description of Artificial Sequence: Synthetic polynucleotide
ggcgcataaagatgagacgcgttttagagctatgctgttttgaaaaaaacagcatagcaagttaaaataaggctagtccgttatcaacttgaaaaagtggcaccgagtcggtgctttt

SEQ ID NO: 75 - DNA, 29 bp, synthetic construct
  source 1..29: mol_type = other DNA; note = Description of Artificial Sequence: Synthetic oligonucleotide
gctgcgccaaggcgcgggtgtagggatgg

SEQ ID NO: 76 - DNA, 27 bp, synthetic construct
  source 1..27: mol_type = other DNA; note = Description of Artificial Sequence: Synthetic oligonucleotide
  misc_difference 11: note = modified_base - a, c, t, g, unknown or other
  misc_difference 13: note = modified_base - a, c, t, g, unknown or other
ggttattcagncntctttttctgatac

SEQ ID NO: 77 - DNA, 33 bp, synthetic construct
  source 1..33: mol_type = other DNA; note = Description of Artificial Sequence: Synthetic oligonucleotide
acacccgcaccttggcgcagcggtggaaggtgg

SEQ ID NO: 78 - DNA, 33 bp, synthetic construct
  source 1..33: mol_type = other DNA; note = Description of Artificial Sequence: Synthetic oligonucleotide
acacccgcaccttggcgcaggggggaggggggg

SEQ ID NO: 79 - DNA, 33 bp, synthetic construct
  source 1..33: mol_type = other DNA; note = Description of Artificial Sequence: Synthetic oligonucleotide
acacccgcgccttggcgcagcggtggaaggtgg

SEQ ID NO: 80 - DNA, 23 bp, synthetic construct
  source 1..23: mol_type = other DNA; note = Description of Artificial Sequence: Synthetic oligonucleotide
cccgcaccttggcgcagcggtgg

SEQ ID NO: 81 - DNA, 20 bp, synthetic construct
  source 1..20: mol_type = other DNA; note = Description of Artificial Sequence: Synthetic oligonucleotide
caggttccatgggatgctct

SEQ ID NO: 82 - DNA, 20 bp, synthetic construct
  source 1..20: mol_type = other DNA; note = Description of Artificial Sequence: Synthetic oligonucleotide
ggtggctcaccagctccagc

SEQ ID NO: 83 - DNA, 20 bp, synthetic construct
  source 1..20: mol_type = other DNA; note = Description of Artificial Sequence: Synthetic oligonucleotide
ttggaaagacggaggcagcc

SEQ ID NO: 84 - DNA, 20 bp, synthetic construct
  source 1..20: mol_type = other DNA; note = Description of Artificial Sequence: Synthetic oligonucleotide
gaaagacggaggcagcctgg

SEQ ID NO: 85 - DNA, 20 bp, synthetic construct
  source 1..20: mol_type = other DNA; note = Description of Artificial Sequence: Synthetic oligonucleotide
tcccaggcctggagtttatt

SEQ ID NO: 86 - DNA, 20 bp, synthetic construct
  source 1..20: mol_type = other DNA; note = Description of Artificial Sequence: Synthetic oligonucleotide
agcacctacctcgggagctg

SEQ ID NO: 87 - DNA, 20 bp, synthetic construct
  source 1..20: mol_type = other DNA; note = Description of Artificial Sequence: Synthetic oligonucleotide
ctttccaggtcatcacagtt

SEQ ID NO: 88 - DNA, 20 bp, synthetic construct
  source 1..20: mol_type = other DNA; note = Description of Artificial Sequence: Synthetic oligonucleotide
cctttccaggtcatcacagt

SEQ ID NO: 89 - DNA, 20 bp, synthetic construct
  source 1..20: mol_type = other DNA; note = Description of Artificial Sequence: Synthetic oligonucleotide
tttccaggtcatcacagttg

SEQ ID NO: 90 - DNA, 20 bp, synthetic construct
  source 1..20: mol_type = other DNA; note = Description of Artificial Sequence: Synthetic oligonucleotide
cttacctgccccatgggtgc

SEQ ID NO: 91 - DNA, 20 bp, synthetic construct
  source 1..20: mol_type = other DNA; note = Description of Artificial Sequence: Synthetic oligonucleotide
taaggcccaagggggcaagc

SEQ ID NO: 92 - DNA, 20 bp, synthetic construct
  source 1..20: mol_type = other DNA; note = Description of Artificial Sequence: Synthetic oligonucleotide
cctcttcacctgctcctgag

SEQ ID NO: 93 - DNA, 20 bp, synthetic construct
  source 1..20: mol_type = other DNA; note = Description of Artificial Sequence: Synthetic oligonucleotide
gcctcttcacctgctcctga

SEQ ID NO: 94 - DNA, 20 bp, synthetic construct
  source 1..20: mol_type = other DNA; note = Description of Artificial Sequence: Synthetic oligonucleotide
ttcacctgctcctgaggggc

SEQ ID NO: 95 - DNA, 20 bp, synthetic construct
  source 1..20: mol_type = other DNA; note = Description of Artificial Sequence: Synthetic oligonucleotide
tcacctgctcctgaggggcc

SEQ ID NO: 96 - DNA, 20 bp, synthetic construct
  source 1..20: mol_type = other DNA; note = Description of Artificial Sequence: Synthetic oligonucleotide
cccaggctgcagctcccact

SEQ ID NO: 97 - DNA, 20 bp, synthetic construct
  source 1..20: mol_type = other DNA; note = Description of Artificial Sequence: Synthetic oligonucleotide
ccccaggctgcagctcccac

SEQ ID NO: 98 - DNA, 20 bp, synthetic construct
  source 1..20: mol_type = other DNA; note = Description of Artificial Sequence: Synthetic oligonucleotide
gcaggtgaccgtggcctgcg

SEQ ID NO: 99 - DNA, 20 bp, synthetic construct
  source 1..20: mol_type = other DNA; note = Description of Artificial Sequence: Synthetic oligonucleotide
ctcctttaggaggctggtgg

SEQ ID NO: 100 - DNA, 20 bp, synthetic construct
  source 1..20: mol_type = other DNA; note = Description of Artificial Sequence: Synthetic oligonucleotide
ttttcaggagaattttggtt

SEQ ID NO: 101 - DNA, 20 bp, synthetic construct
  source 1..20: mol_type = other DNA; note = Description of Artificial Sequence: Synthetic oligonucleotide
cttttcaggagaattttggt

SEQ ID NO: 102 - DNA, 20 bp, synthetic construct
  source 1..20: mol_type = other DNA; note = Description of Artificial Sequence: Synthetic oligonucleotide
taatttggcccttcgtctta

SEQ ID NO: 103 - DNA, 20 bp, synthetic construct
  source 1..20: mol_type = other DNA; note = Description of Artificial Sequence: Synthetic oligonucleotide
agactttgtccataagacga

SEQ ID NO: 104 - DNA, 20 bp, synthetic construct
  source 1..20: mol_type = other DNA; note = Description of Artificial Sequence: Synthetic oligonucleotide
gactttgtccataagacgaa

SEQ ID NO: 105 - DNA, 20 bp, synthetic construct
  source 1..20: mol_type = other DNA; note = Description of Artificial Sequence: Synthetic oligonucleotide
agccaatggcctccttcagt

SEQ ID NO: 106 - DNA, 20 bp, synthetic construct
  source 1..20: mol_type = other DNA; note = Description of Artificial Sequence: Synthetic oligonucleotide
tcccaactgaaggaggccat

SEQ ID NO: 107 - DNA, 20 bp, synthetic construct
  source 1..20: mol_type = other DNA; note = Description of Artificial Sequence: Synthetic oligonucleotide
ggcctccttcagttgggaca

SEQ ID NO: 108 - DNA, 20 bp, synthetic construct
  source 1..20: mol_type = other DNA; note = Description of Artificial Sequence: Synthetic oligonucleotide
gaccatgtcccaactgaagg

SEQ ID NO: 109 - DNA, 20 bp, synthetic construct
  source 1..20: mol_type = other DNA; note = Description of Artificial Sequence: Synthetic oligonucleotide
gccaatggcctccttcagtt

SEQ ID NO: 110 - DNA, 20 bp, synthetic construct
  source 1..20: mol_type = other DNA; note = Description of Artificial Sequence: Synthetic oligonucleotide
attgtcttgatcaattctgg

SEQ ID NO: 111 - DNA, 20 bp, synthetic construct
  source 1..20: mol_type = other DNA; note = Description of Artificial Sequence: Synthetic oligonucleotide
attctggaggaaataactag

SEQ ID NO: 112 - DNA, 20 bp, synthetic construct
  source 1..20: mol_type = other DNA; note = Description of Artificial Sequence: Synthetic oligonucleotide
tctgggtgttctggagtttc

SEQ ID NO: 113 - DNA, 20 bp, synthetic construct
  source 1..20: mol_type = other DNA; note = Description of Artificial Sequence: Synthetic oligonucleotide
aacatagcaaatcttgattt

SEQ ID NO: 114 - DNA, 20 bp, synthetic construct
  source 1..20: mol_type = other DNA; note = Description of Artificial Sequence: Synthetic oligonucleotide
gtagaattttttcttctagg

SEQ ID NO: 115 - DNA, 20 bp, synthetic construct
  source 1..20: mol_type = other DNA; note = Description of Artificial Sequence: Synthetic oligonucleotide
actacaagtcaaaaatgaag

SEQ ID NO: 116 - DNA, 20 bp, synthetic construct
  source 1..20: mol_type = other DNA; note = Description of Artificial Sequence: Synthetic oligonucleotide
tatattggtcttccacggtc

SEQ ID NO: 117 - DNA, 20 bp, synthetic construct
  source 1..20: mol_type = other DNA; note = Description of Artificial Sequence: Synthetic oligonucleotide
caaagaccttctccagaccg

SEQ ID NO: 118 - DNA, 20 bp, synthetic construct
  source 1..20: mol_type = other DNA; note = Description of Artificial Sequence: Synthetic oligonucleotide
ggtcttccacggtctggaga

SEQ ID NO: 119 - DNA, 20 bp, synthetic construct
  source 1..20: mol_type = other DNA; note = Description of Artificial Sequence: Synthetic oligonucleotide
ttgtttatattggtcttcca

SEQ ID NO: 120 - DNA, 20 bp, synthetic construct
  source 1..20: mol_type = other DNA; note = Description of Artificial Sequence: Synthetic oligonucleotide
cttttatttgactatgctgt

SEQ ID NO: 121 - DNA, 20 bp, synthetic construct
  source 1..20: mol_type = other DNA; note = Description of Artificial Sequence: Synthetic oligonucleotide
aaagtctggatatagagagt

SEQ ID NO: 122 - DNA, 20 bp, synthetic construct
  source 1..20: mol_type = other DNA; note = Description of Artificial Sequence: Synthetic oligonucleotide
gttggtttaattgtttatat

SEQ ID NO: 123 - DNA, 20 bp, synthetic construct
  source 1..20: mol_type = other DNA; note = Description of Artificial Sequence: Synthetic oligonucleotide
tgatggtaagacactttggt

SEQ ID NO: 124 - DNA, 20 bp, synthetic construct
  source 1..20: mol_type = other DNA; note = Description of Artificial Sequence: Synthetic oligonucleotide
ggagtagttcttggtgctct

SEQ ID NO: 125 - DNA, 20 bp, synthetic construct
  source 1..20: mol_type = other DNA; note = Description of Artificial Sequence: Synthetic oligonucleotide
aacatgatggtaagacactt

SEQ ID NO: 126 - DNA, 20 bp, synthetic construct
  source 1..20: mol_type = other DNA; note = Description of Artificial Sequence: Synthetic oligonucleotide
tgaagaaagggagtagttct

SEQ ID NO: 127 - DNA, 20 bp, synthetic construct
  source 1..20: mol_type = other DNA; note = Description of Artificial Sequence: Synthetic oligonucleotide
agttcttggtgctcttggct

SEQ ID NO: 128 - DNA, 20 bp, synthetic construct
  source 1..20: mol_type = other DNA; note = Description of Artificial Sequence: Synthetic oligonucleotide
atgatggtaagacactttgg

SEQ ID NO: 129 - DNA, 20 bp, synthetic construct
  source 1..20: mol_type = other DNA; note = Description of Artificial Sequence: Synthetic oligonucleotide
gaagatagagaaatttctgt

SEQ ID NO: 130 - DNA, 20 bp, synthetic construct
  source 1..20: mol_type = other DNA; note = Description of Artificial Sequence: Synthetic oligonucleotide
ggaagatagagaaatttctg

SEQ ID NO: 131 - DNA, 20 bp, synthetic construct
  source 1..20: mol_type = other DNA; note = Description of Artificial Sequence: Synthetic oligonucleotide
tatttcattcaactgaagaa

SEQ ID NO: 132 - DNA, 20 bp, synthetic construct
  source 1..20: mol_type = other DNA; note = Description of Artificial Sequence: Synthetic oligonucleotide
atttcattcaactgaagaaa

SEQ ID NO: 133 - DNA, 20 bp, synthetic construct
  source 1..20: mol_type = other DNA; note = Description of Artificial Sequence: Synthetic oligonucleotide
gtctactgtgatgttatatc

SEQ ID NO: 134 - DNA, 20 bp, synthetic construct
  source 1..20: mol_type = other DNA; note = Description of Artificial Sequence: Synthetic oligonucleotide
taaatggtggtacattcagc

SEQ ID NO: 135 - DNA, 20 bp, synthetic construct
  source 1..20: mol_type = other DNA; note = Description of Artificial Sequence: Synthetic oligonucleotide
tatcaggtaaaacctgtcta

SEQ ID NO: 136 - DNA, 20 bp, synthetic construct
  source 1..20: mol_type = other DNA; note = Description of Artificial Sequence: Synthetic oligonucleotide
tgtaccaccatttataacag

SEQ ID NO: 137 - DNA, 20 bp, synthetic construct
  source 1..20: mol_type = other DNA; note = Description of Artificial Sequence: Synthetic oligonucleotide
ttcacctctgttataaatgg

SEQ ID NO: 138 - DNA, 20 bp, synthetic construct
  source 1..20: mol_type = other DNA; note = Description of Artificial Sequence: Synthetic oligonucleotide
aacagaggtgaacatacaag

SEQ ID NO: 139 - DNA, 20 bp, synthetic construct
  source 1..20: mol_type = other DNA; note = Description of Artificial Sequence: Synthetic oligonucleotide
ttgagagttgctgggtctga

SEQ ID NO: 140 - DNA, 20 bp, synthetic construct
  source 1..20: mol_type = other DNA; note = Description of Artificial Sequence: Synthetic oligonucleotide
tgaaaaacttgagagttgct

SEQ ID NO: 141 - DNA, 20 bp, synthetic construct
  source 1..20: mol_type = other DNA; note = Description of Artificial Sequence: Synthetic oligonucleotide
ttaattcaacatcgaataga

SEQ ID NO: 142 - DNA, 20 bp, synthetic construct
  source 1..20: mol_type = other DNA; note = Description of Artificial Sequence: Synthetic oligonucleotide
tttgggaggcttgatggtaa

SEQ ID NO: 143 - DNA, 20 bp, synthetic construct
  source 1..20: mol_type = other DNA; note = Description of Artificial Sequence: Synthetic oligonucleotide
cattatattcaggtagtcca

SEQ ID NO: 144 - DNA, 20 bp, synthetic construct
  source 1..20: mol_type = other DNA; note = Description of Artificial Sequence: Synthetic oligonucleotide
ttgggaggcttgatggtaag

SEQ ID NO: 145 - DNA, 20 bp, synthetic construct
  source 1..20: mol_type = other DNA; note = Description of Artificial Sequence: Synthetic oligonucleotide
ttttgggaggcttgatggta

SEQ ID NO: 146 - DNA, 20 bp, synthetic construct
  source 1..20: mol_type = other DNA; note = Description of Artificial Sequence: Synthetic oligonucleotide
acaaaacttcaatgaaacgt

SEQ ID NO: 147 - DNA, 20 bp, synthetic construct
  source 1..20: mol_type = other DNA; note = Description of Artificial Sequence: Synthetic oligonucleotide
tatggttttgggaggcttga

SEQ ID NO: 148 - DNA, 20 bp, synthetic construct
  source 1..20: mol_type = other DNA; note = Description of Artificial Sequence: Synthetic oligonucleotide
actacaaatatggttttggg

SEQ ID NO: 149 - DNA, 20 bp, synthetic construct
  source 1..20: mol_type = other DNA; note = Description of Artificial Sequence: Synthetic oligonucleotide
gagaactacaaatatggttt

SEQ ID NO: 150 - DNA, 20 bp, synthetic construct
  source 1..20: mol_type = other DNA; note = Description of Artificial Sequence: Synthetic oligonucleotide
aggacacttcaactgtccag

SEQ ID NO: 151 - DNA, 20 bp, synthetic construct
  source 1..20: mol_type = other DNA; note = Description of Artificial Sequence: Synthetic oligonucleotide
gccgtcctcctcggaacgca

SEQ ID NO: 152 - DNA, 20 bp, synthetic construct
  source 1..20: mol_type = other DNA; note = Description of Artificial Sequence: Synthetic oligonucleotide
gctagccttgcgttccgagg

SEQ ID NO: 153 - DNA, 20 bp, synthetic construct
  source 1..20: mol_type = other DNA; note = Description of Artificial Sequence: Synthetic oligonucleotide
gcgttccgaggaggacggcc

SEQ ID NO: 154 - DNA, 20 bp, synthetic construct
  source 1..20: mol_type = other DNA; note = Description of Artificial Sequence: Synthetic oligonucleotide
gccttgcgttccgaggagga

SEQ ID NO: 155 - DNA, 20 bp, synthetic construct
  source 1..20: mol_type = other DNA; note = Description of Artificial Sequence: Synthetic oligonucleotide
ggacgaggacggcgactacg

SEQ ID NO: 156 - DNA, 20 bp, synthetic construct
  source 1..20: mol_type = other DNA; note = Description of Artificial Sequence: Synthetic oligonucleotide
ggacggcgactacgaggagc

SEQ ID NO: 157 - DNA, 20 bp, synthetic construct
  source 1..20: mol_type = other DNA; note = Description of Artificial Sequence: Synthetic oligonucleotide
cgtcctcgtcctcctgcgca

SEQ ID NO: 158 - DNA, 20 bp, synthetic construct
  source 1..20: mol_type = other DNA; note = Description of Artificial Sequence: Synthetic oligonucleotide
gtcctcgtcctcctgcgcac

SEQ ID NO: 159 - DNA, 20 bp, synthetic construct
  source 1..20: mol_type = other DNA; note = Description of Artificial Sequence: Synthetic oligonucleotide
ccgtcagctccaggcggtcc

SEQ ID NO: 160 - DNA, 20 bp, synthetic construct
  source 1..20: mol_type = other DNA; note = Description of Artificial Sequence: Synthetic oligonucleotide
cgcccgtgcgcaggaggacg

SEQ ID NO: 161 - DNA, 20 bp, synthetic construct
  source 1..20: mol_type = other DNA; note = Description of Artificial Sequence: Synthetic oligonucleotide
tcagctccaggcggtcctgg

SEQ ID NO: 162 - DNA, 20 bp, synthetic construct
  source 1..20: mol_type = other DNA; note = Description of Artificial Sequence: Synthetic oligonucleotide
cttggcgcagcggtggaagg

SEQ ID NO: 163 - DNA, 20 bp, synthetic construct
  source 1..20: mol_type = other DNA; note = Description of Artificial Sequence: Synthetic oligonucleotide
cgtgcgcaggaggacgagga

SEQ ID NO: 164 - DNA, 20 bp, synthetic construct
  source 1..20: mol_type = other DNA; note = Description of Artificial Sequence: Synthetic oligonucleotide
ccaggaccgcctggagctga

SEQ ID NO: 165 - DNA, 20 bp, synthetic construct
  source 1..20: mol_type = other DNA; note = Description of Artificial Sequence: Synthetic oligonucleotide
tcttggtgaggtatccccgg

SEQ ID NO: 166 - DNA, 20 bp, synthetic construct
  source 1..20: mol_type = other DNA; note = Description of Artificial Sequence: Synthetic oligonucleotide
cagtgcgctctgactgcgag

SEQ ID NO: 167 - DNA, 20 bp, synthetic construct
  source 1..20: mol_type = other DNA; note = Description of Artificial Sequence: Synthetic oligonucleotide
cttggtgaggtatccccggc

SEQ ID NO: 168 - DNA, 20 bp, synthetic construct
  source 1..20: mol_type = other DNA; note = Description of Artificial Sequence: Synthetic oligonucleotide
ggatcttggtgaggtatccc

SEQ ID NO: 169 - DNA, 20 bp, synthetic construct
  source 1..20: mol_type = other DNA; note = Description of Artificial Sequence: Synthetic oligonucleotide
gaagatgagtggcgacctgc

SEQ ID NO: 170 - DNA, 20 bp, synthetic construct
  source 1..20: mol_type = other DNA; note = Description of Artificial Sequence: Synthetic oligonucleotide
agcaccaccacgtaggtgcc

SEQ ID NO: 171 - DNA, 20 bp, synthetic construct
  source 1..20: mol_type = other DNA; note = Description of Artificial Sequence: Synthetic oligonucleotide
ggtcgccactcatcttcacc

SEQ ID NO: 172 - DNA, 20 bp, synthetic construct
  source 1..20: mol_type = other DNA; note = Description of Artificial Sequence: Synthetic oligonucleotide
ctccttcagcaccaccacgt

SEQ ID NO: 173 - DNA, 20 bp, synthetic construct
  source 1..20: mol_type = other DNA; note = Description of Artificial Sequence: Synthetic oligonucleotide
gagtggcgacctgctggagc

SEQ ID NO: 174 - DNA, 20 bp, synthetic construct
  source 1..20: mol_type = other DNA; note = Description of Artificial Sequence: Synthetic oligonucleotide
gcgcactgcccgccgcctgc

SEQ ID NO: 175 - DNA, 20 bp, synthetic construct
  source 1..20: mol_type = other DNA; note = Description of Artificial Sequence: Synthetic oligonucleotide
ggcttcctggtgaagatgag

SEQ ID NO: 176 - DNA, 20 bp, synthetic construct
  source 1..20: mol_type = other DNA; note = Description of Artificial Sequence: Synthetic oligonucleotide
cacctacgtggtggtgctga

SEQ ID NO: 177 - DNA, 20 bp, synthetic construct
  source 1..20: mol_type = other DNA; note = Description of Artificial Sequence: Synthetic oligonucleotide
ctacgtggtggtgctgaagg

SEQ ID NO: 178 - DNA, 20 bp, synthetic construct
  source 1..20: mol_type = other DNA; note = Description of Artificial Sequence: Synthetic oligonucleotide
atggaagacatgcaggatct

SEQ ID NO: 179 - DNA, 20 bp, synthetic construct
  source 1..20: mol_type = other DNA; note = Description of Artificial Sequence: Synthetic oligonucleotide
agacatgcaggatcttggtg

SEQ ID NO: 180 - DNA, 20 bp, synthetic construct
  source 1..20: mol_type = other DNA; note = Description of Artificial Sequence: Synthetic oligonucleotide
ctcatcttcaccaggaagcc

SEQ ID NO: 181 - DNA, 20 bp, synthetic construct
  source 1..20: mol_type = other DNA; note = Description of Artificial Sequence: Synthetic oligonucleotide
ctcctcgatgtagtcgacat

SEQ ID NO: 182 - DNA, 20 bp, synthetic construct
  source 1..20: mol_type = other DNA; note = Description of Artificial Sequence: Synthetic oligonucleotide
tattcatccgcccggtaccg

SEQ ID NO: 183 - DNA, 20 bp, synthetic construct
  source 1..20: mol_type = other DNA; note = Description of Artificial Sequence: Synthetic oligonucleotide
tcctcgatgtagtcgacatg

SEQ ID NO: 184 - DNA, 20 bp, synthetic construct
  source 1..20: mol_type = other DNA; note = Description of Artificial Sequence: Synthetic oligonucleotide
cctcctcgatgtagtcgaca

SEQ ID NO: 185 - DNA, 20 bp, synthetic construct
  source 1..20: mol_type = other DNA; note = Description of Artificial Sequence: Synthetic oligonucleotide
gccccatgtcgactacatcg

SEQ ID NO: 186 - DNA, 20 bp, synthetic construct
  source 1..20: mol_type = other DNA; note = Description of Artificial Sequence: Synthetic oligonucleotide
ccatgtcgactacatcgagg

SEQ ID NO: 187 - DNA, 20 bp, synthetic construct
  source 1..20: mol_type = other DNA; note = Description of Artificial Sequence: Synthetic oligonucleotide
ggggctggtattcatccgcc

SEQ ID NO: 188 - DNA, 20 bp, synthetic construct
  source 1..20: mol_type = other DNA; note = Description of Artificial Sequence: Synthetic oligonucleotide
gtcgacatggggcaacttca

SEQ ID NO: 189 - DNA, 20 bp, synthetic construct
  source 1..20: mol_type = other DNA; note = Description of Artificial Sequence: Synthetic oligonucleotide
accaccgggaaatcgagggc

SEQ ID NO: 190 - DNA, 20 bp, synthetic construct
  source 1..20: mol_type = other DNA; note = Description of Artificial Sequence: Synthetic oligonucleotide
gagtgaccaccgggaaatcg

SEQ ID NO: 191 - DNA, 20 bp, synthetic construct
  source 1..20: mol_type = other DNA; note = Description of Artificial Sequence: Synthetic oligonucleotide
agtgaccaccgggaaatcga

SEQ ID NO: 192 - DNA, 20 bp, synthetic construct
  source 1..20: mol_type = other DNA; note = Description of Artificial Sequence: Synthetic oligonucleotide
ccaccgggaaatcgagggca

SEQ ID NO: 193 - DNA, 20 bp, synthetic construct
  source 1..20: mol_type = other DNA; note = Description of Artificial Sequence: Synthetic oligonucleotide
gaagcgggtcccgtcctcct

SEQ ID NO: 194 - DNA, 20 bp, synthetic construct
  source 1..20: mol_type = other DNA; note = Description of Artificial Sequence: Synthetic oligonucleotide
ctaggagatacacctccacc

SEQ ID NO: 195 - DNA, 20 bp, synthetic construct
  source 1..20: mol_type = other DNA; note = Description of Artificial Sequence: Synthetic oligonucleotide
cagcatacagagtgaccacc

SEQ ID NO: 196 - DNA, 20 bp, synthetic construct
  source 1..20: mol_type = other DNA; note = Description of Artificial Sequence: Synthetic oligonucleotide
aagcgggtcccgtcctcctc

SEQ ID NO: 197 - DNA, 20 bp, synthetic construct
  source 1..20: mol_type = other DNA; note = Description of Artificial Sequence: Synthetic oligonucleotide
tgaccctgccctcgatttcc

SEQ ID NO: 198 - DNA, 20 bp, synthetic construct
  source 1..20: mol_type = other DNA; note = Description of Artificial Sequence: Synthetic oligonucleotide
cactctgtatgctggtgtct

SEQ ID NO: 199 - DNA, 20 bp, synthetic construct
  source 1..20: mol_type = other DNA; note = Description of Artificial Sequence: Synthetic oligonucleotide
ccctgccctcgatttcccgg

SEQ ID NO: 200 - DNA, 20 bp, synthetic construct
  source 1..20: mol_type = other DNA; note = Description of Artificial Sequence: Synthetic oligonucleotide
ccggtggtcactctgtatgc

SEQ ID NO: 201 - DNA, 20 bp, synthetic construct
  source 1..20: mol_type = other DNA; note = Description of Artificial Sequence: Synthetic oligonucleotide
ggaaatcgagggcagggtca

SEQ ID NO: 202 - DNA, 20 bp, synthetic construct
  source 1..20: mol_type = other DNA; note = Description of Artificial Sequence: Synthetic oligonucleotide
ccagcatacagagtgaccac

SEQ ID NO: 203 - DNA, 20 bp, synthetic construct
  source 1..20: mol_type = other DNA; note = Description of Artificial Sequence: Synthetic oligonucleotide
cttggcagttgagcacgcgc

SEQ ID NO: 204 - DNA, 20 bp, synthetic construct
  source 1..20: mol_type = other DNA; note = Description of Artificial Sequence: Synthetic oligonucleotide
ctgcgcgtgctcaactgcca

SEQ ID NO: 205 - DNA, 20 bp, synthetic construct
  source 1..20: mol_type = other DNA; note = Description of Artificial Sequence: Synthetic oligonucleotide
tgcgcgtgctcaactgccaa

SEQ ID NO: 206 - DNA, 20 bp, synthetic construct
  source 1..20: mol_type = other DNA; note = Description of Artificial Sequence: Synthetic oligonucleotide
cgggatgccggcgtggccaa

SEQ ID NO: 207 - DNA, 20 bp, synthetic construct
  source 1..20: mol_type = other DNA; note = Description of Artificial Sequence: Synthetic oligonucleotide
cgtgctcaactgccaaggga

SEQ ID NO: 208 - DNA, 20 bp, synthetic construct
  source 1..20: mol_type = other DNA; note = Description of Artificial Sequence: Synthetic oligonucleotide
ccttggccacgccggcatcc

SEQ ID NO: 209 - DNA, 20 bp, synthetic construct
  source 1..20: mol_type = other DNA; note = Description of Artificial Sequence: Synthetic oligonucleotide
cagcggccgggatgccggcg

SEQ ID NO: 210 - DNA, 20 bp, synthetic construct
  source 1..20: mol_type = other DNA; note = Description of Artificial Sequence: Synthetic oligonucleotide
ccgggatgccggcgtggcca

SEQ ID NO: 211 - DNA, 20 bp, synthetic construct
  source 1..20: mol_type = other DNA; note = Description of Artificial Sequence: Synthetic oligonucleotide
gtggtcagcggccgggatgc

SEQ ID NO: 212 - DNA, 20 bp, synthetic construct
  source 1..20: mol_type = other DNA; note = Description of Artificial Sequence: Synthetic oligonucleotide
cgctgaccacccctgccagg

SEQ ID NO: 213 - DNA, 20 bp, synthetic construct
  source 1..20: mol_type = other DNA; note = Description of Artificial Sequence: Synthetic oligonucleotide
ggcaggggtggtcagcggcc

SEQ ID NO: 214 - DNA, 20 bp, synthetic construct
  source 1..20: mol_type = other DNA; note = Description of Artificial Sequence: Synthetic oligonucleotide
gtgctcaactgccaagggaa

SEQ ID NO: 215 - DNA, 20 bp, synthetic construct
  source 1..20: mol_type = other DNA; note = Description of Artificial Sequence: Synthetic oligonucleotide
tcatggcacccacctggcag

SEQ ID NO: 216 - DNA, 20 bp, synthetic construct
  source 1..20: mol_type = other DNA; note = Description of Artificial Sequence: Synthetic oligonucleotide
tggcaggggtggtcagcggc

SEQ ID NO: 217 - DNA, 20 bp, synthetic construct
  source 1..20: mol_type = other DNA; note = Description of Artificial Sequence: Synthetic oligonucleotide
gctgaccacccctgccaggt

SEQ ID NO: 218 - DNA, 20 bp, synthetic construct
  source 1..20: mol_type = other DNA; note = Description of Artificial Sequence: Synthetic oligonucleotide
ggccgctgaccacccctgcc

SEQ ID NO: 219 - DNA, 20 bp, synthetic construct
  source 1..20: mol_type = other DNA; note = Description of Artificial Sequence: Synthetic oligonucleotide
ggcatcgtcccggaagttgc

SEQ ID NO: 220 - DNA, 20 bp, synthetic construct
  source 1..20: mol_type = other DNA; note = Description of Artificial Sequence: Synthetic oligonucleotide
ggcttttccgaataaactcc

SEQ ID NO: 221 - DNA, 20 bp, synthetic construct
  source 1..20: mol_type = other DNA; note = Description of Artificial Sequence: Synthetic oligonucleotide
gtcccggaagttgccggcag

SEQ ID NO: 222 - DNA, 20 bp, synthetic construct
  source 1..20: mol_type = other DNA; note = Description of Artificial Sequence: Synthetic oligonucleotide
cggctgtacccacccgccag

SEQ ID NO: 223 - DNA, 20 bp, synthetic construct
  source 1..20: mol_type = other DNA; note = Description of Artificial Sequence: Synthetic oligonucleotide
gtcgtgctggtcaccgctgc

SEQ ID NO: 224 - DNA, 20 bp, synthetic construct
  source 1..20: mol_type = other DNA; note = Description of Artificial Sequence: Synthetic oligonucleotide
agtagaggcaggcatcgtcc

SEQ ID NO: 225 - DNA, 20 bp, synthetic construct
  source 1..20: mol_type = other DNA; note = Description of Artificial Sequence: Synthetic oligonucleotide
tccgaataaactccaggcct

SEQ ID NO: 226 - DNA, 20 bp, synthetic construct
  source 1..20: mol_type = other DNA; note = Description of Artificial Sequence: Synthetic oligonucleotide
gtttattcggaaaagccagc

SEQ ID NO: 227 - DNA, 20 bp, synthetic construct
  source 1..20: mol_type = other DNA; note = Description of Artificial Sequence: Synthetic oligonucleotide
gcggctgtacccacccgcca

SEQ ID NO: 228 - DNA, 20 bp, synthetic construct
  source 1..20: mol_type = other DNA; note = Description of Artificial Sequence: Synthetic oligonucleotide
caccgctgccggcaacttcc

SEQ ID NO: 229 - DNA, 20 bp, synthetic construct
  source 1..20: mol_type = other DNA; note = Description of Artificial Sequence: Synthetic oligonucleotide
agccctcgccaggcgctggc

SEQ ID NO: 230 - DNA, 20 bp, synthetic construct
  source 1..20: mol_type = other DNA; note = Description of Artificial Sequence: Synthetic oligonucleotide
caacgccgcctgccagcgcc

SEQ ID NO: 231 - DNA, 20 bp, synthetic construct
  source 1..20: mol_type = other DNA; note = Description of Artificial Sequence: Synthetic oligonucleotide
gcacgaccccagccctcgcc

SEQ ID NO: 232 - DNA, 20 bp, synthetic construct
  source 1..20: mol_type = other DNA; note = Description of Artificial Sequence: Synthetic oligonucleotide
ccgcctgccagcgcctggcg

SEQ ID NO: 233 - DNA, 20 bp, synthetic construct
  source 1..20: mol_type = other DNA; note = Description of Artificial Sequence: Synthetic oligonucleotide
tgccagcgcctggcgagggc

SEQ ID NO: 234 - DNA, 20 bp, synthetic construct
  source 1..20: mol_type = other DNA; note = Description of Artificial Sequence: Synthetic oligonucleotide
tgctgctgcccctggcgggt

SEQ ID NO: 235 - DNA, 20 bp, synthetic construct
  source 1..20: mol_type = other DNA; note = Description of Artificial Sequence: Synthetic oligonucleotide
tcaccgctgccggcaacttc

SEQ ID NO: 236 - DNA, 20 bp, synthetic construct
  source 1..20: mol_type = other DNA; note = Description of Artificial Sequence: Synthetic oligonucleotide
ggcgagggctggggtcgtgc

SEQ ID NO: 237 - DNA, 20 bp, synthetic construct
  source 1..20: mol_type = other DNA; note = Description of Artificial Sequence: Synthetic oligonucleotide
ttccgaataaactccaggcc

SEQ ID NO: 238 - DNA, 20 bp, synthetic construct
  source 1..20: mol_type = other DNA; note = Description of Artificial Sequence: Synthetic oligonucleotide
gtgctgctgcccctggcggg

SEQ ID NO: 239 - DNA, 20 bp, synthetic construct
  source 1..20: mol_type = other DNA; note = Description of Artificial Sequence: Synthetic oligonucleotide
gccagcgcctggcgagggct

SEQ ID NO: 240 - DNA, 20 bp, synthetic construct
  source 1..20: mol_type = other DNA; note = Description of Artificial Sequence: Synthetic oligonucleotide
cctcgccaggcgctggcagg

SEQ ID NO: 241 - DNA, 20 bp, synthetic construct
  source 1..20: mol_type = other DNA; note = Description of Artificial Sequence: Synthetic oligonucleotide
gagatacctgagtaactttc

SEQ ID NO: 242 - DNA, 20 bp, synthetic construct
  source 1..20: mol_type = other DNA; note = Description of Artificial Sequence: Synthetic oligonucleotide
acgtgggagaactacaaata

SEQ ID NO: 243 - DNA, 20 bp, synthetic construct
  source 1..20: mol_type = other DNA; note = Description of Artificial Sequence: Synthetic oligonucleotide
cgatgttgaattaatgtcca

SEQ ID NO: 244 - DNA, 20 bp, synthetic construct
  source 1..20: mol_type = other DNA; note = Description of Artificial Sequence: Synthetic oligonucleotide
cacaaaacttcaatgaaacg

SEQ ID NO: 245 - DNA, 20 bp, synthetic construct
  source 1..20: mol_type = other DNA; note = Description of Artificial Sequence: Synthetic oligonucleotide
tacgaattgagttggaagac

SEQ ID NO: 246 - DNA, 20 bp, synthetic construct
  source 1..20: mol_type = other DNA; note = Description of Artificial Sequence: Synthetic oligonucleotide
ctatggagtatatcttctct

SEQ ID NO: 247 - DNA, 19 bp, synthetic construct
  source 1..19: mol_type = other DNA; note = Description of Artificial Sequence: Synthetic oligonucleotide
ccgcaccttggcgcagcgg

SEQ ID NO: 248 - DNA, 19 bp, synthetic construct
  source 1..19: mol_type = other DNA; note = Description of Artificial Sequence: Synthetic oligonucleotide
agatacctgaataaccctc

SEQ ID NO: 249 - DNA, 18 bp, synthetic construct
  source 1..18: mol_type = other DNA; note = Description of Artificial Sequence: Synthetic oligonucleotide
gatacctgaataaccctc

SEQ ID NO: 250 - DNA, 17 bp, synthetic construct
  source 1..17: mol_type = other DNA; note = Description of Artificial Sequence: Synthetic oligonucleotide
atacctgaataaccctc

SEQ ID NO: 251 - DNA, 20 bp, synthetic construct
  source 1..20: mol_type = other DNA; note = Description of Artificial Sequence: Synthetic oligonucleotide
ggctgatgaggccgcacatg

SEQ ID NO: 252 - DNA, 20 bp, synthetic construct
  source 1..20: mol_type = other DNA; note = Description of Artificial Sequence: Synthetic oligonucleotide
cgcctgccagcgcctggcga

SEQ ID NO: 253 - RNA, 100 nt, synthetic construct
  source 1..100: mol_type = other RNA; note = Description of Artificial Sequence: Synthetic polynucleotide
  modified_base 1: mod_base = OTHER; note = guanosine phosphorothioate
  modified_base 2: mod_base = OTHER; note = guanosine phosphorothioate
  modified_base 3: mod_base = OTHER; note = uridine phosphorothioate
  modified_base 29: mod_base = OTHER; note = 2'-O-Methyl-guanosine
  modified_base 30: mod_base = OTHER; note = 2'-O-Methyl-cytidine
  modified_base 31: mod_base = OTHER; note = 2'-O-Methyl-uridine
  modified_base 32: mod_base = OTHER; note = 2'-O-Methyl-adenosine
  modified_base 33: mod_base = OTHER; note = 2'-O-Methyl-guanosine
  modified_base 34: mod_base = OTHER; note = 2'-O-Methyl-adenosine
  modified_base 35: mod_base = OTHER; note = 2'-O-Methyl-adenosine
  modified_base 36: mod_base = OTHER; note = 2'-O-Methyl-adenosine
  modified_base 37: mod_base = OTHER; note = 2'-O-Methyl-uridine
  modified_base 38: mod_base = OTHER; note = 2'-O-Methyl-adenosine
  modified_base 39: mod_base = OTHER; note = 2'-O-Methyl-guanosine
  modified_base 40: mod_base = OTHER; note = 2'-O-Methyl-cytidine
  modified_base 69: mod_base = OTHER; note = 2'-O-Methyl-adenosine
  modified_base 70: mod_base = OTHER; note = 2'-O-Methyl-cytidine
  modified_base 71: mod_base = OTHER; note = 2'-O-Methyl-uridine
  modified_base 72: mod_base = OTHER; note = 2'-O-Methyl-uridine
  modified_base 73: mod_base = OTHER; note = 2'-O-Methyl-guanosine
  modified_base 74: mod_base = OTHER; note = 2'-O-Methyl-adenosine
  modified_base 75: mod_base = OTHER; note = 2'-O-Methyl-adenosine
  modified_base 76: mod_base = OTHER; note = 2'-O-Methyl-adenosine
  modified_base 77: mod_base = OTHER; note = 2'-O-Methyl-adenosine
  modified_base 78: mod_base = OTHER; note = 2'-O-Methyl-adenosine
  modified_base 79: mod_base = OTHER; note = 2'-O-Methyl-guanosine
  modified_base 80: mod_base = OTHER; note = 2'-O-Methyl-uridine
  modified_base 81: mod_base = OTHER; note = 2'-O-Methyl-guanosine
  modified_base 82: mod_base = OTHER; note = 2'-O-Methyl-guanosine
  modified_base 83: mod_base = OTHER; note = 2'-O-Methyl-cytidine
  modified_base 84: mod_base = OTHER; note = 2'-O-Methyl-adenosine
  modified_base 85: mod_base = OTHER; note = 2'-O-Methyl-cytidine
  modified_base 86: mod_base = OTHER; note = 2'-O-Methyl-cytidine
  modified_base 87: mod_base = OTHER; note = 2'-O-Methyl-guanosine
  modified_base 88: mod_base = OTHER; note = 2'-O-Methyl-adenosine
  modified_base 89: mod_base = OTHER; note = 2'-O-Methyl-guanosine
  modified_base 90: mod_base = OTHER; note = 2'-O-Methyl-uridine
  modified_base 91: mod_base = OTHER; note = 2'-O-Methyl-cytidine
  modified_base 92: mod_base = OTHER; note = 2'-O-Methyl-guanosine
  modified_base 93: mod_base = OTHER; note = 2'-O-Methyl-guanosine
  modified_base 94: mod_base = OTHER; note = 2'-O-Methyl-uridine
  modified_base 95: mod_base = OTHER; note = 2'-O-Methyl-guanosine
  modified_base 96: mod_base = OTHER; note = 2'-O-Methyl-cytidine
  modified_base 97: mod_base = OTHER; note = 2'-O-Methyl-uridine phosphorothioate
  modified_base 98: mod_base = OTHER; note = 2'-O-Methyl-uridine phosphorothioate
  modified_base 99: mod_base = OTHER; note = 2'-O-Methyl-uridine phosphorothioate
  modified_base 100: mod_base = OTHER; note = 2'-O-Methyl-uridine
ggtgctagccttgcgttccggttttagagctagaaatagcaagttaaaataaggctagtccgttatcaacttgaaaaagtggcaccgagtcggtgctttt

SEQ ID NO: 254 - RNA, 100 nt, synthetic construct; identical to SEQ ID NO: 253
  source 1..100: mol_type = other RNA; note = Description of Artificial Sequence: Synthetic polynucleotide
  modified_base 1: mod_base = OTHER; note = 2'-O-Methyl-guanosine phosphorothioate
  modified_base 2: mod_base = OTHER; note = 2'-O-Methyl-guanosine phosphorothioate
  modified_base 3: mod_base = OTHER; note = 2'-O-Methyl-uridine phosphorothioate
  modified_base 25: mod_base = OTHER; note = uridine phosphorothioate
  modified_base 29: mod_base = OTHER; note = 2'-O-Methyl-guanosine
  modified_base 30: mod_base = OTHER; note = 2'-O-Methyl-cytidine
  modified_base 31: mod_base = OTHER; note = 2'-O-Methyl-uridine
  modified_base 32: mod_base = OTHER; note = 2'-O-Methyl-adenosine
  modified_base 33: mod_base = OTHER; note = 2'-O-Methyl-guanosine
  modified_base 34: mod_base = OTHER; note = 2'-O-Methyl-adenosine
  modified_base 35: mod_base = OTHER; note = 2'-O-Methyl-adenosine
  modified_base 36: mod_base = OTHER; note = 2'-O-Methyl-adenosine
  modified_base 37: mod_base = OTHER; note = 2'-O-Methyl-uridine
  modified_base 38: mod_base = OTHER; note = 2'-O-Methyl-adenosine
  modified_base 39: mod_base = OTHER; note = 2'-O-Methyl-guanosine
  modified_base 40: mod_base = OTHER; note = 2'-O-Methyl-cytidine
  modified_base 45: mod_base = OTHER; note = uridine phosphorothioate
  modified_base 50: mod_base = OTHER; note = uridine phosphorothioate
  modified_base 56: mod_base = OTHER; note = uridine phosphorothioate
  modified_base 64: mod_base = OTHER; note = uridine phosphorothioate
  modified_base 67: mod_base = OTHER; note = cytidine phosphorothioate
  modified_base 69: mod_base = OTHER; note = 2'-O-Methyl-adenosine
  modified_base 70: mod_base = OTHER; note = 2'-O-Methyl-cytidine
  modified_base 71: mod_base = OTHER; note = 2'-O-Methyl-uridine
  modified_base 72: mod_base = OTHER; note = 2'-O-Methyl-uridine
  modified_base 73: mod_base = OTHER; note = 2'-O-Methyl-guanosine
  modified_base 74: mod_base = OTHER; note = 2'-O-Methyl-adenosine
  modified_base 75: mod_base = OTHER; note = 2'-O-Methyl-adenosine
  modified_base 76: mod_base = OTHER; note = 2'-O-Methyl-adenosine
  modified_base 77: mod_base = OTHER; note = 2'-O-Methyl-adenosine
  modified_base 78: mod_base = OTHER; note = 2'-O-Methyl-adenosine
  modified_base 79: mod_base = OTHER; note = 2'-O-Methyl-guanosine
  modified_base 80: mod_base = OTHER; note = 2'-O-Methyl-uridine
  modified_base 81: mod_base = OTHER; note = 2'-O-Methyl-guanosine
  modified_base 82: mod_base = OTHER; note = 2'-O-Methyl-guanosine
  modified_base 83: mod_base = OTHER; note = 2'-O-Methyl-cytidine
  modified_base 84: mod_base = OTHER; note = 2'-O-Methyl-adenosine
  modified_base 85: mod_base = OTHER; note = 2'-O-Methyl-cytidine
  modified_base 86: mod_base = OTHER; note = 2'-O-Methyl-cytidine
  modified_base 87: mod_base = OTHER; note = 2'-O-Methyl-guanosine
  modified_base 88: mod_base = OTHER; note = 2'-O-Methyl-adenosine
  modified_base 89: mod_base = OTHER; note = 2'-O-Methyl-guanosine
  modified_base 90: mod_base = OTHER; note = 2'-O-Methyl-uridine
  modified_base 91: mod_base = OTHER; note = 2'-O-Methyl-cytidine
  modified_base 92: mod_base = OTHER; note = 2'-O-Methyl-guanosine
  modified_base 93: mod_base = OTHER; note = 2'-O-Methyl-guanosine
  modified_base 94: mod_base = OTHER; note = 2'-O-Methyl-uridine
  modified_base 95: mod_base = OTHER; note = 2'-O-Methyl-guanosine
  modified_base 96: mod_base = OTHER; note = 2'-O-Methyl-cytidine
  modified_base 97: mod_base = OTHER; note = 2'-O-Methyl-uridine phosphorothioate
  modified_base 98: mod_base = OTHER; note = 2'-O-Methyl-uridine phosphorothioate
  modified_base 99: mod_base = OTHER; note = 2'-O-Methyl-uridine phosphorothioate
  modified_base 100: mod_base = OTHER; note = 2'-O-Methyl-uridine

SEQ ID NO: 255 - RNA, 101 nt, synthetic construct
  source 1..101: mol_type = other RNA; note = Description of Artificial Sequence: Synthetic polynucleotide
  modified_base 1: mod_base = OTHER; note = 2'-O-Methyl-guanosine phosphorothioate
  modified_base 2: mod_base = OTHER; note = 2'-O-Methyl-guanosine phosphorothioate
  modified_base 3: mod_base = OTHER; note = 2'-O-Methyl-uridine phosphorothioate
  modified_base 21: mod_base = OTHER; note = 2'-O-Methyl-guanosine
  modified_base 28: mod_base = OTHER; note = 2'-O-Methyl-adenosine
  modified_base 29: mod_base = OTHER; note = 2'-O-Methyl-guanosine
  modified_base 30: mod_base = OTHER; note = 2'-O-Methyl-cytidine
  modified_base 31: mod_base = OTHER; note = 2'-O-Methyl-uridine
  modified_base 32: mod_base = OTHER; note = 2'-O-Methyl-adenosine
  modified_base 33: mod_base = OTHER; note = 2'-O-Methyl-guanosine
  modified_base 34: mod_base = OTHER; note = 2'-O-Methyl-adenosine
  modified_base 35: mod_base = OTHER; note = 2'-O-Methyl-adenosine
  modified_base 36: mod_base = OTHER; note = 2'-O-Methyl-adenosine
  modified_base 37: mod_base = OTHER; note = 2'-O-Methyl-uridine
  modified_base 38: mod_base = OTHER; note = 2'-O-Methyl-adenosine
  modified_base 39: mod_base = OTHER; note = 2'-O-Methyl-guanosine
  modified_base 40: mod_base = OTHER; note = 2'-O-Methyl-cytidine
  modified_base 41: mod_base = OTHER; note = 2'-O-Methyl-adenosine
  modified_base 42: mod_base = OTHER; note = 2'-O-Methyl-adenosine
  modified_base 46: mod_base = OTHER; note = 2'-O-Methyl-adenosine
  modified_base 48: mod_base = OTHER; note = 2'-O-Methyl-adenosine
  modified_base 50: mod_base = OTHER; note = 2'-O-Methyl-uridine
  modified_base 52: mod_base = OTHER; note = 2'-O-Methyl-adenosine
  modified_base 53: mod_base = OTHER; note = 2'-O-Methyl-guanosine
  modified_base 54: mod_base = OTHER; note = 2'-O-Methyl-guanosine
  modified_base 55: mod_base = OTHER; note = 2'-O-Methyl-cytidine
  modified_base 56: mod_base = OTHER; note = 2'-O-Methyl-uridine
  modified_base 57: mod_base = OTHER; note = 2'-O-Methyl-adenosine
  modified_base 60: mod_base = OTHER; note = 2'-O-Methyl-cytidine
  modified_base 61: mod_base = OTHER; note = 2'-O-Methyl-cytidine
  modified_base 66: mod_base = OTHER; note = 2'-O-Methyl-uridine
  modified_base 67: mod_base = OTHER; note = 2'-O-Methyl-cytidine
  modified_base 70: mod_base = OTHER; note = 2'-O-Methyl-cytidine
  modified_base 71: mod_base = OTHER; note = 2'-O-Methyl-uridine
  modified_base 72: mod_base = OTHER; note = 2'-O-Methyl-uridine
  modified_base 73: mod_base = OTHER; note = 2'-O-Methyl-guanosine
  modified_base 74: mod_base = OTHER; note = 2'-O-Methyl-adenosine
  modified_base 75: mod_base = OTHER; note = 2'-O-Methyl-adenosine
  modified_base 76: mod_base = OTHER; note = 2'-O-Methyl-adenosine
  modified_base 77: mod_base = OTHER; note = 2'-O-Methyl-adenosine
  modified_base 78: mod_base = OTHER; note = 2'-O-Methyl-adenosine
  modified_base 79: mod_base = OTHER; note = 2'-O-Methyl-guanosine
  modified_base 80: mod_base = OTHER; note = 2'-O-Methyl-uridine
  modified_base 81: mod_base = OTHER; note = 2'-O-Methyl-guanosine
  modified_base 83: mod_base = OTHER; note = 2'-O-Methyl-cytidine
  modified_base 84: mod_base = OTHER; note = 2'-O-Methyl-adenosine
  modified_base 85: mod_base = OTHER; note = 2'-O-Methyl-cytidine
  modified_base 86: mod_base = OTHER; note = 2'-O-Methyl-cytidine
  modified_base 87: mod_base = OTHER; note = 2'-O-Methyl-guanosine
  modified_base 88: mod_base = OTHER; note = 2'-O-Methyl-adenosine
  modified_base 89: mod_base = OTHER; note = 2'-O-Methyl-guanosine
  modified_base 90: mod_base = OTHER; note = 2'-O-Methyl-uridine
  modified_base 91: mod_base = OTHER; note = 2'-O-Methyl-cytidine
  modified_base 92: mod_base = OTHER; note = 2'-O-Methyl-guanosine
  modified_base 93: mod_base = OTHER; note = 2'-O-Methyl-guanosine
  modified_base 94: mod_base = OTHER; note = 2'-O-Methyl-uridine
  modified_base 95: mod_base = OTHER; note = 2'-O-Methyl-guanosine
  modified_base 96: mod_base = OTHER; note = 2'-O-Methyl-cytidine
  modified_base 97: mod_base = OTHER; note = 2'-O-Methyl-uridine
  modified_base 98: mod_base = OTHER; note = 2'-O-Methyl-uridine
  modified_base 99: mod_base = OTHER; note = 2'-O-Methyl-uridine
  modified_base 100: mod_base = OTHER; note = 2'-O-Methyl-uridine
  modified_base 101: mod_base = OTHER; note = 2'-O-Methyl-uridine
ggtgctagccttgcgttccggttttagagctagaaatagcaagttaaaataaggctagtccgttatcaacttgaaaaagtggcaccgagtcggtgcttttt

SEQ ID NO: 256 - RNA, 100 nt, synthetic construct; identical to SEQ ID NO: 253
  source 1..100: mol_type = other RNA; note = Description of Artificial Sequence: Synthetic polynucleotide
  modified_base 1: mod_base = OTHER; note = 2'-O-Methyl-guanosine phosphorothioate
  modified_base 2: mod_base = OTHER; note = 2'-O-Methyl-guanosine phosphorothioate
  modified_base 3: mod_base = OTHER; note = 2'-O-Methyl-uridine phosphorothioate
  modified_base 21: mod_base = OTHER; note = 2'-O-Methyl-guanosine
  modified_base 28: mod_base = OTHER; note = 2'-O-Methyl-adenosine
  modified_base 29: mod_base = OTHER; note = 2'-O-Methyl-guanosine
  modified_base 30: mod_base = OTHER; note = 2'-O-Methyl-cytidine
  modified_base 31: mod_base = OTHER; note = 2'-O-Methyl-uridine
  modified_base 32: mod_base = OTHER; note = 2'-O-Methyl-adenosine
  modified_base 33: mod_base = OTHER; note = 2'-O-Methyl-guanosine
  modified_base 34: mod_base = OTHER; note = 2'-O-Methyl-adenosine
  modified_base 35: mod_base = OTHER; note = 2'-O-Methyl-adenosine
  modified_base 36: mod_base = OTHER; note = 2'-O-Methyl-adenosine
  modified_base 37: mod_base = OTHER; note = 2'-O-Methyl-uridine
  modified_base 38: mod_base = OTHER; note = 2'-O-Methyl-adenosine
  modified_base 39: mod_base = OTHER; note = 2'-O-Methyl-guanosine
  modified_base 40: mod_base = OTHER; note = 2'-O-Methyl-cytidine
  modified_base 41: mod_base = OTHER; note = 2'-O-Methyl-adenosine
  modified_base 42: mod_base = OTHER; note = 2'-O-Methyl-adenosine
  modified_base 45: mod_base = OTHER; note = uridine phosphorothioate
  modified_base 46: mod_base = OTHER; note = 2'-O-Methyl-adenosine
  modified_base 48: mod_base = OTHER; note = 2'-O-Methyl-adenosine
  modified_base 50: mod_base = OTHER; note = 2'-O-Methyl-uridine
  modified_base 52: mod_base = OTHER; note = 2'-O-Methyl-adenosine
  modified_base 53: mod_base = OTHER; note = 2'-O-Methyl-guanosine
  modified_base 54: mod_base = OTHER; note = 2'-O-Methyl-guanosine
  modified_base 55: mod_base = OTHER; note = 2'-O-Methyl-cytidine
  modified_base 56: mod_base = OTHER; note = 2'-O-Methyl-uridine
  modified_base 57: mod_base = OTHER; note = 2'-O-Methyl-adenosine
  modified_base 60: mod_base = OTHER; note = 2'-O-Methyl-cytidine
  modified_base 61: mod_base = OTHER; note = 2'-O-Methyl-cytidine
  modified_base 64: mod_base = OTHER; note = uridine phosphorothioate
  modified_base 66: mod_base = OTHER; note = 2'-O-Methyl-uridine
  modified_base 67: mod_base = OTHER; note = 2'-O-Methyl-cytidine
  modified_base 70: mod_base = OTHER; note = 2'-O-Methyl-cytidine
  modified_base 71: mod_base = OTHER; note = 2'-O-Methyl-uridine
  modified_base 72: mod_base = OTHER; note = 2'-O-Methyl-uridine
  modified_base 73: mod_base = OTHER; note = 2'-O-Methyl-guanosine
  modified_base 74: mod_base = OTHER; note = 2'-O-Methyl-adenosine
  modified_base 75: mod_base = OTHER; note = 2'-O-Methyl-adenosine
  modified_base 76: mod_base = OTHER; note = 2'-O-Methyl-adenosine
  modified_base 77: mod_base = OTHER; note = 2'-O-Methyl-adenosine
  modified_base 78: mod_base = OTHER; note = 2'-O-Methyl-adenosine
  modified_base 79: mod_base = OTHER; note = 2'-O-Methyl-guanosine
  modified_base 80: mod_base = OTHER; note = 2'-O-Methyl-uridine
  modified_base 81: mod_base = OTHER; note = 2'-O-Methyl-guanosine
  modified_base 83: mod_base = OTHER; note = 2'-O-Methyl-cytidine
  modified_base 84: mod_base = OTHER; note = 2'-O-Methyl-adenosine
  modified_base 85: mod_base = OTHER; note = 2'-O-Methyl-cytidine
  modified_base 86: mod_base = OTHER; note = 2'-O-Methyl-cytidine
  modified_base 87: mod_base = OTHER; note = 2'-O-Methyl-guanosine
  modified_base 88: mod_base = OTHER; note = 2'-O-Methyl-adenosine
  modified_base 89: mod_base = OTHER; note = 2'-O-Methyl-guanosine
  modified_base 90: mod_base = OTHER; note = 2'-O-Methyl-uridine
  modified_base 91: mod_base = OTHER; note = 2'-O-Methyl-cytidine
  modified_base 92: mod_base = OTHER; note = 2'-O-Methyl-guanosine
  modified_base 93: mod_base = OTHER; note = 2'-O-Methyl-guanosine
  modified_base 94: mod_base = OTHER; note = 2'-O-Methyl-uridine
  modified_base 95: mod_base = OTHER; note = 2'-O-Methyl-guanosine
  modified_base 96: mod_base = OTHER; note = 2'-O-Methyl-cytidine
  modified_base 97: mod_base = OTHER; note = 2'-O-Methyl-uridine phosphorothioate
  modified_base 98: mod_base = OTHER; note = 2'-O-Methyl-uridine phosphorothioate
  modified_base 99: mod_base = OTHER; note = 2'-O-Methyl-uridine phosphorothioate
  modified_base 100: mod_base = OTHER; note = 2'-O-Methyl-uridine

SEQ ID NO: 257 - RNA, 100 nt, synthetic construct
  source 1..100: mol_type = other RNA; note = Description of Artificial Sequence: Synthetic polynucleotide
  modified_base 1: mod_base = OTHER; note = 2'-O-Methyl-adenosine phosphorothioate
  modified_base 2: mod_base = OTHER; note = 2'-O-Methyl-adenosine phosphorothioate
  modified_base 3: mod_base = OTHER; note = 2'-O-Methyl-guanosine phosphorothioate
  modified_base 29: mod_base = OTHER; note = 2'-O-Methyl-guanosine
  modified_base 30: mod_base = OTHER; note = 2'-O-Methyl-cytidine
  modified_base 31: mod_base = OTHER; note = 2'-O-Methyl-uridine
  modified_base 32: mod_base = OTHER; note = 2'-O-Methyl-adenosine
  modified_base 33: mod_base = OTHER; note = 2'-O-Methyl-guanosine
  modified_base 34: mod_base = OTHER; note = 2'-O-Methyl-adenosine
  modified_base 35: mod_base = OTHER; note = 2'-O-Methyl-adenosine
  modified_base 36: mod_base = OTHER; note = 2'-O-Methyl-adenosine
  modified_base 37: mod_base = OTHER; note = 2'-O-Methyl-uridine
  modified_base 38: mod_base = OTHER; note = 2'-O-Methyl-adenosine
  modified_base 39: mod_base = OTHER; note = 2'-O-Methyl-guanosine
  modified_base 40: mod_base = OTHER; note = 2'-O-Methyl-cytidine
  modified_base 69: mod_base = OTHER; note = 2'-O-Methyl-adenosine
  modified_base 70: mod_base = OTHER; note = 2'-O-Methyl-cytidine
  modified_base 71: mod_base = OTHER; note = 2'-O-Methyl-uridine
  modified_base 72: mod_base = OTHER; note = 2'-O-Methyl-uridine
  modified_base 73: mod_base = OTHER; note = 2'-O-Methyl-guanosine
  modified_base 74: mod_base = OTHER; note = 2'-O-Methyl-adenosine
  modified_base 75: mod_base = OTHER; note = 2'-O-Methyl-adenosine
  modified_base 76: mod_base = OTHER; note = 2'-O-Methyl-adenosine
  modified_base 77: mod_base = OTHER; note = 2'-O-Methyl-adenosine
  modified_base 78: mod_base = OTHER; note = 2'-O-Methyl-adenosine
  modified_base 79: mod_base = OTHER; note = 2'-O-Methyl-guanosine
  modified_base 80: mod_base = OTHER; note = 2'-O-Methyl-uridine
  modified_base 81: mod_base = OTHER; note = 2'-O-Methyl-guanosine
  modified_base 82: mod_base = OTHER; note = 2'-O-Methyl-guanosine
  modified_base 83: mod_base = OTHER; note = 2'-O-Methyl-cytidine
  modified_base 84: mod_base = OTHER; note = 2'-O-Methyl-adenosine
  modified_base 85: mod_base = OTHER; note = 2'-O-Methyl-cytidine
  modified_base 86: mod_base = OTHER; note = 2'-O-Methyl-cytidine
  modified_base 87: mod_base = OTHER; note = 2'-O-Methyl-guanosine
  modified_base 88: mod_base = OTHER; note = 2'-O-Methyl-adenosine
  modified_base 89: mod_base = OTHER; note = 2'-O-Methyl-guanosine
  modified_base 90: mod_base = OTHER; note = 2'-O-Methyl-uridine
  modified_base 91: mod_base = OTHER; note = 2'-O-Methyl-cytidine
  modified_base 92: mod_base = OTHER; note = 2'-O-Methyl-guanosine
  modified_base 93: mod_base = OTHER; note = 2'-O-Methyl-guanosine
  modified_base 94: mod_base = OTHER; note = 2'-O-Methyl-uridine
  modified_base 95: mod_base = OTHER; note = 2'-O-Methyl-guanosine
  modified_base 96: mod_base = OTHER; note = 2'-O-Methyl-cytidine
  modified_base 97: mod_base = OTHER; note = 2'-O-Methyl-uridine phosphorothioate
  modified_base 98: mod_base = OTHER; note = 2'-O-Methyl-uridine phosphorothioate
  modified_base 99: mod_base = OTHER; note = 2'-O-Methyl-uridine phosphorothioate
  modified_base 100: mod_base = OTHER; note = 2'-O-Methyl-uridine
aagatacctgaataactctcgttttagagctagaaatagcaagttaaaataaggctagtccgttatcaacttgaaaaagtggcaccgagtcggtgctttt

SEQ ID NO: 258 - RNA, 100 nt, synthetic construct
  source 1..100: mol_type = other RNA; note = Description of Artificial Sequence: Synthetic polynucleotide
  modified_base 1: mod_base = OTHER; note = 2'-O-Methyl-guanosine phosphorothioate
  modified_base 2: mod_base = OTHER; note = 2'-O-Methyl-guanosine phosphorothioate
  modified_base 3: mod_base = OTHER; note = 2'-O-Methyl-uridine phosphorothioate
  modified_base 97: mod_base = OTHER; note = uridine phosphorothioate
  modified_base 98: mod_base = OTHER; note = 2'-O-Methyl-uridine phosphorothioate
  modified_base 99: mod_base = OTHER; note = 2'-O-Methyl-uridine phosphorothioate
  modified_base 100: mod_base = OTHER; note = 2'-O-Methyl-uridine
ggtggctcaccagctccagcgttttagagctagaaatagcaagttaaaataaggctagtccgttatcaacttgaaaaagtggcaccgagtcggtgctttt

SEQ ID NO: 259 - RNA, 100 nt, synthetic construct
  source 1..100: mol_type = other RNA; note = Description of Artificial Sequence: Synthetic polynucleotide
  modified_base 1: mod_base = OTHER; note = 2'-O-Methyl-guanosine phosphorothioate
  modified_base 2: mod_base = OTHER; note = 2'-O-Methyl-cytidine phosphorothioate
  modified_base 3: mod_base = OTHER; note = 2'-O-Methyl-uridine phosphorothioate
  modified_base 97: mod_base = OTHER; note = uridine phosphorothioate
  modified_base 98: mod_base = OTHER; note = 2'-O-Methyl-uridine phosphorothioate
  modified_base 99: mod_base = OTHER; note = 2'-O-Methyl-uridine phosphorothioate
  modified_base 100: mod_base = OTHER; note = 2'-O-Methyl-uridine
gcttacctgtctgtggaagcgttttagagctagaaatagcaagttaaaataaggctagtccgttatcaacttgaaaaagtggcaccgagtcggtgctttt

SEQ ID NO: 260 - RNA, 100 nt, synthetic construct
  source 1..100: mol_type = other RNA; note = Description of Artificial Sequence: Synthetic polynucleotide
  modified_base 1: mod_base = OTHER; note = 2'-O-Methyl-uridine phosphorothioate
  modified_base 2: mod_base = OTHER; note = 2'-O-Methyl-guanosine phosphorothioate
  modified_base 3: mod_base = OTHER; note = 2'-O-Methyl-cytidine phosphorothioate
  modified_base 97: mod_base = OTHER; note = uridine phosphorothioate
  modified_base 98: mod_base = OTHER; note = 2'-O-Methyl-uridine phosphorothioate
  modified_base 99: mod_base = OTHER; note = 2'-O-Methyl-uridine phosphorothioate
  modified_base 100: mod_base = OTHER; note = 2'-O-Methyl-uridine
tgcttacctgtctgtggaaggttttagagctagaaatagcaagttaaaataaggctagtccgttatcaacttgaaaaagtggcaccgagtcggtgctttt

SEQ ID NO: 261 - RNA, 100 nt, synthetic construct
  source 1..100: mol_type = other RNA; note = Description of Artificial Sequence: Synthetic polynucleotide
  modified_base 1: mod_base = OTHER; note = 2'-O-Methyl-uridine phosphorothioate
  modified_base 2: mod_base = OTHER; note = 2'-O-Methyl-uridine phosphorothioate
  modified_base 3: mod_base = OTHER; note = 2'-O-Methyl-guanosine phosphorothioate
  modified_base 97: mod_base = OTHER; note = uridine phosphorothioate
  modified_base 98: mod_base = OTHER; note = 2'-O-Methyl-uridine phosphorothioate
  modified_base 99: mod_base = OTHER; note = 2'-O-Methyl-uridine phosphorothioate
  modified_base 100: mod_base = OTHER; note = 2'-O-Methyl-uridine
ttggaaagacggaggcagccgttttagagctagaaatagcaagttaaaataaggctagtccgttatcaacttgaaaaagtggcaccgagtcggtgctttt

SEQ ID NO: 262 - RNA, 100 nt, synthetic construct
  source 1..100: mol_type = other RNA; note = Description of Artificial Sequence: Synthetic polynucleotide
  modified_base 1: mod_base = OTHER; note = 2'-O-Methyl-guanosine phosphorothioate
  modified_base 2: mod_base = OTHER; note = 2'-O-Methyl-adenosine phosphorothioate
  modified_base 3: mod_base = OTHER; note = 2'-O-Methyl-adenosine phosphorothioate
  modified_base 97: mod_base = OTHER; note = uridine phosphorothioate
  modified_base 98: mod_base = OTHER; note = 2'-O-Methyl-uridine phosphorothioate
  modified_base 99: mod_base = OTHER; note = 2'-O-Methyl-uridine phosphorothioate
  modified_base 100: mod_base = OTHER; note = 2'-O-Methyl-uridine
gaaagacggaggcagcctgggttttagagctagaaatagcaagttaaaataaggctagtccgttatcaacttgaaaaagtggcaccgagtcggtgctttt

SEQ ID NO: 263 - RNA, 100 nt, synthetic construct
  source 1..100: mol_type = other RNA; note = Description of Artificial Sequence: Synthetic polynucleotide
  modified_base 1: mod_base = OTHER; note = 2'-O-Methyl-uridine phosphorothioate
  modified_base 2: mod_base = OTHER; note = 2'-O-Methyl-cytidine phosphorothioate
  modified_base 3: mod_base = OTHER; note = 2'-O-Methyl-cytidine phosphorothioate
  modified_base 97: mod_base = OTHER; note = uridine phosphorothioate
  modified_base 98: mod_base = OTHER; note = 2'-O-Methyl-uridine phosphorothioate
  modified_base 99: mod_base = OTHER; note = 2'-O-Methyl-uridine phosphorothioate
  modified_base 100: mod_base = OTHER; note = 2'-O-Methyl-uridine
tcccaggcctggagtttattgttttagagctagaaatagcaagttaaaataaggctagtccgttatcaacttgaaaaagtggcaccgagtcggtgctttt

SEQ ID NO: 264 - RNA, 100 nt, synthetic construct
  source 1..100: mol_type = other RNA; note = Description of Artificial Sequence: Synthetic oligonucleotide; note = Description of Combined DNA/RNA Molecule: Synthetic oligonucleotide
  modified_base 1: mod_base = OTHER; note = 2'-O-Methyl-adenosine phosphorothioate
  modified_base 2: mod_base = OTHER; note = 2'-O-Methyl-guanosine phosphorothioate
  modified_base 3: mod_base = OTHER; note = 2'-O-Methyl-cytidine phosphorothioate
  modified_base 19: mod_base = OTHER; note = thymine
  modified_base 97: mod_base = OTHER; note = uridine phosphorothioate
  modified_base 98: mod_base = OTHER; note = 2'-O-Methyl-uridine phosphorothioate
  modified_base 99: mod_base = OTHER; note = 2'-O-Methyl-uridine phosphorothioate
  modified_base 100: mod_base = OTHER; note = 2'-O-Methyl-uridine
agcacctacctcgggagctggttttagagctagaaatagcaagttaaaataaggctagtccgttatcaacttgaaaaagtggcaccgagtcggtgctttt

SEQ ID NO: 265 - RNA, 100 nt, synthetic construct
  source 1..100: mol_type = other RNA; note = Description of Artificial Sequence: Synthetic polynucleotide
  modified_base 1: mod_base = OTHER; note = 2'-O-Methyl-cytidine phosphorothioate
  modified_base 2: mod_base = OTHER; note = 2'-O-Methyl-uridine phosphorothioate
  modified_base 3: mod_base = OTHER; note = 2'-O-Methyl-uridine phosphorothioate
  modified_base 97: mod_base = OTHER; note = uridine phosphorothioate
  modified_base 98: mod_base = OTHER; note = 2'-O-Methyl-uridine phosphorothioate
  modified_base 99: mod_base = OTHER; note = 2'-O-Methyl-uridine phosphorothioate
  modified_base 100: mod_base = OTHER; note = 2'-O-Methyl-uridine
ctttccaggtcatcacagttgttttagagctagaaatagcaagttaaaataaggctagtccgttatcaacttgaaaaagtggcaccgagtcggtgctttt

SEQ ID NO: 266 - RNA, 100 nt, synthetic construct
  source 1..100: mol_type = other RNA; note = Description of Artificial Sequence: Synthetic polynucleotide
  modified_base 1: mod_base = OTHER; note = 2'-O-Methyl-cytidine phosphorothioate
  modified_base 2: mod_base = OTHER; note = 2'-O-Methyl-cytidine phosphorothioate
  modified_base 3: mod_base = OTHER; note = 2'-O-Methyl-uridine phosphorothioate
  modified_base 97: mod_base = OTHER; note = uridine phosphorothioate
  modified_base 98: mod_base = OTHER; note = 2'-O-Methyl-uridine phosphorothioate
  modified_base 99: mod_base = OTHER; note = 2'-O-Methyl-uridine phosphorothioate
  modified_base 100: mod_base = OTHER; note = 2'-O-Methyl-uridine
cctttccaggtcatcacagtgttttagagctagaaatagcaagttaaaataaggctagtccgttatcaacttgaaaaagtggcaccgagtcggtgctttt

SEQ ID NO: 267 - RNA, 100 nt, synthetic construct
  source 1..100: mol_type = other RNA; note = Description of Artificial Sequence: Synthetic polynucleotide
  modified_base 1: mod_base = OTHER; note = 2'-O-Methyl-uridine phosphorothioate
  modified_base 2: mod_base = OTHER; note = 2'-O-Methyl-uridine phosphorothioate
  modified_base 3: mod_base = OTHER; note = 2'-O-Methyl-uridine phosphorothioate
  modified_base 97: mod_base = OTHER; note = uridine phosphorothioate
  modified_base 98: mod_base = OTHER; note = 2'-O-Methyl-uridine phosphorothioate
  modified_base 99: mod_base = OTHER; note = 2'-O-Methyl-uridine phosphorothioate
  modified_base 100: mod_base = OTHER; note = 2'-O-Methyl-uridine
tttccaggtcatcacagttggttttagagctagaaatagcaagttaaaataaggctagtccgttatcaacttgaaaaagtggcaccgagtcggtgctttt

SEQ ID NO: 268 - RNA, 100 nt, synthetic construct
  source 1..100: mol_type = other RNA; note = Description of Artificial Sequence: Synthetic polynucleotide
  modified_base 1: mod_base = OTHER; note = 2'-O-Methyl-cytidine phosphorothioate
  modified_base 2: mod_base = OTHER; note = 2'-O-Methyl-uridine phosphorothioate
  modified_base 3: mod_base = OTHER; note = 2'-O-Methyl-uridine phosphorothioate
  modified_base 97: mod_base = OTHER; note = uridine phosphorothioate
  modified_base 98: mod_base = OTHER; note = 2'-O-Methyl-uridine phosphorothioate
  modified_base 99: mod_base = OTHER; note = 2'-O-Methyl-uridine phosphorothioate
  modified_base 100: mod_base = OTHER; note = 2'-O-Methyl-uridine
cttacctgccccatgggtgcgttttagagctagaaatagcaagttaaaataaggctagtccgttatcaacttgaaaaagtggcaccgagtcggtgctttt

SEQ ID NO: 269 - RNA, 100 nt, synthetic construct
  source 1..100: mol_type = other RNA; note = Description of Artificial Sequence: Synthetic polynucleotide
  modified_base 1: mod_base = OTHER; note = 2'-O-Methyl-uridine phosphorothioate
  modified_base 2: mod_base = OTHER; note = 2'-O-Methyl-adenosine phosphorothioate
  modified_base 3: mod_base = OTHER; note = 2'-O-Methyl-adenosine phosphorothioate
  modified_base 97: mod_base = OTHER; note = uridine phosphorothioate
  modified_base 98: mod_base = OTHER; note = 2'-O-Methyl-uridine phosphorothioate
  modified_base 99: mod_base = OTHER; note = 2'-O-Methyl-uridine phosphorothioate
  modified_base 100: mod_base = OTHER; note = 2'-O-Methyl-uridine
taaggcccaagggggcaagcgttttagagctagaaatagcaagttaaaataaggctagtccgttatcaacttgaaaaagtggcaccgagtcggtgctttt

SEQ ID NO: 270 - RNA, 100 nt, synthetic construct
  source 1..100: mol_type = other RNA; note = Description of Artificial Sequence: Synthetic polynucleotide
  modified_base 1: mod_base = OTHER; note = 2'-O-Methyl-cytidine phosphorothioate
  modified_base 2: mod_base = OTHER; note = 2'-O-Methyl-cytidine phosphorothioate
  modified_base 3: mod_base = OTHER; note = 2'-O-Methyl-uridine phosphorothioate
  modified_base 97: mod_base = OTHER; note = uridine phosphorothioate
  modified_base 98: mod_base = OTHER; note = 2'-O-Methyl-uridine phosphorothioate
  modified_base 99: mod_base = OTHER; note = 2'-O-Methyl-uridine phosphorothioate
  modified_base 100: mod_base = OTHER; note = 2'-O-Methyl-uridine
cctcttcacctgctcctgaggttttagagctagaaatagcaagttaaaataaggctagtccgttatcaacttgaaaaagtggcaccgagtcggtgctttt

SEQ ID NO: 271 - RNA, 100 nt, synthetic construct
  source 1..100: mol_type = other RNA; note = Description of Artificial Sequence: Synthetic polynucleotide
  modified_base 1: mod_base = OTHER; note = 2'-O-Methyl-guanosine phosphorothioate
  modified_base 2: mod_base = OTHER; note = 2'-O-Methyl-cytidine phosphorothioate
  modified_base 3: mod_base = OTHER; note = 2'-O-Methyl-cytidine phosphorothioate
  modified_base 97: mod_base = OTHER; note = uridine phosphorothioate
  modified_base 98: mod_base = OTHER; note = 2'-O-Methyl-uridine phosphorothioate
  modified_base 99: mod_base = OTHER; note = 2'-O-Methyl-uridine phosphorothioate
  modified_base 100: mod_base = OTHER; note = 2'-O-Methyl-uridine
gcctcttcacctgctcctgagttttagagctagaaatagcaagttaaaataaggctagtccgttatcaacttgaaaaagtggcaccgagtcggtgctttt

SEQ ID NO: 272 - RNA, 100 nt, synthetic construct
  source 1..100: mol_type = other RNA; note = Description of Artificial Sequence: Synthetic polynucleotide
  modified_base 1: mod_base = OTHER; note = 2'-O-Methyl-uridine phosphorothioate
  modified_base 2: mod_base = OTHER; note = 2'-O-Methyl-uridine phosphorothioate
  modified_base 3: mod_base = OTHER; note = 2'-O-Methyl-cytidine phosphorothioate
  modified_base 97: mod_base = OTHER; note = uridine phosphorothioate
  modified_base 98: mod_base = OTHER; note = 2'-O-Methyl-uridine phosphorothioate
  modified_base 99: mod_base = OTHER; note = 2'-O-Methyl-uridine phosphorothioate
  modified_base 100: mod_base = OTHER; note = 2'-O-Methyl-uridine
ttcacctgctcctgaggggcgttttagagctagaaatagcaagttaaaataaggctagtccgttatcaacttgaaaaagtggcaccgagtcggtgctttt

SEQ ID NO: 273 - RNA, 100 nt, synthetic construct
  source 1..100: mol_type = other RNA; note = Description of Artificial Sequence: Synthetic polynucleotide
  modified_base 1: mod_base = OTHER; note = 2'-O-Methyl-uridine phosphorothioate
  modified_base 2: mod_base = OTHER; note = 2'-O-Methyl-cytidine phosphorothioate
  modified_base 3: mod_base = OTHER; note = 2'-O-Methyl-adenosine phosphorothioate
  modified_base 97: mod_base = OTHER; note = uridine phosphorothioate
  modified_base 98: mod_base = OTHER; note = 2'-O-Methyl-uridine phosphorothioate
  modified_base 99: mod_base = OTHER; note = 2'-O-Methyl-uridine phosphorothioate
  modified_base 100: mod_base = OTHER; note = 2'-O-Methyl-uridine
tcacctgctcctgaggggccgttttagagctagaaatagcaagttaaaataaggctagtccgttatcaacttgaaaaagtggcaccgagtcggtgctttt

SEQ ID NO: 274 - RNA, 100 nt, synthetic construct
  source 1..100: mol_type = other RNA; note = Description of Artificial Sequence: Synthetic polynucleotide
  modified_base 1: mod_base = OTHER; note = 2'-O-Methyl-cytidine phosphorothioate
  modified_base 2: mod_base = OTHER; note = 2'-O-Methyl-cytidine phosphorothioate
  modified_base 3: mod_base = OTHER; note = 2'-O-Methyl-cytidine phosphorothioate
  modified_base 97: mod_base = OTHER; note = uridine phosphorothioate
  modified_base 98: mod_base = OTHER; note = 2'-O-Methyl-uridine phosphorothioate
  modified_base 99: mod_base = OTHER; note = 2'-O-Methyl-uridine phosphorothioate
  modified_base 100: mod_base = OTHER; note = 2'-O-Methyl-uridine
cccaggctgcagctcccactgttttagagctagaaatagcaagttaaaataaggctagtccgttatcaacttgaaaaagtggcaccgagtcggtgctttt

SEQ ID NO: 275 - RNA, 100 nt, synthetic construct
  source 1..100: mol_type = other RNA; note = Description of Artificial Sequence: Synthetic polynucleotide
  modified_base 1: mod_base = OTHER; note = 2'-O-Methyl-cytidine phosphorothioate
  modified_base 2: mod_base = OTHER; note = 2'-O-Methyl-cytidine phosphorothioate
  modified_base 3: mod_base = OTHER; note = 2'-O-Methyl-cytidine phosphorothioate
  modified_base 97: mod_base = OTHER; note = uridine phosphorothioate
  modified_base 98: mod_base = OTHER; note = 2'-O-Methyl-uridine phosphorothioate
  modified_base 99: mod_base = OTHER; note = 2'-O-Methyl-uridine phosphorothioate
  modified_base 100: mod_base = OTHER; note = 2'-O-Methyl-uridine
ccccaggctgcagctcccacgttttagagctagaaatagcaagttaaaataaggctagtccgttatcaacttgaaaaagtggcaccgagtcggtgctttt

SEQ ID NO: 276 - RNA, 100 nt, synthetic construct
  source 1..100: mol_type = other RNA; note = Description of Artificial Sequence: Synthetic polynucleotide
  modified_base 1: mod_base = OTHER; note = 2'-O-Methyl-guanosine phosphorothioate
  modified_base 2: mod_base = OTHER; note = 2'-O-Methyl-cytidine phosphorothioate
  modified_base 3: mod_base = OTHER; note = 2'-O-Methyl-adenosine phosphorothioate
  modified_base 97: mod_base = OTHER; note = uridine phosphorothioate
  modified_base 98: mod_base = OTHER; note = 2'-O-Methyl-uridine phosphorothioate
  modified_base 99: mod_base = OTHER; note = 2'-O-Methyl-uridine phosphorothioate
  modified_base 100: mod_base = OTHER; note = 2'-O-Methyl-uridine
gcaggtgaccgtggcctgcggttttagagctagaaatagcaagttaaaataaggctagtccgttatcaacttgaaaaagtggcaccgagtcggtgctttt

SEQ ID NO: 277 - RNA, 100 nt, synthetic construct
  source 1..100: mol_type = other RNA; note = Description of Artificial Sequence: Synthetic polynucleotide
  modified_base 1: mod_base = OTHER; note = 2'-O-Methyl-cytidine phosphorothioate
  modified_base 2: mod_base = OTHER; note = 2'-O-Methyl-uridine phosphorothioate
  modified_base 3: mod_base = OTHER; note = 2'-O-Methyl-cytidine phosphorothioate
  modified_base 97: mod_base = OTHER; note = uridine phosphorothioate
  modified_base 98: mod_base = OTHER; note = 2'-O-Methyl-uridine phosphorothioate
  modified_base 99: mod_base = OTHER; note = 2'-O-Methyl-uridine phosphorothioate
  modified_base 100: mod_base = OTHER; note = 2'-O-Methyl-uridine
ctcctttaggaggctggtgggttttagagctagaaatagcaagttaaaataaggctagtccgttatcaacttgaaaaagtggcaccgagtcggtgctttt

SEQ ID NO: 278 - RNA, 100 nt, synthetic construct
  source 1..100: mol_type = other RNA; note = Description of Artificial Sequence: Synthetic polynucleotide
  modified_base 1: mod_base = OTHER; note = 2'-O-Methyl-uridine phosphorothioate
  modified_base 2: mod_base = OTHER; note = 2'-O-Methyl-uridine phosphorothioate
  modified_base 3: mod_base = OTHER; note = 2'-O-Methyl-uridine phosphorothioate
  modified_base 97: mod_base = OTHER; note = uridine phosphorothioate
  modified_base 98: mod_base = OTHER; note = 2'-O-Methyl-uridine phosphorothioate
  modified_base 99: mod_base = OTHER; note = 2'-O-Methyl-uridine phosphorothioate
  modified_base 100: mod_base = OTHER; note = 2'-O-Methyl-uridine
ttttcaggagaattttggttgttttagagctagaaatagcaagttaaaataaggctagtccgttatcaacttgaaaaagtggcaccgagtcggtgctttt

SEQ ID NO: 279 - RNA, 100 nt, synthetic construct
  source 1..100: mol_type = other RNA; note = Description of Artificial Sequence: Synthetic polynucleotide
  modified_base 1: mod_base = OTHER; note = 2'-O-Methyl-cytidine phosphorothioate
  modified_base 2: mod_base = OTHER; note = 2'-O-Methyl-uridine phosphorothioate
  modified_base 3: mod_base = OTHER; note = 2'-O-Methyl-uridine phosphorothioate
  modified_base 97: mod_base = OTHER; note = uridine phosphorothioate
  modified_base 98: mod_base = OTHER; note = 2'-O-Methyl-uridine phosphorothioate
  modified_base 99: mod_base = OTHER; note = 2'-O-Methyl-uridine phosphorothioate
  modified_base 100: mod_base = OTHER; note = 2'-O-Methyl-uridine
cttttcaggagaattttggtgttttagagctagaaatagcaagttaaaataaggctagtccgttatcaacttgaaaaagtggcaccgagtcggtgctttt

SEQ ID NO: 280 - RNA, 100 nt, synthetic construct
  source 1..100: mol_type = other RNA; note = Description of Artificial Sequence: Synthetic polynucleotide
  modified_base 1: mod_base = OTHER; note = 2'-O-Methyl-uridine phosphorothioate
  modified_base 2: mod_base = OTHER; note = 2'-O-Methyl-adenosine phosphorothioate
  modified_base 3: mod_base = OTHER; note = 2'-O-Methyl-adenosine phosphorothioate
  modified_base 97: mod_base = OTHER; note = uridine phosphorothioate
  modified_base 98: mod_base = OTHER; note = 2'-O-Methyl-uridine phosphorothioate
  modified_base 99: mod_base = OTHER; note = 2'-O-Methyl-uridine phosphorothioate
  modified_base 100: mod_base = OTHER; note = 2'-O-Methyl-uridine
taatttggcccttcgtcttagttttagagctagaaatagcaagttaaaataaggctagtccgttatcaacttgaaaaagtggcaccgagtcggtgctttt

SEQ ID NO: 281 - RNA, 100 nt, synthetic construct
  source 1..100: mol_type = other RNA; note = Description of Artificial Sequence: Synthetic polynucleotide
  modified_base 1: mod_base = OTHER; note = 2'-O-Methyl-adenosine phosphorothioate
  modified_base 2: mod_base = OTHER; note = 2'-O-Methyl-guanosine phosphorothioate
  modified_base 3: mod_base = OTHER; note = 2'-O-Methyl-adenosine phosphorothioate
  modified_base 97: mod_base = OTHER; note = uridine phosphorothioate
  modified_base 98: mod_base = OTHER; note = 2'-O-Methyl-uridine phosphorothioate
  modified_base 99: mod_base = OTHER; note = 2'-O-Methyl-uridine phosphorothioate
  modified_base 100: mod_base = OTHER; note = 2'-O-Methyl-uridine
agactttgtccataagacgagttttagagctagaaatagcaagttaaaataaggctagtccgttatcaacttgaaaaagtggcaccgagtcggtgctttt

SEQ ID NO: 282 - RNA, 100 nt, synthetic construct
  source 1..100: mol_type = other RNA; note = Description of Artificial Sequence: Synthetic polynucleotide
  modified_base 1: mod_base = OTHER; note = 2'-O-Methyl-guanosine phosphorothioate
  modified_base 2: mod_base = OTHER; note = 2'-O-Methyl-adenosine phosphorothioate
  modified_base 3: mod_base = OTHER; note = 2'-O-Methyl-cytidine phosphorothioate
  modified_base 97: mod_base = OTHER; note = uridine phosphorothioate
  modified_base 98: mod_base = OTHER; note = 2'-O-Methyl-uridine phosphorothioate
  modified_base 99: mod_base = OTHER; note = 2'-O-Methyl-uridine phosphorothioate
  modified_base 100: mod_base = OTHER; note = 2'-O-Methyl-uridine
gactttgtccataagacgaagttttagagctagaaatagcaagttaaaataaggctagtccgttatcaacttgaaaaagtggcaccgagtcggtgctttt

SEQ ID NO: 283 - RNA, 100 nt, synthetic construct
  source 1..100: mol_type = other RNA; note = Description of Artificial Sequence: Synthetic polynucleotide
  modified_base 1: mod_base = OTHER; note = 2'-O-Methyl-adenosine phosphorothioate
  modified_base 2: mod_base = OTHER; note = 2'-O-Methyl-guanosine phosphorothioate
  modified_base 3: mod_base = OTHER; note = 2'-O-Methyl-cytidine phosphorothioate
  modified_base 97: mod_base = OTHER; note = uridine phosphorothioate
  modified_base 98: mod_base = OTHER; note = 2'-O-Methyl-uridine phosphorothioate
  modified_base 99: mod_base = OTHER; note = 2'-O-Methyl-uridine phosphorothioate
  modified_base 100: mod_base = OTHER; note = 2'-O-Methyl-uridine
agccaatggcctccttcagtgttttagagctagaaatagcaagttaaaataaggctagtccgttatcaacttgaaaaagtggcaccgagtcggtgctttt

SEQ ID NO: 284 - RNA, 100 nt, synthetic construct
  source 1..100: mol_type = other RNA; note = Description of Artificial Sequence: Synthetic polynucleotide
  modified_base 1: mod_base = OTHER; note = 2'-O-Methyl-uridine phosphorothioate
  modified_base 2: mod_base = OTHER; note = 2'-O-Methyl-cytidine phosphorothioate
  modified_base 3: mod_base = OTHER; note = 2'-O-Methyl-cytidine phosphorothioate
  modified_base 97: mod_base = OTHER; note = uridine phosphorothioate
  modified_base 98: mod_base = OTHER; note = 2'-O-Methyl-uridine phosphorothioate
  modified_base 99: mod_base = OTHER; note = 2'-O-Methyl-uridine phosphorothioate
  modified_base 100: mod_base = OTHER; note = 2'-O-Methyl-uridine
tcccaactgaaggaggccatgttttagagctagaaatagcaagttaaaataaggctagtccgttatcaacttgaaaaagtggcaccgagtcggtgctttt

SEQ ID NO: 285 - RNA, 100 nt, synthetic construct
  source 1..100: mol_type = other RNA; note = Description of Artificial Sequence: Synthetic polynucleotide
  modified_base 1: mod_base = OTHER; note = 2'-O-Methyl-guanosine phosphorothioate
  modified_base 2: mod_base = OTHER; note = 2'-O-Methyl-guanosine phosphorothioate
  modified_base 3: mod_base = OTHER; note = 2'-O-Methyl-cytidine phosphorothioate
  modified_base 97: mod_base = OTHER; note = uridine phosphorothioate
  modified_base 98: mod_base = OTHER; note = 2'-O-Methyl-uridine phosphorothioate
  modified_base 99: mod_base = OTHER; note = 2'-O-Methyl-uridine phosphorothioate
  modified_base 100: mod_base = OTHER; note = 2'-O-Methyl-uridine
ggcctccttcagttgggacagttttagagctagaaatagcaagttaaaataaggctagtccgttatcaacttgaaaaagtggcaccgagtcggtgctttt

SEQ ID NO: 286 - RNA, 100 nt, synthetic construct
  source 1..100: mol_type = other RNA; note = Description of Artificial Sequence: Synthetic polynucleotide
  modified_base 1: mod_base = OTHER; note = 2'-O-Methyl-guanosine phosphorothioate
  modified_base 2: mod_base = OTHER; note = 2'-O-Methyl-adenosine phosphorothioate
  modified_base 3: mod_base = OTHER; note = 2'-O-Methyl-cytidine phosphorothioate
  modified_base 97: mod_base = OTHER; note = uridine phosphorothioate
  modified_base 98: mod_base = OTHER; note = 2'-O-Methyl-uridine phosphorothioate
  modified_base 99: mod_base = OTHER; note = 2'-O-Methyl-uridine phosphorothioate
  modified_base 100: mod_base = OTHER; note = 2'-O-Methyl-uridine
gaccatgtcccaactgaagggttttagagctagaaatagcaagttaaaataaggctagtccgttatcaacttgaaaaagtggcaccgagtcggtgctttt

SEQ ID NO: 287 - RNA, 100 nt, synthetic construct
  source 1..100: mol_type = other RNA; note = Description of Artificial Sequence: Synthetic polynucleotide
  modified_base 1: mod_base = OTHER; note = 2'-O-Methyl-guanosine phosphorothioate
  modified_base 2: mod_base = OTHER; note = 2'-O-Methyl-cytidine phosphorothioate
  modified_base 3: mod_base = OTHER; note = 2'-O-Methyl-cytidine phosphorothioate
  modified_base 97: mod_base = OTHER; note = uridine phosphorothioate
  modified_base 98: mod_base = OTHER; note = 2'-O-Methyl-uridine phosphorothioate
  modified_base 99: mod_base = OTHER; note = 2'-O-Methyl-uridine phosphorothioate
  modified_base 100: mod_base = OTHER; note = 2'-O-Methyl-uridine
gccaatggcctccttcagttgttttagagctagaaatagcaagttaaaataaggctagtccgttatcaacttgaaaaagtggcaccgagtcggtgctttt

SEQ ID NO: 288 - RNA, 100 nt, synthetic construct
  source 1..100: mol_type = other RNA; note = Description of Artificial Sequence: Synthetic polynucleotide
  modified_base 1: mod_base = OTHER; note = 2'-O-Methyl-adenosine phosphorothioate
  modified_base 2: mod_base = OTHER; note = 2'-O-Methyl-uridine phosphorothioate
  modified_base 3: mod_base = OTHER; note = 2'-O-Methyl-uridine phosphorothioate
  modified_base 97: mod_base = OTHER; note = uridine phosphorothioate
  modified_base 98: mod_base = OTHER; note = 2'-O-Methyl-uridine phosphorothioate
  modified_base 99: mod_base = OTHER; note = 2'-O-Methyl-uridine phosphorothioate
  modified_base 100: mod_base = OTHER; note = 2'-O-Methyl-uridine
attgtcttgatcaattctgggttttagagctagaaatagcaagttaaaataaggctagtccgttatcaacttgaaaaagtggcaccgagtcggtgctttt

SEQ ID NO: 289 - RNA, 100 nt, synthetic construct
  source 1..100: mol_type = other RNA; note = Description of Artificial Sequence: Synthetic polynucleotide
  modified_base 1: mod_base = OTHER; note = 2'-O-Methyl-adenosine phosphorothioate
  modified_base 2: mod_base = OTHER; note = 2'-O-Methyl-uridine phosphorothioate
  modified_base 3: mod_base = OTHER; note = 2'-O-Methyl-uridine phosphorothioate
  modified_base 97: mod_base = OTHER; note = uridine phosphorothioate
  modified_base 98: mod_base = OTHER; note = 2'-O-Methyl-uridine phosphorothioate
  modified_base 99: mod_base = OTHER; note = 2'-O-Methyl-uridine phosphorothioate
  modified_base 100: mod_base = OTHER; note = 2'-O-Methyl-uridine
attctggaggaaataactaggttttagagctagaaatagcaagttaaaataaggctagtccgttatcaacttgaaaaagtggcaccgagtcggtgctttt

SEQ ID NO: 290 - RNA, 100 nt, synthetic construct
  source 1..100: mol_type = other RNA; note = Description of Artificial Sequence: Synthetic polynucleotide
  modified_base 1: mod_base = OTHER; note = 2'-O-Methyl-uridine phosphorothioate
  modified_base 2: mod_base = OTHER; note = 2'-O-Methyl-cytidine phosphorothioate
  modified_base 3: mod_base = OTHER; note = 2'-O-Methyl-uridine phosphorothioate
  modified_base 97: mod_base = OTHER; note = uridine phosphorothioate
  modified_base 98: mod_base = OTHER; note = 2'-O-Methyl-uridine phosphorothioate
  modified_base 99: mod_base = OTHER; note = 2'-O-Methyl-uridine phosphorothioate
  modified_base 100: mod_base = OTHER; note = 2'-O-Methyl-uridine
tctgggtgttctggagtttcgttttagagctagaaatagcaagttaaaataaggctagtccgttatcaacttgaaaaagtggcaccgagtcggtgctttt

SEQ ID NO: 291 - RNA, 100 nt, synthetic construct
  source 1..100: mol_type = other RNA; note = Description of Artificial Sequence: Synthetic polynucleotide
  modified_base 1: mod_base = OTHER; note = 2'-O-Methyl-adenosine phosphorothioate
  modified_base 2: mod_base = OTHER; note = 2'-O-Methyl-adenosine phosphorothioate
  modified_base 3: mod_base = OTHER; note = 2'-O-Methyl-cytidine phosphorothioate
  modified_base 97: mod_base = OTHER; note = uridine phosphorothioate
  modified_base 98: mod_base = OTHER; note = 2'-O-Methyl-uridine phosphorothioate
  modified_base 99: mod_base = OTHER; note = 2'-O-Methyl-uridine phosphorothioate
  modified_base 100: mod_base = OTHER; note = 2'-O-Methyl-uridine
aacatagcaaatcttgatttgttttagagctagaaatagcaagttaaaataaggctagtccgttatcaacttgaaaaagtggcaccgagtcggtgctttt

SEQ ID NO: 292 - RNA, 100 nt, synthetic construct
  source 1..100: mol_type = other RNA; note = Description of Artificial Sequence: Synthetic polynucleotide
  modified_base 1: mod_base = OTHER; note = 2'-O-Methyl-guanosine phosphorothioate
  modified_base 2: mod_base = OTHER; note = 2'-O-Methyl-uridine phosphorothioate
  modified_base 3: mod_base = OTHER; note = 2'-O-Methyl-adenosine phosphorothioate
  modified_base 97: mod_base = OTHER; note = uridine phosphorothioate
  modified_base 98: mod_base = OTHER; note = 2'-O-Methyl-uridine phosphorothioate
  modified_base 99: mod_base = OTHER; note = 2'-O-Methyl-uridine phosphorothioate
  modified_base 100: mod_base = OTHER; note = 2'-O-Methyl-uridine
gtagaattttttcttctagggttttagagctagaaatagcaagttaaaataaggctagtccgttatcaacttgaaaaagtggcaccgagtcggtgctttt

SEQ ID NO: 293 - RNA, 100 nt, synthetic construct
  source 1..100: mol_type = other RNA; note = Description of Artificial Sequence: Synthetic polynucleotide
  modified_base 1: mod_base = OTHER; note = 2'-O-Methyl-adenosine phosphorothioate
  modified_base 2: mod_base = OTHER; note = 2'-O-Methyl-cytidine phosphorothioate
  modified_base 3: mod_base = OTHER; note = 2'-O-Methyl-uridine phosphorothioate
  modified_base 97: mod_base = OTHER; note = uridine phosphorothioate
  modified_base 98: mod_base = OTHER; note = 2'-O-Methyl-uridine phosphorothioate
  modified_base 99: mod_base = OTHER; note = 2'-O-Methyl-uridine phosphorothioate
  modified_base 100: mod_base = OTHER; note = 2'-O-Methyl-uridine
actacaagtcaaaaatgaaggttttagagctagaaatagcaagttaaaataaggctagtccgttatcaacttgaaaaagtggcaccgagtcggtgctttt

SEQ ID NO: 294 - RNA, 100 nt, synthetic construct
  source 1..100: mol_type = other RNA; note = Description of Artificial Sequence: Synthetic polynucleotide
  modified_base 1: mod_base = OTHER; note = 2'-O-Methyl-uridine phosphorothioate
  modified_base 2: mod_base = OTHER; note = 2'-O-Methyl-adenosine phosphorothioate
  modified_base 3: mod_base = OTHER; note = 2'-O-Methyl-uridine phosphorothioate
  modified_base 97: mod_base = OTHER; note = uridine phosphorothioate
  modified_base 98: mod_base = OTHER; note = 2'-O-Methyl-uridine phosphorothioate
  modified_base 99: mod_base = OTHER; note = 2'-O-Methyl-uridine phosphorothioate
  modified_base 100: mod_base = OTHER; note = 2'-O-Methyl-uridine
tatattggtcttccacggtcgttttagagctagaaatagcaagttaaaataaggctagtccgttatcaacttgaaaaagtggcaccgagtcggtgctttt

SEQ ID NO: 295 - RNA, 100 nt, synthetic construct
  source 1..100: mol_type = other RNA; note = Description of Artificial Sequence: Synthetic polynucleotide
  modified_base 1: mod_base = OTHER; note = 2'-O-Methyl-cytidine phosphorothioate
  modified_base 2: mod_base = OTHER; note = 2'-O-Methyl-adenosine phosphorothioate
  modified_base 3: mod_base = OTHER; note = 2'-O-Methyl-adenosine phosphorothioate
  modified_base 97: mod_base = OTHER; note = uridine phosphorothioate
  modified_base 98: mod_base = OTHER; note = 2'-O-Methyl-uridine phosphorothioate
  modified_base 99: mod_base = OTHER; note = 2'-O-Methyl-uridine phosphorothioate
  modified_base 100: mod_base = OTHER; note = 2'-O-Methyl-uridine
caaagaccttctccagaccggttttagagctagaaatagcaagttaaaataaggctagtccgttatcaacttgaaaaagtggcaccgagtcggtgctttt

SEQ ID NO: 296 - RNA, 100 nt, synthetic construct
  source 1..100: mol_type = other RNA; note = Description of Artificial Sequence: Synthetic polynucleotide
  modified_base 1: mod_base = OTHER; note = 2'-O-Methyl-guanosine phosphorothioate
  modified_base 2: mod_base = OTHER; note = 2'-O-Methyl-guanosine phosphorothioate
  modified_base 3: mod_base = OTHER; note = 2'-O-Methyl-uridine phosphorothioate
  modified_base 97: mod_base = OTHER; note = uridine phosphorothioate
  modified_base 98: mod_base = OTHER; note = 2'-O-Methyl-uridine phosphorothioate
  modified_base 99: mod_base = OTHER; note = 2'-O-Methyl-uridine phosphorothioate
  modified_base 100: mod_base = OTHER; note = 2'-O-Methyl-uridine
ggtcttccacggtctggagagttttagagctagaaatagcaagttaaaataaggctagtccgttatcaacttgaaaaagtggcaccgagtcggtgctttt

SEQ ID NO: 297 - RNA, 100 nt, synthetic construct
  source 1..100: mol_type = other RNA; note = Description of Artificial Sequence: Synthetic polynucleotide
  modified_base 1: mod_base = OTHER; note = 2'-O-Methyl-uridine phosphorothioate
  modified_base 2: mod_base = OTHER; note = 2'-O-Methyl-uridine phosphorothioate
  modified_base 3: mod_base = OTHER; note = 2'-O-Methyl-guanosine phosphorothioate
  modified_base 97: mod_base = OTHER; note = uridine phosphorothioate
  modified_base 98: mod_base = OTHER; note = 2'-O-Methyl-uridine phosphorothioate
  modified_base 99: mod_base = OTHER; note = 2'-O-Methyl-uridine phosphorothioate
  modified_base 100: mod_base = OTHER; note = 2'-O-Methyl-uridine
ttgtttatattggtcttccagttttagagctagaaatagcaagttaaaataaggctagtccgttatcaacttgaaaaagtggcaccgagtcggtgctttt

SEQ ID NO: 298 - RNA, 100 nt, synthetic construct
  source 1..100: mol_type = other RNA; note = Description of Artificial Sequence: Synthetic polynucleotide
  modified_base 1: mod_base = OTHER; note = 2'-O-Methyl-cytidine phosphorothioate
  modified_base 2: mod_base = OTHER; note = 2'-O-Methyl-uridine phosphorothioate
  modified_base 3: mod_base = OTHER; note = 2'-O-Methyl-uridine phosphorothioate
  modified_base 97: mod_base = OTHER; note = uridine phosphorothioate
  modified_base 98: mod_base = OTHER; note = 2'-O-Methyl-uridine phosphorothioate
  modified_base 99: mod_base = OTHER; note = 2'-O-Methyl-uridine phosphorothioate
  modified_base 100: mod_base = OTHER; note = 2'-O-Methyl-uridine
cttttatttgactatgctgtgttttagagctagaaatagcaagttaaaataaggctagtccgttatcaacttgaaaaagtggcaccgagtcggtgctttt

SEQ ID NO: 299 - RNA, 100 nt, synthetic construct
  source 1..100: mol_type = other RNA; note = Description of Artificial Sequence: Synthetic polynucleotide
  modified_base 1: mod_base = OTHER; note = 2'-O-Methyl-adenosine phosphorothioate
  modified_base 2: mod_base = OTHER; note = 2'-O-Methyl-adenosine phosphorothioate
  modified_base 3: mod_base = OTHER; note = 2'-O-Methyl-adenosine phosphorothioate
  modified_base 97: mod_base = OTHER; note = uridine phosphorothioate
  modified_base 98: mod_base = OTHER; note = 2'-O-Methyl-uridine phosphorothioate
  modified_base 99: mod_base = OTHER; note = 2'-O-Methyl-uridine phosphorothioate
  modified_base 100: mod_base = OTHER; note = 2'-O-Methyl-uridine
aaagtctggatatagagagtgttttagagctagaaatagcaagttaaaataaggctagtccgttatcaacttgaaaaagtggcaccgagtcggtgctttt

SEQ ID NO: 300 - RNA, 100 nt, synthetic construct
  source 1..100: mol_type = other RNA; note = Description of Artificial Sequence: Synthetic polynucleotide
  modified_base 1: mod_base = OTHER; note = 2'-O-Methyl-guanosine phosphorothioate
  modified_base 2: mod_base = OTHER; note = 2'-O-Methyl-uridine phosphorothioate
  modified_base 3: mod_base = OTHER; note = 2'-O-Methyl-uridine phosphorothioate
  modified_base 97: mod_base = OTHER; note = uridine phosphorothioate
  modified_base 98: mod_base = OTHER; note = 2'-O-Methyl-uridine phosphorothioate
  modified_base 99: mod_base = OTHER; note = 2'-O-Methyl-uridine phosphorothioate
  modified_base 100: mod_base = OTHER; note = 2'-O-Methyl-uridine
gttggtttaattgtttatatgttttagagctagaaatagcaagttaaaataaggctagtccgttatcaacttgaaaaagtggcaccgagtcggtgctttt

SEQ ID NO: 301 - RNA, 100 nt, synthetic construct
  source 1..100: mol_type = other RNA; note = Description of Artificial Sequence: Synthetic polynucleotide
  modified_base 1: mod_base = OTHER; note = 2'-O-Methyl-uridine phosphorothioate
  modified_base 2: mod_base = OTHER; note = 2'-O-Methyl-guanosine phosphorothioate
  modified_base 3: mod_base = OTHER; note = 2'-O-Methyl-adenosine phosphorothioate
  modified_base 97: mod_base = OTHER; note = uridine phosphorothioate
  modified_base 98: mod_base = OTHER; note = 2'-O-Methyl-uridine phosphorothioate
  modified_base 99: mod_base = OTHER; note = 2'-O-Methyl-uridine phosphorothioate
  modified_base 100: mod_base = OTHER; note = 2'-O-Methyl-uridine
tgatggtaagacactttggtgttttagagctagaaatagcaagttaaaataaggctagtccgttatcaacttgaaaaagtggcaccgagtcggtgctttt

SEQ ID NO: 302 - RNA, 100 nt, synthetic construct
  source 1..100: mol_type = other RNA; note = Description of Artificial Sequence: Synthetic polynucleotide
  modified_base 1: mod_base = OTHER; note = 2'-O-Methyl-guanosine phosphorothioate
  modified_base 2: mod_base = OTHER; note = 2'-O-Methyl-guanosine phosphorothioate
  modified_base 3: mod_base = OTHER; note = 2'-O-Methyl-adenosine phosphorothioate
  modified_base 97: mod_base = OTHER; note = uridine phosphorothioate
  modified_base 98: mod_base = OTHER; note = 2'-O-Methyl-uridine phosphorothioate
  modified_base 99: mod_base = OTHER; note = 2'-O-Methyl-uridine phosphorothioate
  modified_base 100: mod_base = OTHER; note = 2'-O-Methyl-uridine
ggagtagttcttggtgctctgttttagagctagaaatagcaagttaaaataaggctagtccgttatcaacttgaaaaagtggcaccgagtcggtgctttt

SEQ ID NO: 303 - RNA, 100 nt, synthetic construct
  source 1..100: mol_type = other RNA; note = Description of Artificial Sequence: Synthetic polynucleotide
  modified_base 1: mod_base = OTHER; note = 2'-O-Methyl-adenosine phosphorothioate
  modified_base 2: mod_base = OTHER; note = 2'-O-Methyl-adenosine phosphorothioate
  modified_base 3: mod_base = OTHER; note = 2'-O-Methyl-cytidine phosphorothioate
  modified_base 97: mod_base = OTHER; note = uridine phosphorothioate
  modified_base 98: mod_base = OTHER; note = 2'-O-Methyl-uridine phosphorothioate
  modified_base 99: mod_base = OTHER; note = 2'-O-Methyl-uridine phosphorothioate
  modified_base 100: mod_base = OTHER; note = 2'-O-Methyl-uridine
aacatgatggtaagacacttgttttagagctagaaatagcaagttaaaataaggctagtccgttatcaacttgaaaaagtggcaccgagtcggtgctttt

SEQ ID NO: 304 - RNA, 100 nt, synthetic construct
  source 1..100: mol_type = other RNA; note = Description of Artificial Sequence: Synthetic polynucleotide
  modified_base 1: mod_base = OTHER; note = 2'-O-Methyl-uridine phosphorothioate
  modified_base 2: mod_base = OTHER; note = 2'-O-Methyl-guanosine phosphorothioate
  modified_base 3: mod_base = OTHER; note = 2'-O-Methyl-adenosine phosphorothioate
  modified_base 97: mod_base = OTHER; note = uridine phosphorothioate
  modified_base 98: mod_base = OTHER; note = 2'-O-Methyl-uridine phosphorothioate
  modified_base 99: mod_base = OTHER; note = 2'-O-Methyl-uridine phosphorothioate
  modified_base 100: mod_base = OTHER; note = 2'-O-Methyl-uridine
tgaagaaagggagtagttctgttttagagctagaaatagcaagttaaaataaggctagtccgttatcaacttgaaaaagtggcaccgagtcggtgctttt

SEQ ID NO: 305 - RNA, 100 nt, synthetic construct
  source 1..100: mol_type = other RNA; note = Description of Artificial Sequence: Synthetic polynucleotide
  modified_base 1: mod_base = OTHER; note = 2'-O-Methyl-adenosine phosphorothioate
  modified_base 2: mod_base = OTHER; note = 2'-O-Methyl-guanosine phosphorothioate
  modified_base 3: mod_base = OTHER; note = 2'-O-Methyl-uridine phosphorothioate
  modified_base 97: mod_base = OTHER; note = uridine phosphorothioate
  modified_base 98: mod_base = OTHER; note = 2'-O-Methyl-uridine phosphorothioate
  modified_base 99: mod_base = OTHER; note = 2'-O-Methyl-uridine phosphorothioate
  modified_base 100: mod_base = OTHER; note = 2'-O-Methyl-uridine
agttcttggtgctcttggctgttttagagctagaaatagcaagttaaaataaggctagtccgttatcaacttgaaaaagtggcaccgagtcggtgctttt

SEQ ID NO: 306 - RNA, 100 nt, synthetic construct
  source 1..100: mol_type = other RNA; note = Description of Artificial Sequence: Synthetic polynucleotide
  modified_base 1: mod_base = OTHER; note = 2'-O-Methyl-adenosine phosphorothioate
  modified_base 2: mod_base = OTHER; note = 2'-O-Methyl-uridine phosphorothioate
  modified_base 3: mod_base = OTHER; note = 2'-O-Methyl-guanosine phosphorothioate
  modified_base 97: mod_base = OTHER; note = uridine phosphorothioate
  modified_base 98: mod_base = OTHER; note = 2'-O-Methyl-uridine phosphorothioate
  modified_base 99: mod_base = OTHER; note = 2'-O-Methyl-uridine phosphorothioate
  modified_base 100: mod_base = OTHER; note = 2'-O-Methyl-uridine
atgatggtaagacactttgggttttagagctagaaatagcaagttaaaataaggctagtccgttatcaacttgaaaaagtggcaccgagtcggtgctttt

SEQ ID NO: 307 - RNA, 100 nt, synthetic construct
  source 1..100: mol_type = other RNA; note = Description of Artificial Sequence: Synthetic polynucleotide
  modified_base 1: mod_base = OTHER; note = 2'-O-Methyl-guanosine phosphorothioate
  modified_base 2: mod_base = OTHER; note = 2'-O-Methyl-adenosine phosphorothioate
  modified_base 3: mod_base = OTHER; note = 2'-O-Methyl-adenosine phosphorothioate
  modified_base 97: mod_base = OTHER; note = uridine phosphorothioate
  modified_base 98: mod_base = OTHER; note = 2'-O-Methyl-uridine phosphorothioate
  modified_base 99: mod_base = OTHER; note = 2'-O-Methyl-uridine phosphorothioate
  modified_base 100: mod_base = OTHER; note = 2'-O-Methyl-uridine
gaagatagagaaatttctgtgttttagagctagaaatagcaagttaaaataaggctagtccgttatcaacttgaaaaagtggcaccgagtcggtgctttt

SEQ ID NO: 308 - RNA, 100 nt, synthetic construct
  source 1..100: mol_type = other RNA; note = Description of Artificial Sequence: Synthetic polynucleotide
  modified_base 1: mod_base = OTHER; note = 2'-O-Methyl-guanosine phosphorothioate
  modified_base 2: mod_base = OTHER; note = 2'-O-Methyl-guanosine phosphorothioate
  modified_base 3: mod_base = OTHER; note = 2'-O-Methyl-adenosine phosphorothioate
  modified_base 97: mod_base = OTHER; note = uridine phosphorothioate
  modified_base 98: mod_base = OTHER; note = 2'-O-Methyl-uridine phosphorothioate
  modified_base 99: mod_base = OTHER; note = 2'-O-Methyl-uridine phosphorothioate
  modified_base 100: mod_base = OTHER; note = 2'-O-Methyl-uridine
ggaagatagagaaatttctggttttagagctagaaatagcaagttaaaataaggctagtccgttatcaacttgaaaaagtggcaccgagtcggtgctttt

SEQ ID NO: 309 - RNA, 100 nt, synthetic construct
  source 1..100: mol_type = other RNA; note = Description of Artificial Sequence: Synthetic polynucleotide
  modified_base 1: mod_base = OTHER; note = 2'-O-Methyl-uridine phosphorothioate
  modified_base 2: mod_base = OTHER; note = 2'-O-Methyl-adenosine phosphorothioate
  modified_base 3: mod_base = OTHER; note = 2'-O-Methyl-uridine phosphorothioate
  modified_base 97: mod_base = OTHER; note = uridine phosphorothioate
  modified_base 98: mod_base = OTHER; note = 2'-O-Methyl-uridine phosphorothioate
  modified_base 99: mod_base = OTHER; note = 2'-O-Methyl-uridine phosphorothioate
  modified_base 100: mod_base = OTHER; note = 2'-O-Methyl-uridine
tatttcattcaactgaagaagttttagagctagaaatagcaagttaaaataaggctagtccgttatcaacttgaaaaagtggcaccgagtcggtgctttt

SEQ ID NO: 310 - RNA, 100 nt, synthetic construct
  source 1..100: mol_type = other RNA; note = Description of Artificial Sequence: Synthetic polynucleotide
  modified_base 1: mod_base = OTHER; note = 2'-O-Methyl-adenosine phosphorothioate
  modified_base 2: mod_base = OTHER; note = 2'-O-Methyl-uridine phosphorothioate
  modified_base 3: mod_base = OTHER; note = 2'-O-Methyl-uridine phosphorothioate
  modified_base 97: mod_base = OTHER; note = uridine phosphorothioate
  modified_base 98: mod_base = OTHER; note = 2'-O-Methyl-uridine phosphorothioate
  modified_base 99: mod_base = OTHER; note = 2'-O-Methyl-uridine phosphorothioate
  modified_base 100: mod_base = OTHER; note = 2'-O-Methyl-uridine
atttcattcaactgaagaaagttttagagctagaaatagcaagttaaaataaggctagtccgttatcaacttgaaaaagtggcaccgagtcggtgctttt

SEQ ID NO: 311 - RNA, 100 nt, synthetic construct
  source 1..100: mol_type = other RNA; note = Description of Artificial Sequence: Synthetic polynucleotide
  modified_base 1: mod_base = OTHER; note = 2'-O-Methyl-guanosine phosphorothioate
  modified_base 2: mod_base = OTHER; note = 2'-O-Methyl-uridine phosphorothioate
  modified_base 3: mod_base = OTHER; note = 2'-O-Methyl-cytidine phosphorothioate
  modified_base 97: mod_base = OTHER; note = uridine phosphorothioate
  modified_base 98: mod_base = OTHER; note = 2'-O-Methyl-uridine phosphorothioate
  modified_base 99: mod_base = OTHER; note = 2'-O-Methyl-uridine phosphorothioate
  modified_base 100: mod_base = OTHER; note = 2'-O-Methyl-uridine
gtctactgtgatgttatatcgttttagagctagaaatagcaagttaaaataaggctagtccgttatcaacttgaaaaagtggcaccgagtcggtgctttt

SEQ ID NO: 312 - RNA, 100 nt, synthetic construct
  source 1..100: mol_type = other RNA; note = Description of Artificial Sequence: Synthetic polynucleotide
  modified_base 1: mod_base = OTHER; note = 2'-O-Methyl-uridine phosphorothioate
  modified_base 2: mod_base = OTHER; note = 2'-O-Methyl-adenosine phosphorothioate
  modified_base 3: mod_base = OTHER; note = 2'-O-Methyl-adenosine phosphorothioate
  modified_base 97: mod_base = OTHER; note = uridine phosphorothioate
  modified_base 98: mod_base = OTHER; note = 2'-O-Methyl-uridine phosphorothioate
  modified_base 99: mod_base = OTHER; note = 2'-O-Methyl-uridine phosphorothioate
  modified_base 100: mod_base = OTHER; note = 2'-O-Methyl-uridine
taaatggtggtacattcagcgttttagagctagaaatagcaagttaaaataaggctagtccgttatcaacttgaaaaagtggcaccgagtcggtgctttt

SEQ ID NO: 313 - RNA, 100 nt, synthetic construct
  source 1..100: mol_type = other RNA; note = Description of Artificial Sequence: Synthetic polynucleotide
  modified_base 1: mod_base = OTHER; note = 2'-O-Methyl-uridine phosphorothioate
  modified_base 2: mod_base = OTHER; note = 2'-O-Methyl-adenosine phosphorothioate
  modified_base 3: mod_base = OTHER; note = 2'-O-Methyl-uridine phosphorothioate
  modified_base 97: mod_base = OTHER; note = uridine phosphorothioate
  modified_base 98: mod_base = OTHER; note = 2'-O-Methyl-uridine phosphorothioate
  modified_base 99: mod_base = OTHER; note = 2'-O-Methyl-uridine phosphorothioate
  modified_base 100: mod_base = OTHER; note = 2'-O-Methyl-uridine
tatcaggtaaaacctgtctagttttagagctagaaatagcaagttaaaataaggctagtccgttatcaacttgaaaaagtggcaccgagtcggtgctttt

SEQ ID NO: 314 - RNA, 100 nt, synthetic construct
  source 1..100: mol_type = other RNA; note = Description of Artificial Sequence: Synthetic polynucleotide
  modified_base 1: mod_base = OTHER; note = 2'-O-Methyl-uridine phosphorothioate
  modified_base 2: mod_base = OTHER; note = 2'-O-Methyl-guanosine phosphorothioate
  modified_base 3: mod_base = OTHER; note = 2'-O-Methyl-uridine phosphorothioate
  modified_base 97: mod_base = OTHER; note = uridine phosphorothioate
  modified_base 98: mod_base = OTHER; note = 2'-O-Methyl-uridine phosphorothioate
  modified_base 99: mod_base = OTHER; note = 2'-O-Methyl-uridine phosphorothioate
  modified_base 100: mod_base = OTHER; note = 2'-O-Methyl-uridine
tgtaccaccatttataacaggttttagagctagaaatagcaagttaaaataaggctagtccgttatcaacttgaaaaagtggcaccgagtcggtgctttt

SEQ ID NO: 315 - RNA, 100 nt, synthetic construct
  source 1..100: mol_type = other RNA; note = Description of Artificial Sequence: Synthetic polynucleotide
  modified_base 1: mod_base = OTHER; note = 2'-O-Methyl-uridine phosphorothioate
  modified_base 2: mod_base = OTHER; note = 2'-O-Methyl-uridine phosphorothioate
  modified_base 3: mod_base = OTHER; note = 2'-O-Methyl-cytidine phosphorothioate
  modified_base 97: mod_base = OTHER; note = uridine phosphorothioate
  modified_base 98: mod_base = OTHER; note = 2'-O-Methyl-uridine phosphorothioate
  modified_base 99: mod_base = OTHER; note = 2'-O-Methyl-uridine phosphorothioate
  modified_base 100: mod_base = OTHER; note = 2'-O-Methyl-uridine
ttcacctctgttataaatgggttttagagctagaaatagcaagttaaaataaggctagtccgttatcaacttgaaaaagtggcaccgagtcggtgctttt

SEQ ID NO: 316 - RNA, 100 nt, synthetic construct
  source 1..100: mol_type = other RNA; note = Description of Artificial Sequence: Synthetic polynucleotide
  modified_base 1: mod_base = OTHER; note = 2'-O-Methyl-adenosine phosphorothioate
  modified_base 2: mod_base = OTHER; note = 2'-O-Methyl-adenosine phosphorothioate
  modified_base 3: mod_base = OTHER; note = 2'-O-Methyl-cytidine phosphorothioate
  modified_base 97: mod_base = OTHER; note = uridine phosphorothioate
  modified_base 98: mod_base = OTHER; note = 2'-O-Methyl-uridine phosphorothioate
  modified_base 99: mod_base = OTHER; note = 2'-O-Methyl-uridine phosphorothioate
  modified_base 100: mod_base = OTHER; note = 2'-O-Methyl-uridine
aacagaggtgaacatacaaggttttagagctagaaatagcaagttaaaataaggctagtccgttatcaacttgaaaaagtggcaccgagtcggtgctttt

SEQ ID NO: 317 - RNA, 100 nt, synthetic construct
  source 1..100: mol_type = other RNA; note = Description of Artificial Sequence: Synthetic polynucleotide
  modified_base 1: mod_base = OTHER; note = 2'-O-Methyl-uridine phosphorothioate
  modified_base 2: mod_base = OTHER; note = 2'-O-Methyl-uridine phosphorothioate
  modified_base 3: mod_base = OTHER; note = 2'-O-Methyl-guanosine phosphorothioate
  modified_base 97: mod_base = OTHER; note = uridine phosphorothioate
  modified_base 98: mod_base = OTHER; note = 2'-O-Methyl-uridine phosphorothioate
  modified_base 99: mod_base = OTHER; note = 2'-O-Methyl-uridine phosphorothioate
  modified_base 100: mod_base = OTHER; note = 2'-O-Methyl-uridine
ttgagagttgctgggtctgagttttagagctagaaatagcaagttaaaataaggctagtccgttatcaacttgaaaaagtggcaccgagtcggtgctttt

SEQ ID NO: 318 - RNA, 100 nt, synthetic construct
  source 1..100: mol_type = other RNA; note = Description of Artificial Sequence: Synthetic polynucleotide
  modified_base 1: mod_base = OTHER; note = 2'-O-Methyl-uridine phosphorothioate
  modified_base 2: mod_base = OTHER; note = 2'-O-Methyl-guanosine phosphorothioate
  modified_base 3: mod_base = OTHER; note = 2'-O-Methyl-adenosine phosphorothioate
  modified_base 97: mod_base = OTHER; note = uridine phosphorothioate
  modified_base 98: mod_base = OTHER; note = 2'-O-Methyl-uridine phosphorothioate
  modified_base 99: mod_base = OTHER; note = 2'-O-Methyl-uridine phosphorothioate
  modified_base 100: mod_base = OTHER; note = 2'-O-Methyl-uridine
tgaaaaacttgagagttgctgttttagagctagaaatagcaagttaaaataaggctagtccgttatcaacttgaaaaagtggcaccgagtcggtgctttt

SEQ ID NO: 319 - RNA, 100 nt, synthetic construct
  source 1..100: mol_type = other RNA; note = Description of Artificial Sequence: Synthetic polynucleotide
  modified_base 1: mod_base = OTHER; note = 2'-O-Methyl-uridine phosphorothioate
  modified_base 2: mod_base = OTHER; note = 2'-O-Methyl-uridine phosphorothioate
  modified_base 3: mod_base = OTHER; note = 2'-O-Methyl-adenosine phosphorothioate
  modified_base 97: mod_base = OTHER; note = uridine phosphorothioate
  modified_base 98: mod_base = OTHER; note = 2'-O-Methyl-uridine phosphorothioate
  modified_base 99: mod_base = OTHER; note = 2'-O-Methyl-uridine phosphorothioate
  modified_base 100: mod_base = OTHER; note = 2'-O-Methyl-uridine
ttaattcaacatcgaatagagttttagagctagaaatagcaagttaaaataaggctagtccgttatcaacttgaaaaagtggcaccgagtcggtgctttt

SEQ ID NO: 320 - RNA, 100 nt, synthetic construct
  source 1..100: mol_type = other RNA; note = Description of Artificial Sequence: Synthetic polynucleotide
  modified_base 1: mod_base = OTHER; note = 2'-O-Methyl-uridine phosphorothioate
  modified_base 2: mod_base = OTHER; note = 2'-O-Methyl-uridine phosphorothioate
  modified_base 3: mod_base = OTHER; note = 2'-O-Methyl-uridine phosphorothioate
  modified_base 97: mod_base = OTHER; note = uridine phosphorothioate
  modified_base 98: mod_base = OTHER; note = 2'-O-Methyl-uridine phosphorothioate
  modified_base 99: mod_base = OTHER; note = 2'-O-Methyl-uridine phosphorothioate
  modified_base 100: mod_base = OTHER; note = 2'-O-Methyl-uridine
tttgggaggcttgatggtaagttttagagctagaaatagcaagttaaaataaggctagtccgttatcaacttgaaaaagtggcaccgagtcggtgctttt

SEQ ID NO: 321 - RNA, 100 nt, synthetic construct
  source 1..100: mol_type = other RNA; note = Description of Artificial Sequence: Synthetic polynucleotide
  modified_base 1: mod_base = OTHER; note = 2'-O-Methyl-cytidine phosphorothioate
  modified_base 2: mod_base = OTHER; note = 2'-O-Methyl-adenosine phosphorothioate
  modified_base 3: mod_base = OTHER; note = 2'-O-Methyl-uridine phosphorothioate
  modified_base 97: mod_base = OTHER; note = uridine phosphorothioate
  modified_base 98: mod_base = OTHER; note = 2'-O-Methyl-uridine phosphorothioate
  modified_base 99: mod_base = OTHER; note = 2'-O-Methyl-uridine phosphorothioate
  modified_base 100: mod_base = OTHER; note = 2'-O-Methyl-uridine
cattatattcaggtagtccagttttagagctagaaatagcaagttaaaataaggctagtccgttatcaacttgaaaaagtggcaccgagtcggtgctttt

SEQ ID NO: 322 - RNA, 100 nt, synthetic construct
  source 1..100: mol_type = other RNA; note = Description of Artificial Sequence: Synthetic polynucleotide
  modified_base 1: mod_base = OTHER; note = 2'-O-Methyl-uridine phosphorothioate
  modified_base 2: mod_base = OTHER; note = 2'-O-Methyl-uridine phosphorothioate
  modified_base 3: mod_base = OTHER; note = 2'-O-Methyl-guanosine phosphorothioate
  modified_base 97: mod_base = OTHER; note = uridine phosphorothioate
  modified_base 98: mod_base = OTHER; note = 2'-O-Methyl-uridine phosphorothioate
  modified_base 99: mod_base = OTHER; note = 2'-O-Methyl-uridine phosphorothioate
  modified_base 100: mod_base = OTHER; note = 2'-O-Methyl-uridine
ttgggaggcttgatggtaaggttttagagctagaaatagcaagttaaaataaggctagtccgttatcaacttgaaaaagtggcaccgagtcggtgctttt

SEQ ID NO: 323 - RNA, 100 nt, synthetic construct
  source 1..100: mol_type = other RNA; note = Description of Artificial Sequence: Synthetic polynucleotide
  modified_base 1: mod_base = OTHER; note = 2'-O-Methyl-uridine phosphorothioate
  modified_base 2: mod_base = OTHER; note = 2'-O-Methyl-uridine phosphorothioate
  modified_base 3: mod_base = OTHER; note = 2'-O-Methyl-uridine phosphorothioate
  modified_base 97: mod_base = OTHER; note = uridine phosphorothioate
  modified_base 98: mod_base = OTHER; note = 2'-O-Methyl-uridine phosphorothioate
  modified_base 99: mod_base = OTHER; note = 2'-O-Methyl-uridine phosphorothioate
  modified_base 100: mod_base = OTHER; note = 2'-O-Methyl-uridine
ttttgggaggcttgatggtagttttagagctagaaatagcaagttaaaataaggctagtccgttatcaacttgaaaaagtggcaccgagtcggtgctttt

SEQ ID NO: 324 - RNA, 100 nt, synthetic construct
  source 1..100: mol_type = other RNA; note = Description of Artificial Sequence: Synthetic polynucleotide
  modified_base 1: mod_base = OTHER; note = 2'-O-Methyl-adenosine phosphorothioate
  modified_base 2: mod_base = OTHER; note = 2'-O-Methyl-cytidine phosphorothioate
  modified_base 3: mod_base = OTHER; note = 2'-O-Methyl-adenosine phosphorothioate
  modified_base 97: mod_base = OTHER; note = uridine phosphorothioate
  modified_base 98: mod_base = OTHER; note = 2'-O-Methyl-uridine phosphorothioate
  modified_base 99: mod_base = OTHER; note = 2'-O-Methyl-uridine phosphorothioate
  modified_base 100: mod_base = OTHER; note = 2'-O-Methyl-uridine
acaaaacttcaatgaaacgtgttttagagctagaaatagcaagttaaaataaggctagtccgttatcaacttgaaaaagtggcaccgagtcggtgctttt

SEQ ID NO: 325 - RNA, 100 nt, synthetic construct
  source 1..100: mol_type = other RNA; note = Description of Artificial Sequence: Synthetic polynucleotide
  modified_base 1: mod_base = OTHER; note = 2'-O-Methyl-uridine phosphorothioate
  modified_base 2: mod_base = OTHER; note = 2'-O-Methyl-adenosine phosphorothioate
  modified_base 3: mod_base = OTHER; note = 2'-O-Methyl-uridine phosphorothioate
  modified_base 97: mod_base = OTHER; note = uridine phosphorothioate
  modified_base 98: mod_base = OTHER; note = 2'-O-Methyl-uridine phosphorothioate
  modified_base 99: mod_base = OTHER; note = 2'-O-Methyl-uridine phosphorothioate
  modified_base 100: mod_base = OTHER; note = 2'-O-Methyl-uridine
tatggttttgggaggcttgagttttagagctagaaatagcaagttaaaataaggctagtccgttatcaacttgaaaaagtggcaccgagtcggtgctttt

SEQ ID NO: 326 - RNA, 100 nt, synthetic construct
  source 1..100: mol_type = other RNA; note = Description of Artificial Sequence: Synthetic polynucleotide
  modified_base 1: mod_base = OTHER; note = 2'-O-Methyl-adenosine phosphorothioate
  modified_base 2: mod_base = OTHER; note = 2'-O-Methyl-cytidine phosphorothioate
  modified_base 3: mod_base = OTHER; note = 2'-O-Methyl-uridine phosphorothioate
  modified_base 97: mod_base = OTHER; note = uridine phosphorothioate
  modified_base 98: mod_base = OTHER; note = 2'-O-Methyl-uridine phosphorothioate
  modified_base 99: mod_base = OTHER; note = 2'-O-Methyl-uridine phosphorothioate
  modified_base 100: mod_base = OTHER; note = 2'-O-Methyl-uridine
actacaaatatggttttggggttttagagctagaaatagcaagttaaaataaggctagtccgttatcaacttgaaaaagtggcaccgagtcggtgctttt

SEQ ID NO: 327 - RNA, 100 nt, synthetic construct
  source 1..100: mol_type = other RNA; note = Description of Artificial Sequence: Synthetic polynucleotide
  modified_base 1: mod_base = OTHER; note = 2'-O-Methyl-guanosine phosphorothioate
  modified_base 2: mod_base = OTHER; note = 2'-O-Methyl-adenosine phosphorothioate
  modified_base 3: mod_base = OTHER; note = 2'-O-Methyl-guanosine phosphorothioate
  modified_base 97: mod_base = OTHER; note = uridine phosphorothioate
  modified_base 98: mod_base = OTHER; note = 2'-O-Methyl-uridine phosphorothioate
  modified_base 99: mod_base = OTHER; note = 2'-O-Methyl-uridine phosphorothioate
  modified_base 100: mod_base = OTHER; note = 2'-O-Methyl-uridine
gagaactacaaatatggtttgttttagagctagaaatagcaagttaaaataaggctagtccgttatcaacttgaaaaagtggcaccgagtcggtgctttt

SEQ ID NO: 328 - RNA, 100 nt, synthetic construct
  source 1..100: mol_type = other RNA; note = Description of Artificial Sequence: Synthetic polynucleotide
  modified_base 1: mod_base = OTHER; note = 2'-O-Methyl-adenosine phosphorothioate
  modified_base 2: mod_base = OTHER; note = 2'-O-Methyl-guanosine phosphorothioate
  modified_base 3: mod_base = OTHER; note = 2'-O-Methyl-guanosine phosphorothioate
  modified_base 97: mod_base = OTHER; note = uridine phosphorothioate
  modified_base 98: mod_base = OTHER; note = 2'-O-Methyl-uridine phosphorothioate
  modified_base 99: mod_base = OTHER; note = 2'-O-Methyl-uridine phosphorothioate
  modified_base 100: mod_base = OTHER; note = 2'-O-Methyl-uridine
aggacacttcaactgtccaggttttagagctagaaatagcaagttaaaataaggctagtccgttatcaacttgaaaaagtggcaccgagtcggtgctttt

SEQ ID NO: 329 - RNA, 100 nt, synthetic construct
  source 1..100: mol_type = other RNA; note = Description of Artificial Sequence: Synthetic polynucleotide
  modified_base 1: mod_base = OTHER; note = 2'-O-Methyl-guanosine phosphorothioate
  modified_base 2: mod_base = OTHER; note = 2'-O-Methyl-cytidine phosphorothioate
  modified_base 3: mod_base = OTHER; note = 2'-O-Methyl-cytidine phosphorothioate
  modified_base 97: mod_base = OTHER; note = uridine phosphorothioate
  modified_base 98: mod_base = OTHER; note = 2'-O-Methyl-uridine phosphorothioate
  modified_base 99: mod_base = OTHER; note = 2'-O-Methyl-uridine phosphorothioate
  modified_base 100: mod_base = OTHER; note = 2'-O-Methyl-uridine
gccgtcctcctcggaacgcagttttagagctagaaatagcaagttaaaataaggctagtccgttatcaacttgaaaaagtggcaccgagtcggtgctttt

SEQ ID NO: 330 - RNA, 100 nt, synthetic construct
  source 1..100: mol_type = other RNA; note = Description of Artificial Sequence: Synthetic polynucleotide
  modified_base 1: mod_base = OTHER; note = 2'-O-Methyl-guanosine phosphorothioate
  modified_base 2: mod_base = OTHER; note = 2'-O-Methyl-cytidine phosphorothioate
  modified_base 3: mod_base = OTHER; note = 2'-O-Methyl-uridine phosphorothioate
  modified_base 97: mod_base = OTHER; note = uridine phosphorothioate
  modified_base 98: mod_base = OTHER; note = 2'-O-Methyl-uridine phosphorothioate
  modified_base 99: mod_base = OTHER; note = 2'-O-Methyl-uridine phosphorothioate
  modified_base 100: mod_base = OTHER; note = 2'-O-Methyl-uridine
gctagccttgcgttccgagggttttagagctagaaatagcaagttaaaataaggctagtccgttatcaacttgaaaaagtggcaccgagtcggtgctttt

SEQ ID NO: 331 - RNA, 100 nt, synthetic construct
  source 1..100: mol_type = other RNA; note = Description of Artificial Sequence: Synthetic polynucleotide
  modified_base 1: mod_base = OTHER; note = 2'-O-Methyl-guanosine phosphorothioate
  modified_base 2: mod_base = OTHER; note = 2'-O-Methyl-cytidine phosphorothioate
  modified_base 3: mod_base = OTHER; note = 2'-O-Methyl-guanosine phosphorothioate
  modified_base 97: mod_base = OTHER; note = uridine phosphorothioate
  modified_base 98: mod_base = OTHER; note = 2'-O-Methyl-uridine phosphorothioate
  modified_base 99: mod_base = OTHER; note = 2'-O-Methyl-uridine phosphorothioate
  modified_base 100: mod_base = OTHER; note = 2'-O-Methyl-uridine
gcgttccgaggaggacggccgttttagagctagaaatagcaagttaaaataaggctagtccgttatcaacttgaaaaagtggcaccgagtcggtgctttt

SEQ ID NO: 332 - RNA, 100 nt, synthetic construct
  source 1..100: mol_type = other RNA; note = Description of Artificial Sequence: Synthetic polynucleotide
  modified_base 1: mod_base = OTHER; note = 2'-O-Methyl-guanosine phosphorothioate
  modified_base 2: mod_base = OTHER; note = 2'-O-Methyl-cytidine phosphorothioate
  modified_base 3: mod_base = OTHER; note = 2'-O-Methyl-cytidine phosphorothioate
  modified_base 97: mod_base = OTHER; note = uridine phosphorothioate
  modified_base 98: mod_base = OTHER; note = 2'-O-Methyl-uridine phosphorothioate
  modified_base 99: mod_base = OTHER; note = 2'-O-Methyl-uridine phosphorothioate
  modified_base 100: mod_base = OTHER; note = 2'-O-Methyl-uridine
gccttgcgttccgaggaggagttttagagctagaaatagcaagttaaaataaggctagtccgttatcaacttgaaaaagtggcaccgagtcggtgctttt

SEQ ID NO: 333 - RNA, 100 nt, synthetic construct
  source 1..100: mol_type = other RNA; note = Description of Artificial Sequence: Synthetic polynucleotide
  modified_base 1: mod_base = OTHER; note = 2'-O-Methyl-guanosine phosphorothioate
  modified_base 2: mod_base = OTHER; note = 2'-O-Methyl-guanosine phosphorothioate
  modified_base 3: mod_base = OTHER; note = 2'-O-Methyl-adenosine phosphorothioate
  modified_base 97: mod_base = OTHER; note = uridine phosphorothioate
  modified_base 98: mod_base = OTHER; note = 2'-O-Methyl-uridine phosphorothioate
  modified_base 99: mod_base = OTHER; note = 2'-O-Methyl-uridine phosphorothioate
  modified_base 100: mod_base = OTHER; note = 2'-O-Methyl-uridine
ggacgaggacggcgactacggttttagagctagaaatagcaagttaaaataaggctagtccgttatcaacttgaaaaagtggcaccgagtcggtgctttt

SEQ ID NO: 334 - RNA, 100 nt, synthetic construct
  source 1..100: mol_type = other RNA; note = Description of Artificial Sequence: Synthetic polynucleotide
  modified_base 1: mod_base = OTHER; note = 2'-O-Methyl-guanosine phosphorothioate
  modified_base 2: mod_base = OTHER; note = 2'-O-Methyl-guanosine phosphorothioate
  modified_base 3: mod_base = OTHER; note = 2'-O-Methyl-adenosine phosphorothioate
  modified_base 97: mod_base = OTHER; note = uridine phosphorothioate
  modified_base 98: mod_base = OTHER; note = 2'-O-Methyl-uridine phosphorothioate
  modified_base 99: mod_base = OTHER; note = 2'-O-Methyl-uridine phosphorothioate
  modified_base 100: mod_base = OTHER; note = 2'-O-Methyl-uridine
ggacggcgactacgaggagcgttttagagctagaaatagcaagttaaaataaggctagtccgttatcaacttgaaaaagtggcaccgagtcggtgctttt

SEQ ID NO: 335 - RNA, 100 nt, synthetic construct
  source 1..100: mol_type = other RNA; note = Description of Artificial Sequence: Synthetic polynucleotide
  modified_base 1: mod_base = OTHER; note = 2'-O-Methyl-cytidine phosphorothioate
  modified_base 2: mod_base = OTHER; note = 2'-O-Methyl-guanosine phosphorothioate
  modified_base 3: mod_base = OTHER; note = 2'-O-Methyl-uridine phosphorothioate
  modified_base 97: mod_base = OTHER; note = uridine phosphorothioate
  modified_base 98: mod_base = OTHER; note = 2'-O-Methyl-uridine phosphorothioate
  modified_base 99: mod_base = OTHER; note = 2'-O-Methyl-uridine phosphorothioate
  modified_base 100: mod_base = OTHER; note = 2'-O-Methyl-uridine
cgtcctcgtcctcctgcgcagttttagagctagaaatagcaagttaaaataaggctagtccgttatcaacttgaaaaagtggcaccgagtcggtgctttt

SEQ ID NO: 336 - RNA, 100 nt, synthetic construct
  source 1..100: mol_type = other RNA; note = Description of Artificial Sequence: Synthetic polynucleotide
  modified_base 1: mod_base = OTHER; note = 2'-O-Methyl-guanosine phosphorothioate
  modified_base 2: mod_base = OTHER; note = 2'-O-Methyl-uridine phosphorothioate
  modified_base 3: mod_base = OTHER; note = 2'-O-Methyl-cytidine phosphorothioate
  modified_base 97: mod_base = OTHER; note = uridine phosphorothioate
  modified_base 98: mod_base = OTHER; note = 2'-O-Methyl-uridine phosphorothioate
  modified_base 99: mod_base = OTHER; note = 2'-O-Methyl-uridine phosphorothioate
  modified_base 100: mod_base = OTHER; note = 2'-O-Methyl-uridine
gtcctcgtcctcctgcgcacgttttagagctagaaatagcaagttaaaataaggctagtccgttatcaacttgaaaaagtggcaccgagtcggtgctttt

SEQ ID NO: 337 - RNA, 100 nt, synthetic construct
  source 1..100: mol_type = other RNA; note = Description of Artificial Sequence: Synthetic polynucleotide
  modified_base 1: mod_base = OTHER; note = 2'-O-Methyl-cytidine phosphorothioate
  modified_base 2: mod_base = OTHER; note = 2'-O-Methyl-cytidine phosphorothioate
  modified_base 3: mod_base = OTHER; note = 2'-O-Methyl-guanosine phosphorothioate
  modified_base 97: mod_base = OTHER; note = uridine phosphorothioate
  modified_base 98: mod_base = OTHER; note = 2'-O-Methyl-uridine phosphorothioate
  modified_base 99: mod_base = OTHER; note = 2'-O-Methyl-uridine phosphorothioate
  modified_base 100: mod_base = OTHER; note = 2'-O-Methyl-uridine
ccgtcagctccaggcggtccgttttagagctagaaatagcaagttaaaataaggctagtccgttatcaacttgaaaaagtggcaccgagtcggtgctttt

SEQ ID NO: 338 - RNA, 100 nt, synthetic construct
  source 1..100: mol_type = other RNA; note = Description of Artificial Sequence: Synthetic polynucleotide
  modified_base 1: mod_base = OTHER; note = 2'-O-Methyl-cytidine phosphorothioate
  modified_base 2: mod_base = OTHER; note = 2'-O-Methyl-guanosine phosphorothioate
  modified_base 3: mod_base = OTHER; note = 2'-O-Methyl-cytidine phosphorothioate
  modified_base 97: mod_base = OTHER; note = uridine phosphorothioate
  modified_base 98: mod_base = OTHER; note = 2'-O-Methyl-uridine phosphorothioate
  modified_base 99: mod_base = OTHER; note = 2'-O-Methyl-uridine phosphorothioate
  modified_base 100: mod_base = OTHER; note = 2'-O-Methyl-uridine
cgcccgtgcgcaggaggacggttttagagctagaaatagcaagttaaaataaggctagtccgttatcaacttgaaaaagtggcaccgagtcggtgctttt

SEQ ID NO: 339 - RNA, 100 nt, synthetic construct
  source 1..100: mol_type = other RNA; note = Description of Artificial Sequence: Synthetic polynucleotide
  modified_base 1: mod_base = OTHER; note = 2'-O-Methyl-uridine phosphorothioate
  modified_base 2: mod_base = OTHER; note = 2'-O-Methyl-cytidine phosphorothioate
  modified_base 3: mod_base = OTHER; note = 2'-O-Methyl-adenosine phosphorothioate
  modified_base 97: mod_base = OTHER; note = uridine phosphorothioate
  modified_base 98: mod_base = OTHER; note = 2'-O-Methyl-uridine phosphorothioate
  modified_base 99: mod_base = OTHER; note = 2'-O-Methyl-uridine phosphorothioate
  modified_base 100: mod_base = OTHER; note = 2'-O-Methyl-uridine
tcagctccaggcggtcctgggttttagagctagaaatagcaagttaaaataaggctagtccgttatcaacttgaaaaagtggcaccgagtcggtgctttt

SEQ ID NO: 340 - RNA, 100 nt, synthetic construct
  source 1..100: mol_type = other RNA; note = Description of Artificial Sequence: Synthetic polynucleotide
  modified_base 1: mod_base = OTHER; note = 2'-O-Methyl-cytidine phosphorothioate
  modified_base 2: mod_base = OTHER; note = 2'-O-Methyl-uridine phosphorothioate
  modified_base 3: mod_base = OTHER; note = 2'-O-Methyl-uridine phosphorothioate
  modified_base 97: mod_base = OTHER; note = uridine phosphorothioate
  modified_base 98: mod_base = OTHER; note = 2'-O-Methyl-uridine phosphorothioate
  modified_base 99: mod_base = OTHER; note = 2'-O-Methyl-uridine phosphorothioate
  modified_base 100: mod_base = OTHER; note = 2'-O-Methyl-uridine
cttggcgcagcggtggaagggttttagagctagaaatagcaagttaaaataaggctagtccgttatcaacttgaaaaagtggcaccgagtcggtgctttt

SEQ ID NO: 341 - RNA, 100 nt, synthetic construct
  source 1..100: mol_type = other RNA; note = Description of Artificial Sequence: Synthetic polynucleotide
  modified_base 1: mod_base = OTHER; note = 2'-O-Methyl-cytidine phosphorothioate
  modified_base 2: mod_base = OTHER; note = 2'-O-Methyl-guanosine phosphorothioate
  modified_base 3: mod_base = OTHER; note = 2'-O-Methyl-uridine phosphorothioate
  modified_base 97: mod_base = OTHER; note = uridine phosphorothioate
  modified_base 98: mod_base = OTHER; note = 2'-O-Methyl-uridine phosphorothioate
  modified_base 99: mod_base = OTHER; note = 2'-O-Methyl-uridine phosphorothioate
  modified_base 100: mod_base = OTHER; note = 2'-O-Methyl-uridine
cgtgcgcaggaggacgaggagttttagagctagaaatagcaagttaaaataaggctagtccgttatcaacttgaaaaagtggcaccgagtcggtgctttt

SEQ ID NO: 342 - RNA, 100 nt, synthetic construct
  source 1..100: mol_type = other RNA; note = Description of Artificial Sequence: Synthetic polynucleotide
  modified_base 1: mod_base = OTHER; note = 2'-O-Methyl-cytidine phosphorothioate
  modified_base 2: mod_base = OTHER; note = 2'-O-Methyl-cytidine phosphorothioate
  modified_base 3: mod_base = OTHER; note = 2'-O-Methyl-adenosine phosphorothioate
  modified_base 97: mod_base = OTHER; note = uridine phosphorothioate
  modified_base 98: mod_base = OTHER; note = 2'-O-Methyl-uridine phosphorothioate
  modified_base 99: mod_base = OTHER; note = 2'-O-Methyl-uridine phosphorothioate
  modified_base 100: mod_base = OTHER; note = 2'-O-Methyl-uridine
ccaggaccgcctggagctgagttttagagctagaaatagcaagttaaaataaggctagtccgttatcaacttgaaaaagtggcaccgagtcggtgctttt

SEQ ID NO: 343 - RNA, 100 nt, synthetic construct
  source 1..100: mol_type = other RNA; note = Description of Artificial Sequence: Synthetic polynucleotide
  modified_base 1: mod_base = OTHER; note = 2'-O-Methyl-uridine phosphorothioate
  modified_base 2: mod_base = OTHER; note = 2'-O-Methyl-cytidine phosphorothioate
  modified_base 3: mod_base = OTHER; note = 2'-O-Methyl-uridine phosphorothioate
  modified_base 97: mod_base = OTHER; note = uridine phosphorothioate
  modified_base 98: mod_base = OTHER; note = 2'-O-Methyl-uridine phosphorothioate
  modified_base 99: mod_base = OTHER; note = 2'-O-Methyl-uridine phosphorothioate
  modified_base 100: mod_base = OTHER; note = 2'-O-Methyl-uridine
tcttggtgaggtatccccgggttttagagctagaaatagcaagttaaaataaggctagtccgttatcaacttgaaaaagtggcaccgagtcggtgctttt

SEQ ID NO: 344 - RNA, 100 nt, synthetic construct
  source 1..100: mol_type = other RNA; note = Description of Artificial Sequence: Synthetic polynucleotide
  modified_base 1: mod_base = OTHER; note = 2'-O-Methyl-cytidine phosphorothioate
  modified_base 2: mod_base = OTHER; note = 2'-O-Methyl-adenosine phosphorothioate
  modified_base 3: mod_base = OTHER; note = 2'-O-Methyl-guanosine phosphorothioate
  modified_base 97: mod_base = OTHER; note = uridine phosphorothioate
  modified_base 98: mod_base = OTHER; note = 2'-O-Methyl-uridine phosphorothioate
  modified_base 99: mod_base = OTHER; note = 2'-O-Methyl-uridine phosphorothioate
  modified_base 100: mod_base = OTHER; note = 2'-O-Methyl-uridine
cagtgcgctctgactgcgaggttttagagctagaaatagcaagttaaaataaggctagtccgttatcaacttgaaaaagtggcaccgagtcggtgctttt

SEQ ID NO: 345 - RNA, 100 nt, synthetic construct
  source 1..100: mol_type = other RNA; note = Description of Artificial Sequence: Synthetic polynucleotide
  modified_base 1: mod_base = OTHER; note = 2'-O-Methyl-cytidine phosphorothioate
  modified_base 2: mod_base = OTHER; note = 2'-O-Methyl-uridine phosphorothioate
  modified_base 3: mod_base = OTHER; note = 2'-O-Methyl-uridine phosphorothioate
  modified_base 97: mod_base = OTHER; note = uridine phosphorothioate
  modified_base 98: mod_base = OTHER; note = 2'-O-Methyl-uridine phosphorothioate
  modified_base 99: mod_base = OTHER; note = 2'-O-Methyl-uridine phosphorothioate
  modified_base 100: mod_base = OTHER; note = 2'-O-Methyl-uridine
cttggtgaggtatccccggcgttttagagctagaaatagcaagttaaaataaggctagtccgttatcaacttgaaaaagtggcaccgagtcggtgctttt

SEQ ID NO: 346 - RNA, 100 nt, synthetic construct
  source 1..100: mol_type = other RNA; note = Description of Artificial Sequence: Synthetic polynucleotide
  modified_base 1: mod_base = OTHER; note = 2'-O-Methyl-guanosine phosphorothioate
  modified_base 2: mod_base = OTHER; note = 2'-O-Methyl-guanosine phosphorothioate
  modified_base 3: mod_base = OTHER; note = 2'-O-Methyl-adenosine phosphorothioate
  modified_base 97: mod_base = OTHER; note = uridine phosphorothioate
  modified_base 98: mod_base = OTHER; note = 2'-O-Methyl-uridine phosphorothioate
  modified_base 99: mod_base = OTHER; note = 2'-O-Methyl-uridine phosphorothioate
  modified_base 100: mod_base = OTHER; note = 2'-O-Methyl-uridine
ggatcttggtgaggtatcccgttttagagctagaaatagcaagttaaaataaggctagtccgttatcaacttgaaaaagtggcaccgagtcggtgctttt

SEQ ID NO: 347 - RNA, 100 nt, synthetic construct
  source 1..100: mol_type = other RNA; note = Description of Artificial Sequence: Synthetic polynucleotide
  modified_base 1: mod_base = OTHER; note = 2'-O-Methyl-guanosine phosphorothioate
  modified_base 2: mod_base = OTHER; note = 2'-O-Methyl-adenosine phosphorothioate
  modified_base 3: mod_base = OTHER; note = 2'-O-Methyl-adenosine phosphorothioate
  modified_base 97: mod_base = OTHER; note = uridine phosphorothioate
  modified_base 98: mod_base = OTHER; note = 2'-O-Methyl-uridine phosphorothioate
  modified_base 99: mod_base = OTHER; note = 2'-O-Methyl-uridine phosphorothioate
  modified_base 100: mod_base = OTHER; note = 2'-O-Methyl-uridine
gaagatgagtggcgacctgcgttttagagctagaaatagcaagttaaaataaggctagtccgttatcaacttgaaaaagtggcaccgagtcggtgctttt

SEQ ID NO: 348 - RNA, 100 nt, synthetic construct
  source 1..100: mol_type = other RNA; note = Description of Artificial Sequence: Synthetic polynucleotide
  modified_base 1: mod_base = OTHER; note = 2'-O-Methyl-adenosine phosphorothioate
  modified_base 2: mod_base = OTHER; note = 2'-O-Methyl-guanosine phosphorothioate
  modified_base 3: mod_base = OTHER; note = 2'-O-Methyl-cytidine phosphorothioate
  modified_base 97: mod_base = OTHER; note = uridine phosphorothioate
  modified_base 98: mod_base = OTHER; note = 2'-O-Methyl-uridine phosphorothioate
  modified_base 99: mod_base = OTHER; note = 2'-O-Methyl-uridine phosphorothioate
  modified_base 100: mod_base = OTHER; note = 2'-O-Methyl-uridine
agcaccaccacgtaggtgccgttttagagctagaaatagcaagttaaaataaggctagtccgttatcaacttgaaaaagtggcaccgagtcggtgctttt

SEQ ID NO: 349 - RNA, 100 nt, synthetic construct
  source 1..100: mol_type = other RNA; note = Description of Artificial Sequence: Synthetic polynucleotide
  modified_base 1: mod_base = OTHER; note = 2'-O-Methyl-guanosine phosphorothioate
  modified_base 2: mod_base = OTHER; note = 2'-O-Methyl-guanosine phosphorothioate
  modified_base 3: mod_base = OTHER; note = 2'-O-Methyl-uridine phosphorothioate
  modified_base 97: mod_base = OTHER; note = uridine phosphorothioate
  modified_base 98: mod_base = OTHER; note = 2'-O-Methyl-uridine phosphorothioate
  modified_base 99: mod_base = OTHER; note = 2'-O-Methyl-uridine phosphorothioate
  modified_base 100: mod_base = OTHER; note = 2'-O-Methyl-uridine
ggtcgccactcatcttcaccgttttagagctagaaatagcaagttaaaataaggctagtccgttatcaacttgaaaaagtggcaccgagtcggtgctttt

SEQ ID NO: 350 - RNA, 100 nt, synthetic construct
  source 1..100: mol_type = other RNA; note = Description of Artificial Sequence: Synthetic polynucleotide
  modified_base 1: mod_base = OTHER; note = 2'-O-Methyl-cytidine phosphorothioate
  modified_base 2: mod_base = OTHER; note = 2'-O-Methyl-uridine phosphorothioate
  modified_base 3: mod_base = OTHER; note = 2'-O-Methyl-cytidine phosphorothioate
  modified_base 97: mod_base = OTHER; note = uridine phosphorothioate
  modified_base 98: mod_base = OTHER; note = 2'-O-Methyl-uridine phosphorothioate
  modified_base 99: mod_base = OTHER; note = 2'-O-Methyl-uridine phosphorothioate
  modified_base 100: mod_base = OTHER; note = 2'-O-Methyl-uridine
ctccttcagcaccaccacgtgttttagagctagaaatagcaagttaaaataaggctagtccgttatcaacttgaaaaagtggcaccgagtcggtgctttt

SEQ ID NO: 351 - RNA, 100 nt, synthetic construct
  source 1..100: mol_type = other RNA; note = Description of Artificial Sequence: Synthetic polynucleotide
  modified_base 1: mod_base = OTHER; note = 2'-O-Methyl-guanosine phosphorothioate
  modified_base 2: mod_base = OTHER; note = 2'-O-Methyl-adenosine phosphorothioate
  modified_base 3: mod_base = OTHER; note = 2'-O-Methyl-guanosine phosphorothioate
  modified_base 97: mod_base = OTHER; note = uridine phosphorothioate
  modified_base 98: mod_base = OTHER; note = 2'-O-Methyl-uridine phosphorothioate
  modified_base 99: mod_base = OTHER; note = 2'-O-Methyl-uridine phosphorothioate
  modified_base 100: mod_base = OTHER; note = 2'-O-Methyl-uridine
gagtggcgacctgctggagcgttttagagctagaaatagcaagttaaaataaggctagtccgttatcaacttgaaaaagtggcaccgagtcggtgctttt

SEQ ID NO: 352 - RNA, 100 nt, synthetic construct
  source 1..100: mol_type = other RNA; note = Description of Artificial Sequence: Synthetic polynucleotide
  modified_base 1: mod_base = OTHER; note = 2'-O-Methyl-guanosine phosphorothioate
  modified_base 2: mod_base = OTHER; note = 2'-O-Methyl-cytidine phosphorothioate
  modified_base 3: mod_base = OTHER; note = 2'-O-Methyl-guanosine phosphorothioate
  modified_base 97: mod_base = OTHER; note = uridine phosphorothioate
  modified_base 98: mod_base = OTHER; note = 2'-O-Methyl-uridine phosphorothioate
  modified_base 99: mod_base = OTHER; note = 2'-O-Methyl-uridine phosphorothioate
  modified_base 100: mod_base = OTHER; note = 2'-O-Methyl-uridine
gcgcactgcccgccgcctgcgttttagagctagaaatagcaagttaaaataaggctagtccgttatcaacttgaaaaagtggcaccgagtcggtgctttt

SEQ ID NO: 353 - RNA, 100 nt, synthetic construct
  source 1..100: mol_type = other RNA; note = Description of Artificial Sequence: Synthetic polynucleotide
  modified_base 1: mod_base = OTHER; note = 2'-O-Methyl-guanosine phosphorothioate
  modified_base 2: mod_base = OTHER; note = 2'-O-Methyl-guanosine phosphorothioate
  modified_base 3: mod_base = OTHER; note = 2'-O-Methyl-cytidine phosphorothioate
  modified_base 97: mod_base = OTHER; note = uridine phosphorothioate
  modified_base 98: mod_base = OTHER; note = 2'-O-Methyl-uridine phosphorothioate
  modified_base 99: mod_base = OTHER; note = 2'-O-Methyl-uridine phosphorothioate
  modified_base 100: mod_base = OTHER; note = 2'-O-Methyl-uridine
ggcttcctggtgaagatgaggttttagagctagaaatagcaagttaaaataaggctagtccgttatcaacttgaaaaagtggcaccgagtcggtgctttt

SEQ ID NO: 354 - RNA, 100 nt, synthetic construct
  source 1..100: mol_type = other RNA; note = Description of Artificial Sequence: Synthetic polynucleotide
  modified_base 1: mod_base = OTHER; note = 2'-O-Methyl-cytidine phosphorothioate
  modified_base 2: mod_base = OTHER; note = 2'-O-Methyl-adenosine phosphorothioate
  modified_base 3: mod_base = OTHER; note = 2'-O-Methyl-cytidine phosphorothioate
  modified_base 97: mod_base = OTHER; note = uridine phosphorothioate
  modified_base 98: mod_base = OTHER; note = 2'-O-Methyl-uridine phosphorothioate
  modified_base 99: mod_base = OTHER; note = 2'-O-Methyl-uridine phosphorothioate
  modified_base 100: mod_base = OTHER; note = 2'-O-Methyl-uridine
cacctacgtggtggtgctgagttttagagctagaaatagcaagttaaaataaggctagtccgttatcaacttgaaaaagtggcaccgagtcggtgctttt

SEQ ID NO: 355 - RNA, 100 nt, synthetic construct
  source 1..100: mol_type = other RNA; note = Description of Artificial Sequence: Synthetic polynucleotide
  modified_base 1: mod_base = OTHER; note = 2'-O-Methyl-cytidine phosphorothioate
  modified_base 2: mod_base = OTHER; note = 2'-O-Methyl-uridine phosphorothioate
  modified_base 3: mod_base = OTHER; note = 2'-O-Methyl-adenosine phosphorothioate
  modified_base 97: mod_base = OTHER; note = uridine phosphorothioate
  modified_base 98: mod_base = OTHER; note = 2'-O-Methyl-uridine phosphorothioate
  modified_base 99: mod_base = OTHER; note = 2'-O-Methyl-uridine phosphorothioate
  modified_base 100: mod_base = OTHER; note = 2'-O-Methyl-uridine
ctacgtggtggtgctgaagggttttagagctagaaatagcaagttaaaataaggctagtccgttatcaacttgaaaaagtggcaccgagtcggtgctttt

SEQ ID NO: 356 - RNA, 100 nt, synthetic construct
  source 1..100: mol_type = other RNA; note = Description of Artificial Sequence: Synthetic polynucleotide
  modified_base 1: mod_base = OTHER; note = 2'-O-Methyl-adenosine phosphorothioate
  modified_base 2: mod_base = OTHER; note = 2'-O-Methyl-uridine phosphorothioate
  modified_base 3: mod_base = OTHER; note = 2'-O-Methyl-guanosine phosphorothioate
  modified_base 97: mod_base = OTHER; note = uridine phosphorothioate
  modified_base 98: mod_base = OTHER; note = 2'-O-Methyl-uridine phosphorothioate
  modified_base 99: mod_base = OTHER; note = 2'-O-Methyl-uridine phosphorothioate
  modified_base 100: mod_base = OTHER; note = 2'-O-Methyl-uridine
atggaagacatgcaggatctgttttagagctagaaatagcaagttaaaataaggctagtccgttatcaacttgaaaaagtggcaccgagtcggtgctttt

SEQ ID NO: 357 - RNA, 100 nt, synthetic construct
  source 1..100: mol_type = other RNA; note = Description of Artificial Sequence: Synthetic polynucleotide
  modified_base 1: mod_base = OTHER; note = 2'-O-Methyl-adenosine phosphorothioate
  modified_base 2: mod_base = OTHER; note = 2'-O-Methyl-guanosine phosphorothioate
  modified_base 3: mod_base = OTHER; note = 2'-O-Methyl-adenosine phosphorothioate
  modified_base 97: mod_base = OTHER; note = uridine phosphorothioate
  modified_base 98: mod_base = OTHER; note = 2'-O-Methyl-uridine phosphorothioate
  modified_base 99: mod_base = OTHER; note = 2'-O-Methyl-uridine phosphorothioate
  modified_base 100: mod_base = OTHER; note = 2'-O-Methyl-uridine
agacatgcaggatcttggtggttttagagctagaaatagcaagttaaaataaggctagtccgttatcaacttgaaaaagtggcaccgagtcggtgctttt

SEQ ID NO: 358 - RNA, 100 nt, synthetic construct
  source 1..100: mol_type = other RNA; note = Description of Artificial Sequence: Synthetic polynucleotide
  modified_base 1: mod_base = OTHER; note = 2'-O-Methyl-cytidine phosphorothioate
  modified_base 2: mod_base = OTHER; note = 2'-O-Methyl-uridine phosphorothioate
  modified_base 3: mod_base = OTHER; note = 2'-O-Methyl-cytidine phosphorothioate
  modified_base 97: mod_base = OTHER; note = uridine phosphorothioate
  modified_base 98: mod_base = OTHER; note = 2'-O-Methyl-uridine phosphorothioate
  modified_base 99: mod_base = OTHER; note = 2'-O-Methyl-uridine phosphorothioate
  modified_base 100: mod_base = OTHER; note = 2'-O-Methyl-uridine
ctcatcttcaccaggaagccgttttagagctagaaatagcaagttaaaataaggctagtccgttatcaacttgaaaaagtggcaccgagtcggtgctttt

SEQ ID NO: 359 - RNA, 100 nt, synthetic construct
  source 1..100: mol_type = other RNA; note = Description of Artificial Sequence: Synthetic polynucleotide
  modified_base 1: mod_base = OTHER; note = 2'-O-Methyl-cytidine phosphorothioate
  modified_base 2: mod_base = OTHER; note = 2'-O-Methyl-uridine phosphorothioate
  modified_base 3: mod_base = OTHER; note = 2'-O-Methyl-cytidine phosphorothioate
  modified_base 97: mod_base = OTHER; note = uridine phosphorothioate
  modified_base 98: mod_base = OTHER; note = 2'-O-Methyl-uridine phosphorothioate
  modified_base 99: mod_base = OTHER; note = 2'-O-Methyl-uridine phosphorothioate
  modified_base 100: mod_base = OTHER; note = 2'-O-Methyl-uridine
ctcctcgatgtagtcgacatgttttagagctagaaatagcaagttaaaataaggctagtccgttatcaacttgaaaaagtggcaccgagtcggtgctttt

SEQ ID NO: 360 - RNA, 100 nt, synthetic construct
  source 1..100: mol_type = other RNA; note = Description of Artificial Sequence: Synthetic polynucleotide
  modified_base 1: mod_base = OTHER; note = 2'-O-Methyl-uridine phosphorothioate
  modified_base 2: mod_base = OTHER; note = 2'-O-Methyl-adenosine phosphorothioate
  modified_base 3: mod_base = OTHER; note = 2'-O-Methyl-uridine phosphorothioate
  modified_base 97: mod_base = OTHER; note = uridine phosphorothioate
  modified_base 98: mod_base = OTHER; note = 2'-O-Methyl-uridine phosphorothioate
  modified_base 99: mod_base = OTHER; note = 2'-O-Methyl-uridine phosphorothioate
  modified_base 100: mod_base = OTHER; note = 2'-O-Methyl-uridine
tattcatccgcccggtaccggttttagagctagaaatagcaagttaaaataaggctagtccgttatcaacttgaaaaagtggcaccgagtcggtgctttt

SEQ ID NO: 361 - RNA, 100 nt, synthetic construct
  source 1..100: mol_type = other RNA; note = Description of Artificial Sequence: Synthetic polynucleotide
  modified_base 1: mod_base = OTHER; note = 2'-O-Methyl-uridine phosphorothioate
  modified_base 2: mod_base = OTHER; note = 2'-O-Methyl-cytidine phosphorothioate
  modified_base 3: mod_base = OTHER; note = 2'-O-Methyl-cytidine phosphorothioate
  modified_base 97: mod_base = OTHER; note = uridine phosphorothioate
  modified_base 98: mod_base = OTHER; note = 2'-O-Methyl-uridine phosphorothioate
  modified_base 99: mod_base = OTHER; note = 2'-O-Methyl-uridine phosphorothioate
  modified_base 100: mod_base = OTHER; note = 2'-O-Methyl-uridine
tcctcgatgtagtcgacatggttttagagctagaaatagcaagttaaaataaggctagtccgttatcaacttgaaaaagtggcaccgagtcggtgctttt

SEQ ID NO: 362 - RNA, 100 nt, synthetic construct
  source 1..100: mol_type = other RNA; note = Description of Artificial Sequence: Synthetic polynucleotide
  modified_base 1: mod_base = OTHER; note = 2'-O-Methyl-cytidine phosphorothioate
  modified_base 2: mod_base = OTHER; note = 2'-O-Methyl-cytidine phosphorothioate
  modified_base 3: mod_base = OTHER; note = 2'-O-Methyl-uridine phosphorothioate
  modified_base 97: mod_base = OTHER; note = uridine phosphorothioate
  modified_base 98: mod_base = OTHER; note = 2'-O-Methyl-uridine phosphorothioate
  modified_base 99: mod_base = OTHER; note = 2'-O-Methyl-uridine phosphorothioate
  modified_base 100: mod_base = OTHER; note = 2'-O-Methyl-uridine
cctcctcgatgtagtcgacagttttagagctagaaatagcaagttaaaataaggctagtccgttatcaacttgaaaaagtggcaccgagtcggtgctttt

SEQ ID NO: 363 - RNA, 100 nt, synthetic construct
  source 1..100: mol_type = other RNA; note = Description of Artificial Sequence: Synthetic polynucleotide
  modified_base 1: mod_base = OTHER; note = 2'-O-Methyl-guanosine phosphorothioate
  modified_base 2: mod_base = OTHER; note = 2'-O-Methyl-cytidine phosphorothioate
  modified_base 3: mod_base = OTHER; note = 2'-O-Methyl-cytidine phosphorothioate
  modified_base 97: mod_base = OTHER; note = uridine phosphorothioate
  modified_base 98: mod_base = OTHER; note = 2'-O-Methyl-uridine phosphorothioate
  modified_base 99: mod_base = OTHER; note = 2'-O-Methyl-uridine phosphorothioate
  modified_base 100: mod_base = OTHER; note = 2'-O-Methyl-uridine
gccccatgtcgactacatcggttttagagctagaaatagcaagttaaaataaggctagtccgttatcaacttgaaaaagtggcaccgagtcggtgctttt

SEQ ID NO: 364 - RNA, 100 nt, synthetic construct
  source 1..100: mol_type = other RNA; note = Description of Artificial Sequence: Synthetic polynucleotide
  modified_base 1: mod_base = OTHER; note = 2'-O-Methyl-cytidine phosphorothioate
  modified_base 2: mod_base = OTHER; note = 2'-O-Methyl-cytidine phosphorothioate
  modified_base 3: mod_base = OTHER; note = 2'-O-Methyl-adenosine phosphorothioate
  modified_base 97: mod_base = OTHER; note = uridine phosphorothioate
  modified_base 98: mod_base = OTHER; note = 2'-O-Methyl-uridine phosphorothioate
  modified_base 99: mod_base = OTHER; note = 2'-O-Methyl-uridine phosphorothioate
  modified_base 100: mod_base = OTHER; note = 2'-O-Methyl-uridine
ccatgtcgactacatcgagggttttagagctagaaatagcaagttaaaataaggctagtccgttatcaacttgaaaaagtggcaccgagtcggtgctttt

SEQ ID NO: 365 - RNA, 100 nt, synthetic construct
  source 1..100: mol_type = other RNA; note = Description of Artificial Sequence: Synthetic polynucleotide
  modified_base 1: mod_base = OTHER; note = 2'-O-Methyl-guanosine phosphorothioate
  modified_base 2: mod_base = OTHER; note = 2'-O-Methyl-guanosine phosphorothioate
  modified_base 3: mod_base = OTHER; note = 2'-O-Methyl-guanosine phosphorothioate
  modified_base 97: mod_base = OTHER; note = uridine phosphorothioate
  modified_base 98: mod_base = OTHER; note = 2'-O-Methyl-uridine phosphorothioate
  modified_base 99: mod_base = OTHER; note = 2'-O-Methyl-uridine phosphorothioate
  modified_base 100: mod_base = OTHER; note = 2'-O-Methyl-uridine
ggggctggtattcatccgccgttttagagctagaaatagcaagttaaaataaggctagtccgttatcaacttgaaaaagtggcaccgagtcggtgctttt

SEQ ID NO: 366 - RNA, 100 nt, synthetic construct
  source 1..100: mol_type = other RNA; note = Description of Artificial Sequence: Synthetic polynucleotide
  modified_base 1: mod_base = OTHER; note = 2'-O-Methyl-guanosine phosphorothioate
  modified_base 2: mod_base = OTHER; note = 2'-O-Methyl-uridine phosphorothioate
  modified_base 3: mod_base = OTHER; note = 2'-O-Methyl-cytidine phosphorothioate
  modified_base 97: mod_base = OTHER; note = uridine phosphorothioate
  modified_base 98: mod_base = OTHER; note = 2'-O-Methyl-uridine phosphorothioate
  modified_base 99: mod_base = OTHER; note = 2'-O-Methyl-uridine phosphorothioate
  modified_base 100: mod_base = OTHER; note = 2'-O-Methyl-uridine
gtcgacatggggcaacttcagttttagagctagaaatagcaagttaaaataaggctagtccgttatcaacttgaaaaagtggcaccgagtcggtgctttt

SEQ ID NO: 367 - RNA, 100 nt, synthetic construct
  source 1..100: mol_type = other RNA; note = Description of Artificial Sequence: Synthetic polynucleotide
  modified_base 1: mod_base = OTHER; note = 2'-O-Methyl-adenosine phosphorothioate
  modified_base 2: mod_base = OTHER; note = 2'-O-Methyl-cytidine phosphorothioate
  modified_base 3: mod_base = OTHER; note = 2'-O-Methyl-cytidine phosphorothioate
  modified_base 97: mod_base = OTHER; note = uridine phosphorothioate
  modified_base 98: mod_base = OTHER; note = 2'-O-Methyl-uridine phosphorothioate
  modified_base 99: mod_base = OTHER; note = 2'-O-Methyl-uridine phosphorothioate
  modified_base 100: mod_base = OTHER; note = 2'-O-Methyl-uridine
accaccgggaaatcgagggcgttttagagctagaaatagcaagttaaaataaggctagtccgttatcaacttgaaaaagtggcaccgagtcggtgctttt

SEQ ID NO: 368 - RNA, 100 nt, synthetic construct
  source 1..100: mol_type = other RNA; note = Description of Artificial Sequence: Synthetic polynucleotide
  modified_base 1: mod_base = OTHER; note = 2'-O-Methyl-guanosine phosphorothioate
  modified_base 2: mod_base = OTHER; note = 2'-O-Methyl-adenosine phosphorothioate
  modified_base 3: mod_base = OTHER; note = 2'-O-Methyl-guanosine phosphorothioate
  modified_base 97: mod_base = OTHER; note = uridine phosphorothioate
  modified_base 98: mod_base = OTHER; note = 2'-O-Methyl-uridine phosphorothioate
  modified_base 99: mod_base = OTHER; note = 2'-O-Methyl-uridine phosphorothioate
  modified_base 100: mod_base = OTHER; note = 2'-O-Methyl-uridine
gagtgaccaccgggaaatcggttttagagctagaaatagcaagttaaaataaggctagtccgttatcaacttgaaaaagtggcaccgagtcggtgctttt

SEQ ID NO: 369 - RNA, 100 nt, synthetic construct
  source 1..100: mol_type = other RNA; note = Description of Artificial Sequence: Synthetic polynucleotide
  modified_base 1: mod_base = OTHER; note = 2'-O-Methyl-adenosine phosphorothioate
  modified_base 2: mod_base = OTHER; note = 2'-O-Methyl-guanosine phosphorothioate
  modified_base 3: mod_base = OTHER; note = 2'-O-Methyl-uridine phosphorothioate
  modified_base 97: mod_base = OTHER; note = uridine phosphorothioate
  modified_base 98: mod_base = OTHER; note = 2'-O-Methyl-uridine phosphorothioate
  modified_base 99: mod_base = OTHER; note = 2'-O-Methyl-uridine phosphorothioate
  modified_base 100: mod_base = OTHER; note = 2'-O-Methyl-uridine
agtgaccaccgggaaatcgagttttagagctagaaatagcaagttaaaataaggctagtccgttatcaacttgaaaaagtggcaccgagtcggtgctttt

SEQ ID NO: 370 - RNA, 100 nt, synthetic construct
  source 1..100: mol_type = other RNA; note = Description of Artificial Sequence: Synthetic polynucleotide
  modified_base 1: mod_base = OTHER; note = 2'-O-Methyl-cytidine phosphorothioate
  modified_base 2: mod_base = OTHER; note = 2'-O-Methyl-cytidine phosphorothioate
  modified_base 3: mod_base = OTHER; note = 2'-O-Methyl-adenosine phosphorothioate
  modified_base 97: mod_base = OTHER; note = uridine phosphorothioate
  modified_base 98: mod_base = OTHER; note = 2'-O-Methyl-uridine phosphorothioate
  modified_base 99: mod_base = OTHER; note = 2'-O-Methyl-uridine phosphorothioate
  modified_base 100: mod_base = OTHER; note = 2'-O-Methyl-uridine
ccaccgggaaatcgagggcagttttagagctagaaatagcaagttaaaataaggctagtccgttatcaacttgaaaaagtggcaccgagtcggtgctttt

SEQ ID NO: 371 - RNA, 100 nt, synthetic construct
  source 1..100: mol_type = other RNA; note = Description of Artificial Sequence: Synthetic polynucleotide
  modified_base 1: mod_base = OTHER; note = 2'-O-Methyl-guanosine phosphorothioate
  modified_base 2: mod_base = OTHER; note = 2'-O-Methyl-adenosine phosphorothioate
  modified_base 3: mod_base = OTHER; note = 2'-O-Methyl-adenosine phosphorothioate
  modified_base 97: mod_base = OTHER; note = uridine phosphorothioate
  modified_base 98: mod_base = OTHER; note = 2'-O-Methyl-uridine phosphorothioate
  modified_base 99: mod_base = OTHER; note = 2'-O-Methyl-uridine phosphorothioate
  modified_base 100: mod_base = OTHER; note = 2'-O-Methyl-uridine
gaagcgggtcccgtcctcctgttttagagctagaaatagcaagttaaaataaggctagtccgttatcaacttgaaaaagtggcaccgagtcggtgctttt

SEQ ID NO: 372 - RNA, 100 nt, synthetic construct
  source 1..100: mol_type = other RNA; note = Description of Artificial Sequence: Synthetic polynucleotide
  modified_base 1: mod_base = OTHER; note = 2'-O-Methyl-cytidine phosphorothioate
  modified_base 2: mod_base = OTHER; note = 2'-O-Methyl-uridine phosphorothioate
  modified_base 3: mod_base = OTHER; note = 2'-O-Methyl-adenosine phosphorothioate
  modified_base 97: mod_base = OTHER; note = uridine phosphorothioate
  modified_base 98: mod_base = OTHER; note = 2'-O-Methyl-uridine phosphorothioate
  modified_base 99: mod_base = OTHER; note = 2'-O-Methyl-uridine phosphorothioate
  modified_base 100: mod_base = OTHER; note = 2'-O-Methyl-uridine
ctaggagatacacctccaccgttttagagctagaaatagcaagttaaaataaggctagtccgttatcaacttgaaaaagtggcaccgagtcggtgctttt

SEQ ID NO: 373 - RNA, 100 nt, synthetic construct
  source 1..100: mol_type = other RNA; note = Description of Artificial Sequence: Synthetic polynucleotide
  modified_base 1: mod_base = OTHER; note = 2'-O-Methyl-cytidine phosphorothioate
  modified_base 2: mod_base = OTHER; note = 2'-O-Methyl-adenosine phosphorothioate
  modified_base 3: mod_base = OTHER; note = 2'-O-Methyl-guanosine phosphorothioate
  modified_base 97: mod_base = OTHER; note = uridine phosphorothioate
  modified_base 98: mod_base = OTHER; note = 2'-O-Methyl-uridine phosphorothioate
  modified_base 99: mod_base = OTHER; note = 2'-O-Methyl-uridine phosphorothioate
  modified_base 100: mod_base = OTHER; note = 2'-O-Methyl-uridine
cagcatacagagtgaccaccgttttagagctagaaatagcaagttaaaataaggctagtccgttatcaacttgaaaaagtggcaccgagtcggtgctttt

SEQ ID NO: 374 - RNA, 100 nt, synthetic construct
  source 1..100: mol_type = other RNA; note = Description of Artificial Sequence: Synthetic polynucleotide
  modified_base 1: mod_base = OTHER; note = 2'-O-Methyl-adenosine phosphorothioate
  modified_base 2: mod_base = OTHER; note = 2'-O-Methyl-adenosine phosphorothioate
  modified_base 3: mod_base = OTHER; note = 2'-O-Methyl-guanosine phosphorothioate
  modified_base 97: mod_base = OTHER; note = uridine phosphorothioate
  modified_base 98: mod_base = OTHER; note = 2'-O-Methyl-uridine phosphorothioate
  modified_base 99: mod_base = OTHER; note = 2'-O-Methyl-uridine phosphorothioate
  modified_base 100: mod_base = OTHER; note = 2'-O-Methyl-uridine
aagcgggtcccgtcctcctcgttttagagctagaaatagcaagttaaaataaggctagtccgttatcaacttgaaaaagtggcaccgagtcggtgctttt

SEQ ID NO: 375 - RNA, 100 nt, synthetic construct
  source 1..100: mol_type = other RNA; note = Description of Artificial Sequence: Synthetic polynucleotide
  modified_base 1: mod_base = OTHER; note = 2'-O-Methyl-uridine phosphorothioate
  modified_base 2: mod_base = OTHER; note = 2'-O-Methyl-guanosine phosphorothioate
  modified_base 3: mod_base = OTHER; note = 2'-O-Methyl-adenosine phosphorothioate
  modified_base 97: mod_base = OTHER; note = uridine phosphorothioate
  modified_base 98: mod_base = OTHER; note = 2'-O-Methyl-uridine phosphorothioate
  modified_base 99: mod_base = OTHER; note = 2'-O-Methyl-uridine phosphorothioate
  modified_base 100: mod_base = OTHER; note = 2'-O-Methyl-uridine
tgaccctgccctcgatttccgttttagagctagaaatagcaagttaaaataaggctagtccgttatcaacttgaaaaagtggcaccgagtcggtgctttt

SEQ ID NO: 376 - RNA, 100 nt, synthetic construct
  source 1..100: mol_type = other RNA; note = Description of Artificial Sequence: Synthetic polynucleotide
  modified_base 1: mod_base = OTHER; note = 2'-O-Methyl-cytidine phosphorothioate
  modified_base 2: mod_base = OTHER; note = 2'-O-Methyl-adenosine phosphorothioate
  modified_base 3: mod_base = OTHER; note = 2'-O-Methyl-cytidine phosphorothioate
  modified_base 97: mod_base = OTHER; note = uridine phosphorothioate
  modified_base 98: mod_base = OTHER; note = 2'-O-Methyl-uridine phosphorothioate
  modified_base 99: mod_base = OTHER; note = 2'-O-Methyl-uridine phosphorothioate
  modified_base 100: mod_base = OTHER; note = 2'-O-Methyl-uridine
cactctgtatgctggtgtctgttttagagctagaaatagcaagttaaaataaggctagtccgttatcaacttgaaaaagtggcaccgagtcggtgctttt

SEQ ID NO: 377 - RNA, 100 nt, synthetic construct
  source 1..100: mol_type = other RNA; note = Description of Artificial Sequence: Synthetic polynucleotide
  modified_base 1: mod_base = OTHER; note = 2'-O-Methyl-cytidine phosphorothioate
  modified_base 2: mod_base = OTHER; note = 2'-O-Methyl-cytidine phosphorothioate
  modified_base 3: mod_base = OTHER; note = 2'-O-Methyl-cytidine phosphorothioate
  modified_base 97: mod_base = OTHER; note = uridine phosphorothioate
  modified_base 98: mod_base = OTHER; note = 2'-O-Methyl-uridine phosphorothioate
  modified_base 99: mod_base = OTHER; note = 2'-O-Methyl-uridine phosphorothioate
  modified_base 100: mod_base = OTHER; note = 2'-O-Methyl-uridine
ccctgccctcgatttcccgggttttagagctagaaatagcaagttaaaataaggctagtccgttatcaacttgaaaaagtggcaccgagtcggtgctttt

SEQ ID NO: 378 - RNA, 100 nt, synthetic construct
  source 1..100: mol_type = other RNA; note = Description of Artificial Sequence: Synthetic polynucleotide
  modified_base 1: mod_base = OTHER; note = 2'-O-Methyl-cytidine phosphorothioate
  modified_base 2: mod_base = OTHER; note = 2'-O-Methyl-cytidine phosphorothioate
  modified_base 3: mod_base = OTHER; note = 2'-O-Methyl-guanosine phosphorothioate
  modified_base 97: mod_base = OTHER; note = uridine phosphorothioate
  modified_base 98: mod_base = OTHER; note = 2'-O-Methyl-uridine phosphorothioate
  modified_base 99: mod_base = OTHER; note = 2'-O-Methyl-uridine phosphorothioate
  modified_base 100: mod_base = OTHER; note = 2'-O-Methyl-uridine
ccggtggtcactctgtatgcgttttagagctagaaatagcaagttaaaataaggctagtccgttatcaacttgaaaaagtggcaccgagtcggtgctttt

SEQ ID NO: 379 - RNA, 100 nt, synthetic construct
  source 1..100: mol_type = other RNA; note = Description of Artificial Sequence: Synthetic polynucleotide
  modified_base 1: mod_base = OTHER; note = 2'-O-Methyl-guanosine phosphorothioate
  modified_base 2: mod_base = OTHER; note = 2'-O-Methyl-guanosine phosphorothioate
  modified_base 3: mod_base = OTHER; note = 2'-O-Methyl-adenosine phosphorothioate
  modified_base 97: mod_base = OTHER; note = uridine phosphorothioate
  modified_base 98: mod_base = OTHER; note = 2'-O-Methyl-uridine phosphorothioate
  modified_base 99: mod_base = OTHER; note = 2'-O-Methyl-uridine phosphorothioate
  modified_base 100: mod_base = OTHER; note = 2'-O-Methyl-uridine
ggaaatcgagggcagggtcagttttagagctagaaatagcaagttaaaataaggctagtccgttatcaacttgaaaaagtggcaccgagtcggtgctttt

SEQ ID NO: 380 - RNA, 100 nt, synthetic construct
  source 1..100: mol_type = other RNA; note = Description of Artificial Sequence: Synthetic polynucleotide
  modified_base 1: mod_base = OTHER; note = 2'-O-Methyl-cytidine phosphorothioate
  modified_base 2: mod_base = OTHER; note = 2'-O-Methyl-cytidine phosphorothioate
  modified_base 3: mod_base = OTHER; note = 2'-O-Methyl-adenosine phosphorothioate
  modified_base 97: mod_base = OTHER; note = uridine phosphorothioate
  modified_base 98: mod_base = OTHER; note = 2'-O-Methyl-uridine phosphorothioate
  modified_base 99: mod_base = OTHER; note = 2'-O-Methyl-uridine phosphorothioate
  modified_base 100: mod_base = OTHER; note = 2'-O-Methyl-uridine
ccagcatacagagtgaccacgttttagagctagaaatagcaagttaaaataaggctagtccgttatcaacttgaaaaagtggcaccgagtcggtgctttt

SEQ ID NO: 381 - RNA, 100 nt, synthetic construct
  source 1..100: mol_type = other RNA; note = Description of Artificial Sequence: Synthetic polynucleotide
  modified_base 1: mod_base = OTHER; note = 2'-O-Methyl-cytidine phosphorothioate
  modified_base 2: mod_base = OTHER; note = 2'-O-Methyl-uridine phosphorothioate
  modified_base 3: mod_base = OTHER; note = 2'-O-Methyl-uridine phosphorothioate
  modified_base 97: mod_base = OTHER; note = uridine phosphorothioate
  modified_base 98: mod_base = OTHER; note = 2'-O-Methyl-uridine phosphorothioate
  modified_base 99: mod_base = OTHER; note = 2'-O-Methyl-uridine phosphorothioate
  modified_base 100: mod_base = OTHER; note = 2'-O-Methyl-uridine
cttggcagttgagcacgcgcgttttagagctagaaatagcaagttaaaataaggctagtccgttatcaacttgaaaaagtggcaccgagtcggtgctttt

SEQ ID NO: 382 - RNA, 100 nt, synthetic construct
  source 1..100: mol_type = other RNA; note = Description of Artificial Sequence: Synthetic polynucleotide
  modified_base 1: mod_base = OTHER; note = 2'-O-Methyl-cytidine phosphorothioate
  modified_base 2: mod_base = OTHER; note = 2'-O-Methyl-uridine phosphorothioate
  modified_base 3: mod_base = OTHER; note = 2'-O-Methyl-guanosine phosphorothioate
  modified_base 97: mod_base = OTHER; note = uridine phosphorothioate
  modified_base 98: mod_base = OTHER; note = 2'-O-Methyl-uridine phosphorothioate
  modified_base 99: mod_base = OTHER; note = 2'-O-Methyl-uridine phosphorothioate
  modified_base 100: mod_base = OTHER; note = 2'-O-Methyl-uridine
ctgcgcgtgctcaactgccagttttagagctagaaatagcaagttaaaataaggctagtccgttatcaacttgaaaaagtggcaccgagtcggtgctttt

SEQ ID NO: 383 - RNA, 100 nt, synthetic construct
  source 1..100: mol_type = other RNA; note = Description of Artificial Sequence: Synthetic polynucleotide
  modified_base 1: mod_base = OTHER; note = 2'-O-Methyl-uridine phosphorothioate
  modified_base 2: mod_base = OTHER; note = 2'-O-Methyl-guanosine phosphorothioate
  modified_base 3: mod_base = OTHER; note = 2'-O-Methyl-cytidine phosphorothioate
  modified_base 97: mod_base = OTHER; note = uridine phosphorothioate
  modified_base 98: mod_base = OTHER; note = 2'-O-Methyl-uridine phosphorothioate
  modified_base 99: mod_base = OTHER; note = 2'-O-Methyl-uridine phosphorothioate
  modified_base 100: mod_base = OTHER; note = 2'-O-Methyl-uridine
tgcgcgtgctcaactgccaagttttagagctagaaatagcaagttaaaataaggctagtccgttatcaacttgaaaaagtggcaccgagtcggtgctttt

SEQ ID NO: 384 - RNA, 100 nt, synthetic construct
  source 1..100: mol_type = other RNA; note = Description of Artificial Sequence: Synthetic polynucleotide
  modified_base 1: mod_base = OTHER; note = 2'-O-Methyl-cytidine phosphorothioate
  modified_base 2: mod_base = OTHER; note = 2'-O-Methyl-guanosine phosphorothioate
  modified_base 3: mod_base = OTHER; note = 2'-O-Methyl-guanosine phosphorothioate
  modified_base 97: mod_base = OTHER; note = uridine phosphorothioate
  modified_base 98: mod_base = OTHER; note = 2'-O-Methyl-uridine phosphorothioate
  modified_base 99: mod_base = OTHER; note = 2'-O-Methyl-uridine phosphorothioate
  modified_base 100: mod_base = OTHER; note = 2'-O-Methyl-uridine
cgggatgccggcgtggccaagttttagagctagaaatagcaagttaaaataaggctagtccgttatcaacttgaaaaagtggcaccgagtcggtgctttt

SEQ ID NO: 385 - RNA, 100 nt, synthetic construct
  source 1..100: mol_type = other RNA; note = Description of Artificial Sequence: Synthetic polynucleotide
  modified_base 1: mod_base = OTHER; note = 2'-O-Methyl-cytidine phosphorothioate
  modified_base 2: mod_base = OTHER; note = 2'-O-Methyl-guanosine phosphorothioate
  modified_base 3: mod_base = OTHER; note = 2'-O-Methyl-uridine phosphorothioate
  modified_base 97: mod_base = OTHER; note = uridine phosphorothioate
  modified_base 98: mod_base = OTHER; note = 2'-O-Methyl-uridine phosphorothioate
  modified_base 99: mod_base = OTHER; note = 2'-O-Methyl-uridine phosphorothioate
  modified_base 100: mod_base = OTHER; note = 2'-O-Methyl-uridine
cgtgctcaactgccaagggagttttagagctagaaatagcaagttaaaataaggctagtccgttatcaacttgaaaaagtggcaccgagtcggtgctttt

SEQ ID NO: 386 - RNA, 100 nt, synthetic construct
  source 1..100: mol_type = other RNA; note = Description of Artificial Sequence: Synthetic polynucleotide
  modified_base 1: mod_base = OTHER; note = 2'-O-Methyl-cytidine phosphorothioate
  modified_base 2: mod_base = OTHER; note = 2'-O-Methyl-cytidine phosphorothioate
  modified_base 3: mod_base = OTHER; note = 2'-O-Methyl-uridine phosphorothioate
  modified_base 97: mod_base = OTHER; note = uridine phosphorothioate
  modified_base 98: mod_base = OTHER; note = 2'-O-Methyl-uridine phosphorothioate
  modified_base 99: mod_base = OTHER; note = 2'-O-Methyl-uridine phosphorothioate
  modified_base 100: mod_base = OTHER; note = 2'-O-Methyl-uridine
ccttggccacgccggcatccgttttagagctagaaatagcaagttaaaataaggctagtccgttatcaacttgaaaaagtggcaccgagtcggtgctttt

SEQ ID NO: 387 - RNA, 100 nt, synthetic construct
  source 1..100: mol_type = other RNA; note = Description of Artificial Sequence: Synthetic polynucleotide
  modified_base 1: mod_base = OTHER; note = 2'-O-Methyl-cytidine phosphorothioate
  modified_base 2: mod_base = OTHER; note = 2'-O-Methyl-adenosine phosphorothioate
  modified_base 3: mod_base = OTHER; note = 2'-O-Methyl-guanosine phosphorothioate
  modified_base 97: mod_base = OTHER; note = uridine phosphorothioate
  modified_base 98: mod_base = OTHER; note = 2'-O-Methyl-uridine phosphorothioate
  modified_base 99: mod_base = OTHER; note = 2'-O-Methyl-uridine phosphorothioate
  modified_base 100: mod_base = OTHER; note = 2'-O-Methyl-uridine
cagcggccgggatgccggcggttttagagctagaaatagcaagttaaaataaggctagtccgttatcaacttgaaaaagtggcaccgagtcggtgctttt

SEQ ID NO: 388 - RNA, 100 nt, synthetic construct
  source 1..100: mol_type = other RNA; note = Description of Artificial Sequence: Synthetic polynucleotide
  modified_base 1: mod_base = OTHER; note = 2'-O-Methyl-cytidine phosphorothioate
  modified_base 2: mod_base = OTHER; note = 2'-O-Methyl-cytidine phosphorothioate
  modified_base 3: mod_base = OTHER; note = 2'-O-Methyl-guanosine phosphorothioate
  modified_base 97: mod_base = OTHER; note = uridine phosphorothioate
  modified_base 98: mod_base = OTHER; note = 2'-O-Methyl-uridine phosphorothioate
  modified_base 99: mod_base = OTHER; note = 2'-O-Methyl-uridine phosphorothioate
  modified_base 100: mod_base = OTHER; note = 2'-O-Methyl-uridine
ccgggatgccggcgtggccagttttagagctagaaatagcaagttaaaataaggctagtccgttatcaacttgaaaaagtggcaccgagtcggtgctttt

SEQ ID NO: 389 - RNA, 100 nt, synthetic construct
  source 1..100: mol_type = other RNA; note = Description of Artificial Sequence: Synthetic polynucleotide
  modified_base 1: mod_base = OTHER; note = 2'-O-Methyl-guanosine phosphorothioate
  modified_base 2: mod_base = OTHER; note = 2'-O-Methyl-uridine phosphorothioate
  modified_base 3: mod_base = OTHER; note = 2'-O-Methyl-guanosine phosphorothioate
  modified_base 97: mod_base = OTHER; note = uridine phosphorothioate
  modified_base 98: mod_base = OTHER; note = 2'-O-Methyl-uridine phosphorothioate
  modified_base 99: mod_base = OTHER; note = 2'-O-Methyl-uridine phosphorothioate
  modified_base 100: mod_base = OTHER; note = 2'-O-Methyl-uridine
gtggtcagcggccgggatgcgttttagagctagaaatagcaagttaaaataaggctagtccgttatcaacttgaaaaagtggcaccgagtcggtgctttt

SEQ ID NO: 390 - RNA, 100 nt, synthetic construct
  source 1..100: mol_type = other RNA; note = Description of Artificial Sequence: Synthetic polynucleotide
  modified_base 1: mod_base = OTHER; note = 2'-O-Methyl-cytidine phosphorothioate
  modified_base 2: mod_base = OTHER; note = 2'-O-Methyl-guanosine phosphorothioate
  modified_base 3: mod_base = OTHER; note = 2'-O-Methyl-cytidine phosphorothioate
  modified_base 97: mod_base = OTHER; note = uridine phosphorothioate
  modified_base 98: mod_base = OTHER; note = 2'-O-Methyl-uridine phosphorothioate
  modified_base 99: mod_base = OTHER; note = 2'-O-Methyl-uridine phosphorothioate
  modified_base 100: mod_base = OTHER; note = 2'-O-Methyl-uridine
cgctgaccacccctgccagggttttagagctagaaatagcaagttaaaataaggctagtccgttatcaacttgaaaaagtggcaccgagtcggtgctttt

SEQ ID NO: 391 - RNA, 100 nt, synthetic construct
  source 1..100: mol_type = other RNA; note = Description of Artificial Sequence: Synthetic polynucleotide
  modified_base 1: mod_base = OTHER; note = 2'-O-Methyl-guanosine phosphorothioate
  modified_base 2: mod_base = OTHER; note = 2'-O-Methyl-guanosine phosphorothioate
  modified_base 3: mod_base = OTHER; note = 2'-O-Methyl-cytidine phosphorothioate
  modified_base 97: mod_base = OTHER; note = uridine phosphorothioate
  modified_base 98: mod_base = OTHER; note = 2'-O-Methyl-uridine phosphorothioate
  modified_base 99: mod_base = OTHER; note = 2'-O-Methyl-uridine phosphorothioate
  modified_base 100: mod_base = OTHER; note = 2'-O-Methyl-uridine
ggcaggggtggtcagcggccgttttagagctagaaatagcaagttaaaataaggctagtccgttatcaacttgaaaaagtggcaccgagtcggtgctttt

SEQ ID NO: 392 - RNA, 100 nt, synthetic construct
  source 1..100: mol_type = other RNA; note = Description of Artificial Sequence: Synthetic polynucleotide
  modified_base 1: mod_base = OTHER; note = 2'-O-Methyl-guanosine phosphorothioate
  modified_base 2: mod_base = OTHER; note = 2'-O-Methyl-uridine phosphorothioate
  modified_base 3: mod_base = OTHER; note = 2'-O-Methyl-guanosine phosphorothioate
  modified_base 97: mod_base = OTHER; note = uridine phosphorothioate
  modified_base 98: mod_base = OTHER; note = 2'-O-Methyl-uridine phosphorothioate
  modified_base 99: mod_base = OTHER; note = 2'-O-Methyl-uridine phosphorothioate
  modified_base 100: mod_base = OTHER; note = 2'-O-Methyl-uridine
gtgctcaactgccaagggaagttttagagctagaaatagcaagttaaaataaggctagtccgttatcaacttgaaaaagtggcaccgagtcggtgctttt

SEQ ID NO: 393 - RNA, 100 nt, synthetic construct
  source 1..100: mol_type = other RNA; note = Description of Artificial Sequence: Synthetic polynucleotide
  modified_base 1: mod_base = OTHER; note = 2'-O-Methyl-uridine phosphorothioate
  modified_base 2: mod_base = OTHER; note = 2'-O-Methyl-cytidine phosphorothioate
  modified_base 3: mod_base = OTHER; note = 2'-O-Methyl-adenosine phosphorothioate
  modified_base 97: mod_base = OTHER; note = uridine phosphorothioate
  modified_base 98: mod_base = OTHER; note = 2'-O-Methyl-uridine phosphorothioate
  modified_base 99: mod_base = OTHER; note = 2'-O-Methyl-uridine phosphorothioate
  modified_base 100: mod_base = OTHER; note = 2'-O-Methyl-uridine
tcatggcacccacctggcaggttttagagctagaaatagcaagttaaaataaggctagtccgttatcaacttgaaaaagtggcaccgagtcggtgctttt

SEQ ID NO: 394 - RNA, 100 nt, synthetic construct
  source 1..100: mol_type = other RNA; note = Description of Artificial Sequence: Synthetic polynucleotide
  modified_base 1: mod_base = OTHER; note = 2'-O-Methyl-uridine phosphorothioate
  modified_base 2: mod_base = OTHER; note = 2'-O-Methyl-guanosine phosphorothioate
  modified_base 3: mod_base = OTHER; note = 2'-O-Methyl-guanosine phosphorothioate
  modified_base 97: mod_base = OTHER; note = uridine phosphorothioate
  modified_base 98: mod_base = OTHER; note = 2'-O-Methyl-uridine phosphorothioate
  modified_base 99: mod_base = OTHER; note = 2'-O-Methyl-uridine phosphorothioate
  modified_base 100: mod_base = OTHER; note = 2'-O-Methyl-uridine
tggcaggggtggtcagcggcgttttagagctagaaatagcaagttaaaataaggctagtccgttatcaacttgaaaaagtggcaccgagtcggtgctttt

SEQ ID NO: 395 - RNA, 100 nt, synthetic construct
  source 1..100: mol_type = other RNA; note = Description of Artificial Sequence: Synthetic polynucleotide
  modified_base 1: mod_base = OTHER; note = 2'-O-Methyl-guanosine phosphorothioate
  modified_base 2: mod_base = OTHER; note = 2'-O-Methyl-cytidine phosphorothioate
  modified_base 3: mod_base = OTHER; note = 2'-O-Methyl-uridine phosphorothioate
  modified_base 97: mod_base = OTHER; note = uridine phosphorothioate
  modified_base 98: mod_base = OTHER; note = 2'-O-Methyl-uridine phosphorothioate
  modified_base 99: mod_base = OTHER; note = 2'-O-Methyl-uridine phosphorothioate
  modified_base 100: mod_base = OTHER; note = 2'-O-Methyl-uridine
gctgaccacccctgccaggtgttttagagctagaaatagcaagttaaaataaggctagtccgttatcaacttgaaaaagtggcaccgagtcggtgctttt

SEQ ID NO: 396 - RNA, 100 nt, synthetic construct
  source 1..100: mol_type = other RNA; note = Description of Artificial Sequence: Synthetic polynucleotide
  modified_base 1: mod_base = OTHER; note = 2'-O-Methyl-guanosine phosphorothioate
  modified_base 2: mod_base = OTHER; note = 2'-O-Methyl-guanosine phosphorothioate
  modified_base 3: mod_base = OTHER; note = 2'-O-Methyl-cytidine phosphorothioate
  modified_base 97: mod_base = OTHER; note = uridine phosphorothioate
  modified_base 98: mod_base = OTHER; note = 2'-O-Methyl-uridine phosphorothioate
  modified_base 99: mod_base = OTHER; note = 2'-O-Methyl-uridine phosphorothioate
  modified_base 100: mod_base = OTHER; note = 2'-O-Methyl-uridine
ggccgctgaccacccctgccgttttagagctagaaatagcaagttaaaataaggctagtccgttatcaacttgaaaaagtggcaccgagtcggtgctttt

SEQ ID NO: 397 - RNA, 100 nt, synthetic construct
  source 1..100: mol_type = other RNA; note = Description of Artificial Sequence: Synthetic polynucleotide
  modified_base 1: mod_base = OTHER; note = 2'-O-Methyl-guanosine phosphorothioate
  modified_base 2: mod_base = OTHER; note = 2'-O-Methyl-guanosine phosphorothioate
  modified_base 3: mod_base = OTHER; note = 2'-O-Methyl-cytidine phosphorothioate
  modified_base 97: mod_base = OTHER; note = uridine phosphorothioate
  modified_base 98: mod_base = OTHER; note = 2'-O-Methyl-uridine phosphorothioate
  modified_base 99: mod_base = OTHER; note = 2'-O-Methyl-uridine phosphorothioate
  modified_base 100: mod_base = OTHER; note = 2'-O-Methyl-uridine
ggcatcgtcccggaagttgcgttttagagctagaaatagcaagttaaaataaggctagtccgttatcaacttgaaaaagtggcaccgagtcggtgctttt

SEQ ID NO: 398 - RNA, 100 nt, synthetic construct
  source 1..100: mol_type = other RNA; note = Description of Artificial Sequence: Synthetic polynucleotide
  modified_base 1: mod_base = OTHER; note = 2'-O-Methyl-guanosine phosphorothioate
  modified_base 2: mod_base = OTHER; note = 2'-O-Methyl-guanosine phosphorothioate
  modified_base 3: mod_base = OTHER; note = 2'-O-Methyl-cytidine phosphorothioate
  modified_base 97: mod_base = OTHER; note = uridine phosphorothioate
  modified_base 98: mod_base = OTHER; note = 2'-O-Methyl-uridine phosphorothioate
  modified_base 99: mod_base = OTHER; note = 2'-O-Methyl-uridine phosphorothioate
  modified_base 100: mod_base = OTHER; note = 2'-O-Methyl-uridine
ggcttttccgaataaactccgttttagagctagaaatagcaagttaaaataaggctagtccgttatcaacttgaaaaagtggcaccgagtcggtgctttt

SEQ ID NO: 399 - RNA, 100 nt, synthetic construct
  source 1..100: mol_type = other RNA; note = Description of Artificial Sequence: Synthetic polynucleotide
  modified_base 1: mod_base = OTHER; note = 2'-O-Methyl-guanosine phosphorothioate
  modified_base 2: mod_base = OTHER; note = 2'-O-Methyl-uridine phosphorothioate
  modified_base 3: mod_base = OTHER; note = 2'-O-Methyl-cytidine phosphorothioate
  modified_base 97: mod_base = OTHER; note = uridine phosphorothioate
  modified_base 98: mod_base = OTHER; note = 2'-O-Methyl-uridine phosphorothioate
  modified_base 99: mod_base = OTHER; note = 2'-O-Methyl-uridine phosphorothioate
  modified_base 100: mod_base = OTHER; note = 2'-O-Methyl-uridine
gtcccggaagttgccggcaggttttagagctagaaatagcaagttaaaataaggctagtccgttatcaacttgaaaaagtggcaccgagtcggtgctttt

SEQ ID NO: 400 - RNA, 100 nt, synthetic construct
  source 1..100: mol_type = other RNA; note = Description of Artificial Sequence: Synthetic polynucleotide
  modified_base 1: mod_base = OTHER; note = 2'-O-Methyl-cytidine phosphorothioate
  modified_base 2: mod_base = OTHER; note = 2'-O-Methyl-guanosine phosphorothioate
  modified_base 3: mod_base = OTHER; note = 2'-O-Methyl-guanosine phosphorothioate
  modified_base 97: mod_base = OTHER; note = uridine phosphorothioate
  modified_base 98: mod_base = OTHER; note = 2'-O-Methyl-uridine phosphorothioate
  modified_base 99: mod_base = OTHER; note = 2'-O-Methyl-uridine phosphorothioate
  modified_base 100: mod_base = OTHER; note = 2'-O-Methyl-uridine
cggctgtacccacccgccaggttttagagctagaaatagcaagttaaaataaggctagtccgttatcaacttgaaaaagtggcaccgagtcggtgctttt

SEQ ID NO: 401 - RNA, 100 nt, synthetic construct
  source 1..100: mol_type = other RNA; note = Description of Artificial Sequence: Synthetic polynucleotide
  modified_base 1: mod_base = OTHER; note = 2'-O-Methyl-guanosine phosphorothioate
  modified_base 2: mod_base = OTHER; note = 2'-O-Methyl-uridine phosphorothioate
  modified_base 3: mod_base = OTHER; note = 2'-O-Methyl-cytidine phosphorothioate
  modified_base 97: mod_base = OTHER; note = uridine phosphorothioate
  modified_base 98: mod_base = OTHER; note = 2'-O-Methyl-uridine phosphorothioate
  modified_base 99: mod_base = OTHER; note = 2'-O-Methyl-uridine phosphorothioate
  modified_base 100: mod_base = OTHER; note = 2'-O-Methyl-uridine
gtcgtgctggtcaccgctgcgttttagagctagaaatagcaagttaaaataaggctagtccgttatcaacttgaaaaagtggcaccgagtcggtgctttt

SEQ ID NO: 402 - RNA, 100 nt, synthetic construct
  source 1..100: mol_type = other RNA; note = Description of Artificial Sequence: Synthetic polynucleotide
  modified_base 1: mod_base = OTHER; note = 2'-O-Methyl-adenosine phosphorothioate
  modified_base 2: mod_base = OTHER; note = 2'-O-Methyl-guanosine phosphorothioate
  modified_base 3: mod_base = OTHER; note = 2'-O-Methyl-uridine phosphorothioate
  modified_base 97: mod_base = OTHER; note = uridine phosphorothioate
  modified_base 98: mod_base = OTHER; note = 2'-O-Methyl-uridine phosphorothioate
  modified_base 99: mod_base = OTHER; note = 2'-O-Methyl-uridine phosphorothioate
  modified_base 100: mod_base = OTHER; note = 2'-O-Methyl-uridine
agtagaggcaggcatcgtccgttttagagctagaaatagcaagttaaaataaggctagtccgttatcaacttgaaaaagtggcaccgagtcggtgctttt

SEQ ID NO: 403 - RNA, 100 nt, synthetic construct
  source 1..100: mol_type = other RNA; note = Description of Artificial Sequence: Synthetic polynucleotide
  modified_base 1: mod_base = OTHER; note = 2'-O-Methyl-uridine phosphorothioate
  modified_base 2: mod_base = OTHER; note = 2'-O-Methyl-cytidine phosphorothioate
  modified_base 3: mod_base = OTHER; note = 2'-O-Methyl-cytidine phosphorothioate
  modified_base 97: mod_base = OTHER; note = uridine phosphorothioate
  modified_base 98: mod_base = OTHER; note = 2'-O-Methyl-uridine phosphorothioate
  modified_base 99: mod_base = OTHER; note = 2'-O-Methyl-uridine phosphorothioate
  modified_base 100: mod_base = OTHER; note = 2'-O-Methyl-uridine
tccgaataaactccaggcctgttttagagctagaaatagcaagttaaaataaggctagtccgttatcaacttgaaaaagtggcaccgagtcggtgctttt

SEQ ID NO: 404 - RNA, 100 nt, synthetic construct
  source 1..100: mol_type = other RNA; note = Description of Artificial Sequence: Synthetic polynucleotide
  modified_base 1: mod_base = OTHER; note = 2'-O-Methyl-guanosine phosphorothioate
  modified_base 2: mod_base = OTHER; note = 2'-O-Methyl-uridine phosphorothioate
  modified_base 3: mod_base = OTHER; note = 2'-O-Methyl-uridine phosphorothioate
  modified_base 97: mod_base = OTHER; note = uridine phosphorothioate
  modified_base 98: mod_base = OTHER; note = 2'-O-Methyl-uridine phosphorothioate
  modified_base 99: mod_base = OTHER; note = 2'-O-Methyl-uridine phosphorothioate
  modified_base 100: mod_base = OTHER; note = 2'-O-Methyl-uridine
gtttattcggaaaagccagcgttttagagctagaaatagcaagttaaaataaggctagtccgttatcaacttgaaaaagtggcaccgagtcggtgctttt

SEQ ID NO: 405 - RNA, 100 nt, synthetic construct
  source 1..100: mol_type = other RNA; note = Description of Artificial Sequence: Synthetic polynucleotide
  modified_base 1: mod_base = OTHER; note = 2'-O-Methyl-guanosine phosphorothioate
  modified_base 2: mod_base = OTHER; note = 2'-O-Methyl-cytidine phosphorothioate
  modified_base 3: mod_base = OTHER; note = 2'-O-Methyl-guanosine phosphorothioate
  modified_base 97: mod_base = OTHER; note = uridine phosphorothioate
  modified_base 98: mod_base = OTHER; note = 2'-O-Methyl-uridine phosphorothioate
  modified_base 99: mod_base = OTHER; note = 2'-O-Methyl-uridine phosphorothioate
  modified_base 100: mod_base = OTHER; note = 2'-O-Methyl-uridine
gcggctgtacccacccgccagttttagagctagaaatagcaagttaaaataaggctagtccgttatcaacttgaaaaagtggcaccgagtcggtgctttt

SEQ ID NO: 406 - RNA, 100 nt, synthetic construct
  source 1..100: mol_type = other RNA; note = Description of Artificial Sequence: Synthetic polynucleotide
  modified_base 1: mod_base = OTHER; note = 2'-O-Methyl-cytidine phosphorothioate
  modified_base 2: mod_base = OTHER; note = 2'-O-Methyl-adenosine phosphorothioate
  modified_base 3: mod_base = OTHER; note = 2'-O-Methyl-cytidine phosphorothioate
  modified_base 97: mod_base = OTHER; note = uridine phosphorothioate
  modified_base 98: mod_base = OTHER; note = 2'-O-Methyl-uridine phosphorothioate
  modified_base 99: mod_base = OTHER; note = 2'-O-Methyl-uridine phosphorothioate
  modified_base 100: mod_base = OTHER; note = 2'-O-Methyl-uridine
caccgctgccggcaacttccgttttagagctagaaatagcaagttaaaataaggctagtccgttatcaacttgaaaaagtggcaccgagtcggtgctttt

SEQ ID NO: 407 - RNA, 100 nt, synthetic construct
  source 1..100: mol_type = other RNA; note = Description of Artificial Sequence: Synthetic polynucleotide
  modified_base 1: mod_base = OTHER; note = 2'-O-Methyl-adenosine phosphorothioate
  modified_base 2: mod_base = OTHER; note = 2'-O-Methyl-guanosine phosphorothioate
  modified_base 3: mod_base = OTHER; note = 2'-O-Methyl-cytidine phosphorothioate
  modified_base 97: mod_base = OTHER; note = uridine phosphorothioate
  modified_base 98: mod_base = OTHER; note = 2'-O-Methyl-uridine phosphorothioate
  modified_base 99: mod_base = OTHER; note = 2'-O-Methyl-uridine phosphorothioate
  modified_base 100: mod_base = OTHER; note = 2'-O-Methyl-uridine
agccctcgccaggcgctggcgttttagagctagaaatagcaagttaaaataaggctagtccgttatcaacttgaaaaagtggcaccgagtcggtgctttt

SEQ ID NO: 408 - RNA, 100 nt, synthetic construct
  source 1..100: mol_type = other RNA; note = Description of Artificial Sequence: Synthetic polynucleotide
  modified_base 1: mod_base = OTHER; note = 2'-O-Methyl-cytidine phosphorothioate
  modified_base 2: mod_base = OTHER; note = 2'-O-Methyl-adenosine phosphorothioate
  modified_base 3: mod_base = OTHER; note = 2'-O-Methyl-adenosine phosphorothioate
  modified_base 97: mod_base = OTHER; note = uridine phosphorothioate
  modified_base 98: mod_base = OTHER; note = 2'-O-Methyl-uridine phosphorothioate
  modified_base 99: mod_base = OTHER; note = 2'-O-Methyl-uridine phosphorothioate
  modified_base 100: mod_base = OTHER; note = 2'-O-Methyl-uridine
caacgccgcctgccagcgccgttttagagctagaaatagcaagttaaaataaggctagtccgttatcaacttgaaaaagtggcaccgagtcggtgctttt

SEQ ID NO: 409 - RNA, 100 nt, synthetic construct
  source 1..100: mol_type = other RNA; note = Description of Artificial Sequence: Synthetic polynucleotide
  modified_base 1: mod_base = OTHER; note = 2'-O-Methyl-guanosine phosphorothioate
  modified_base 2: mod_base = OTHER; note = 2'-O-Methyl-cytidine phosphorothioate
  modified_base 3: mod_base = OTHER; note = 2'-O-Methyl-adenosine phosphorothioate
  modified_base 97: mod_base = OTHER; note = uridine phosphorothioate
  modified_base 98: mod_base = OTHER; note = 2'-O-Methyl-uridine phosphorothioate
  modified_base 99: mod_base = OTHER; note = 2'-O-Methyl-uridine phosphorothioate
  modified_base 100: mod_base = OTHER; note = 2'-O-Methyl-uridine
gcacgaccccagccctcgccgttttagagctagaaatagcaagttaaaataaggctagtccgttatcaacttgaaaaagtggcaccgagtcggtgctttt

SEQ ID NO: 410 - RNA, 100 nt, synthetic construct
  source 1..100: mol_type = other RNA; note = Description of Artificial Sequence: Synthetic polynucleotide
  modified_base 1: mod_base = OTHER; note = 2'-O-Methyl-cytidine phosphorothioate
  modified_base 2: mod_base = OTHER; note = 2'-O-Methyl-cytidine phosphorothioate
  modified_base 3: mod_base = OTHER; note = 2'-O-Methyl-guanosine phosphorothioate
  modified_base 97: mod_base = OTHER; note = uridine phosphorothioate
  modified_base 98: mod_base = OTHER; note = 2'-O-Methyl-uridine phosphorothioate
  modified_base 99: mod_base = OTHER; note = 2'-O-Methyl-uridine phosphorothioate
  modified_base 100: mod_base = OTHER; note = 2'-O-Methyl-uridine
ccgcctgccagcgcctggcggttttagagctagaaatagcaagttaaaataaggctagtccgttatcaacttgaaaaagtggcaccgagtcggtgctttt

SEQ ID NO: 411 - RNA, 100 nt, synthetic construct
  source 1..100: mol_type = other RNA; note = Description of Artificial Sequence: Synthetic polynucleotide
  modified_base 1: mod_base = OTHER; note = 2'-O-Methyl-uridine phosphorothioate
  modified_base 2: mod_base = OTHER; note = 2'-O-Methyl-guanosine phosphorothioate
  modified_base 3: mod_base = OTHER; note = 2'-O-Methyl-cytidine phosphorothioate
  modified_base 97: mod_base = OTHER; note = uridine phosphorothioate
  modified_base 98: mod_base = OTHER; note = 2'-O-Methyl-uridine phosphorothioate
  modified_base 99: mod_base = OTHER; note = 2'-O-Methyl-uridine phosphorothioate
  modified_base 100: mod_base = OTHER; note = 2'-O-Methyl-uridine
tgccagcgcctggcgagggcgttttagagctagaaatagcaagttaaaataaggctagtccgttatcaacttgaaaaagtggcaccgagtcggtgctttt

SEQ ID NO: 412 - RNA, 100 nt, synthetic construct
  source 1..100: mol_type = other RNA; note = Description of Artificial Sequence: Synthetic polynucleotide
  modified_base 1: mod_base = OTHER; note = 2'-O-Methyl-uridine phosphorothioate
  modified_base 2: mod_base = OTHER; note = 2'-O-Methyl-guanosine phosphorothioate
  modified_base 3: mod_base = OTHER; note = 2'-O-Methyl-cytidine phosphorothioate
  modified_base 97: mod_base = OTHER; note = uridine phosphorothioate
  modified_base 98: mod_base = OTHER; note = 2'-O-Methyl-uridine phosphorothioate
  modified_base 99: mod_base = OTHER; note = 2'-O-Methyl-uridine phosphorothioate
  modified_base 100: mod_base = OTHER; note = 2'-O-Methyl-uridine
tgctgctgcccctggcgggtgttttagagctagaaatagcaagttaaaataaggctagtccgttatcaacttgaaaaagtggcaccgagtcggtgctttt

SEQ ID NO: 413 - RNA, 100 nt, synthetic construct
  source 1..100: mol_type = other RNA; note = Description of Artificial Sequence: Synthetic polynucleotide
  modified_base 1: mod_base = OTHER; note = 2'-O-Methyl-uridine phosphorothioate
  modified_base 2: mod_base = OTHER; note = 2'-O-Methyl-cytidine phosphorothioate
  modified_base 3: mod_base = OTHER; note = 2'-O-Methyl-adenosine phosphorothioate
  modified_base 97: mod_base = OTHER; note = uridine phosphorothioate
  modified_base 98: mod_base = OTHER; note = 2'-O-Methyl-uridine phosphorothioate
  modified_base 99: mod_base = OTHER; note = 2'-O-Methyl-uridine phosphorothioate
  modified_base 100: mod_base = OTHER; note = 2'-O-Methyl-uridine
tcaccgctgccggcaacttcgttttagagctagaaatagcaagttaaaataaggctagtccgttatcaacttgaaaaagtggcaccgagtcggtgctttt

SEQ ID NO: 414 - RNA, 100 nt, synthetic construct
  source 1..100: mol_type = other RNA; note = Description of Artificial Sequence: Synthetic polynucleotide
  modified_base 1: mod_base = OTHER; note = 2'-O-Methyl-guanosine phosphorothioate
  modified_base 2: mod_base = OTHER; note = 2'-O-Methyl-guanosine phosphorothioate
  modified_base 3: mod_base = OTHER; note = 2'-O-Methyl-cytidine phosphorothioate
  modified_base 97: mod_base = OTHER; note = uridine phosphorothioate
  modified_base 98: mod_base = OTHER; note = 2'-O-Methyl-uridine phosphorothioate
  modified_base 99: mod_base = OTHER; note = 2'-O-Methyl-uridine phosphorothioate
  modified_base 100: mod_base = OTHER; note = 2'-O-Methyl-uridine
ggcgagggctggggtcgtgcgttttagagctagaaatagcaagttaaaataaggctagtccgttatcaacttgaaaaagtggcaccgagtcggtgctttt

SEQ ID NO: 415 - RNA, 100 nt, synthetic construct
  source 1..100: mol_type = other RNA; note = Description of Artificial Sequence: Synthetic polynucleotide
  modified_base 1: mod_base = OTHER; note = 2'-O-Methyl-uridine phosphorothioate
  modified_base 2: mod_base = OTHER; note = 2'-O-Methyl-uridine phosphorothioate
  modified_base 3: mod_base = OTHER; note = 2'-O-Methyl-cytidine phosphorothioate
  modified_base 97: mod_base = OTHER; note = uridine phosphorothioate
  modified_base 98: mod_base = OTHER; note = 2'-O-Methyl-uridine phosphorothioate
  modified_base 99: mod_base = OTHER; note = 2'-O-Methyl-uridine phosphorothioate
  modified_base 100: mod_base = OTHER; note = 2'-O-Methyl-uridine
ttccgaataaactccaggccgttttagagctagaaatagcaagttaaaataaggctagtccgttatcaacttgaaaaagtggcaccgagtcggtgctttt

SEQ ID NO: 416 - RNA, 100 nt, synthetic construct
  source 1..100: mol_type = other RNA; note = Description of Artificial Sequence: Synthetic polynucleotide
  modified_base 1: mod_base = OTHER; note = 2'-O-Methyl-guanosine phosphorothioate
  modified_base 2: mod_base = OTHER; note = 2'-O-Methyl-uridine phosphorothioate
  modified_base 3: mod_base = OTHER; note = 2'-O-Methyl-guanosine phosphorothioate
  modified_base 97: mod_base = OTHER; note = uridine phosphorothioate
  modified_base 98: mod_base = OTHER; note = 2'-O-Methyl-uridine phosphorothioate
  modified_base 99: mod_base = OTHER; note = 2'-O-Methyl-uridine phosphorothioate
  modified_base 100: mod_base = OTHER; note = 2'-O-Methyl-uridine
gtgctgctgcccctggcggggttttagagctagaaatagcaagttaaaataaggctagtccgttatcaacttgaaaaagtggcaccgagtcggtgctttt

SEQ ID NO: 417 - RNA, 100 nt, synthetic construct
  source 1..100: mol_type = other RNA; note = Description of Artificial Sequence: Synthetic polynucleotide
  modified_base 1: mod_base = OTHER; note = 2'-O-Methyl-guanosine phosphorothioate
  modified_base 2: mod_base = OTHER; note = 2'-O-Methyl-cytidine phosphorothioate
  modified_base 3: mod_base = OTHER; note = 2'-O-Methyl-cytidine phosphorothioate
  modified_base 97: mod_base = OTHER; note = uridine phosphorothioate
  modified_base 98: mod_base = OTHER; note = 2'-O-Methyl-uridine phosphorothioate
  modified_base 99: mod_base = OTHER; note = 2'-O-Methyl-uridine phosphorothioate
  modified_base 100: mod_base = OTHER; note = 2'-O-Methyl-uridine
gccagcgcctggcgagggctgttttagagctagaaatagcaagttaaaataaggctagtccgttatcaacttgaaaaagtggcaccgagtcggtgctttt

SEQ ID NO: 418 - RNA, 100 nt, synthetic construct
  source 1..100: mol_type = other RNA; note = Description of Artificial Sequence: Synthetic polynucleotide
  modified_base 1: mod_base = OTHER; note = 2'-O-Methyl-cytidine phosphorothioate
  modified_base 2: mod_base = OTHER; note = 2'-O-Methyl-cytidine phosphorothioate
  modified_base 3: mod_base = OTHER; note = 2'-O-Methyl-uridine phosphorothioate
  modified_base 97: mod_base = OTHER; note = uridine phosphorothioate
  modified_base 98: mod_base = OTHER; note = 2'-O-Methyl-uridine phosphorothioate
  modified_base 99: mod_base = OTHER; note = 2'-O-Methyl-uridine phosphorothioate
  modified_base 100: mod_base = OTHER; note = 2'-O-Methyl-uridine
cctcgccaggcgctggcagggttttagagctagaaatagcaagttaaaataaggctagtccgttatcaacttgaaaaagtggcaccgagtcggtgctttt

SEQ ID NO: 419 - RNA, 100 nt, synthetic construct; identical to SEQ ID NO: 253
  source 1..100: mol_type = other RNA; note = Description of Artificial Sequence: Synthetic polynucleotide
  modified_base 1: mod_base = OTHER; note = 2'-O-Methyl-guanosine phosphorothioate
  modified_base 2: mod_base = OTHER; note = 2'-O-Methyl-guanosine phosphorothioate
  modified_base 3: mod_base = OTHER; note = 2'-O-Methyl-uridine phosphorothioate
  modified_base 5: mod_base = OTHER; note = cytidine phosphonoacetate
  modified_base 29: mod_base = OTHER; note = 2'-O-Methyl-guanosine
  modified_base 30: mod_base = OTHER; note = 2'-O-Methyl-cytidine
  modified_base 31: mod_base = OTHER; note = 2'-O-Methyl-uridine
  modified_base 32: mod_base = OTHER; note = 2'-O-Methyl-adenosine
  modified_base 33: mod_base = OTHER; note = 2'-O-Methyl-guanosine
  modified_base 34: mod_base = OTHER; note = 2'-O-Methyl-adenosine
  modified_base 35: mod_base = OTHER; note = 2'-O-Methyl-adenosine
  modified_base 36: mod_base = OTHER; note = 2'-O-Methyl-adenosine
  modified_base 37: mod_base = OTHER; note = 2'-O-Methyl-uridine
  modified_base 38: mod_base = OTHER; note = 2'-O-Methyl-adenosine
  modified_base 39: mod_base = OTHER; note = 2'-O-Methyl-guanosine
  modified_base 40: mod_base = OTHER; note = 2'-O-Methyl-cytidine
  modified_base 69: mod_base = OTHER; note = 2'-O-Methyl-adenosine
  modified_base 70: mod_base = OTHER; note = 2'-O-Methyl-cytidine
  modified_base 71: mod_base = OTHER; note = 2'-O-Methyl-uridine
  modified_base 72: mod_base = OTHER; note = 2'-O-Methyl-uridine
  modified_base 73: mod_base = OTHER; note = 2'-O-Methyl-guanosine
  modified_base 74: mod_base = OTHER; note = 2'-O-Methyl-adenosine
  modified_base 75: mod_base = OTHER; note = 2'-O-Methyl-adenosine
  modified_base 76: mod_base = OTHER; note = 2'-O-Methyl-adenosine
  modified_base 77: mod_base = OTHER; note = 2'-O-Methyl-adenosine
  modified_base 78: mod_base = OTHER; note = 2'-O-Methyl-adenosine
  modified_base 79: mod_base = OTHER; note = 2'-O-Methyl-guanosine
  modified_base 80: mod_base = OTHER; note = 2'-O-Methyl-uridine
  modified_base 81: mod_base = OTHER; note = 2'-O-Methyl-guanosine
  modified_base 82: mod_base = OTHER; note = 2'-O-Methyl-guanosine
  modified_base 83: mod_base = OTHER; note = 2'-O-Methyl-cytidine
  modified_base 84: mod_base = OTHER; note = 2'-O-Methyl-adenosine
  modified_base 85: mod_base = OTHER; note = 2'-O-Methyl-cytidine
  modified_base 86: mod_base = OTHER; note = 2'-O-Methyl-cytidine
  modified_base 87: mod_base = OTHER; note = 2'-O-Methyl-guanosine
  modified_base 88: mod_base = OTHER; note = 2'-O-Methyl-adenosine
  modified_base 89: mod_base = OTHER; note = 2'-O-Methyl-guanosine
  modified_base 90: mod_base = OTHER; note = 2'-O-Methyl-uridine
  modified_base 91: mod_base = OTHER; note = 2'-O-Methyl-cytidine
  modified_base 92: mod_base = OTHER; note = 2'-O-Methyl-guanosine
  modified_base 93: mod_base = OTHER; note = 2'-O-Methyl-guanosine
  modified_base 94: mod_base = OTHER; note = 2'-O-Methyl-uridine
  modified_base 95: mod_base = OTHER; note = 2'-O-Methyl-guanosine
  modified_base 96: mod_base = OTHER; note = 2'-O-Methyl-cytidine
  modified_base 97: mod_base = OTHER; note = 2'-O-Methyl-uridine phosphorothioate
  modified_base 98: mod_base = OTHER; note = 2'-O-Methyl-uridine phosphorothioate
  modified_base 99: mod_base = OTHER; note = 2'-O-Methyl-uridine phosphorothioate
  modified_base 100: mod_base = OTHER; note = 2'-O-Methyl-uridine

SEQ ID NO: 420 - RNA, 100 nt, synthetic construct; identical to SEQ ID NO: 253
  source 1..100: mol_type = other RNA; note = Description of Artificial Sequence: Synthetic polynucleotide
  modified_base 1: mod_base = OTHER; note = 2'-O-Methyl-guanosine phosphorothioate
  modified_base 2: mod_base = OTHER; note = 2'-O-Methyl-guanosine phosphorothioate
  modified_base 3: mod_base = OTHER; note = 2'-O-Methyl-uridine phosphorothioate
  modified_base 11: mod_base = OTHER; note = uridine phosphonoacetate
  modified_base 29: mod_base = OTHER; note = 2'-O-Methyl-guanosine
  modified_base 30: mod_base = OTHER; note = 2'-O-Methyl-cytidine
  modified_base 31: mod_base = OTHER; note = 2'-O-Methyl-uridine
  modified_base 32: mod_base = OTHER; note = 2'-O-Methyl-adenosine
  modified_base 33: mod_base = OTHER; note = 2'-O-Methyl-guanosine
  modified_base 34: mod_base = OTHER; note = 2'-O-Methyl-adenosine
  modified_base 35: mod_base = OTHER; note = 2'-O-Methyl-adenosine
  modified_base 36: mod_base = OTHER; note = 2'-O-Methyl-adenosine
  modified_base 37: mod_base = OTHER; note = 2'-O-Methyl-uridine
  modified_base 38: mod_base = OTHER; note = 2'-O-Methyl-adenosine
  modified_base 39: mod_base = OTHER; note = 2'-O-Methyl-guanosine
  modified_base 40: mod_base = OTHER; note = 2'-O-Methyl-cytidine
  modified_base 69: mod_base = OTHER; note = 2'-O-Methyl-adenosine
  modified_base 70: mod_base = OTHER; note = 2'-O-Methyl-cytidine
  modified_base 71: mod_base = OTHER; note = 2'-O-Methyl-uridine
  modified_base 72: mod_base = OTHER; note = 2'-O-Methyl-uridine
  modified_base 73: mod_base = OTHER; note = 2'-O-Methyl-guanosine
  modified_base 74: mod_base = OTHER; note = 2'-O-Methyl-adenosine
  modified_base 75: mod_base = OTHER; note = 2'-O-Methyl-adenosine
  modified_base 76: mod_base = OTHER; note = 2'-O-Methyl-adenosine
  modified_base 77: mod_base = OTHER; note = 2'-O-Methyl-adenosine
  modified_base 78: mod_base = OTHER; note = 2'-O-Methyl-adenosine
  modified_base 79: mod_base = OTHER; note = 2'-O-Methyl-guanosine
  modified_base 80: mod_base = OTHER; note = 2'-O-Methyl-uridine
  modified_base 81: mod_base = OTHER; note = 2'-O-Methyl-guanosine
  modified_base 82: mod_base = OTHER; note = 2'-O-Methyl-guanosine
  modified_base 83: mod_base = OTHER; note = 2'-O-Methyl-cytidine
  modified_base 84: mod_base = OTHER; note = 2'-O-Methyl-adenosine
  modified_base 85: mod_base = OTHER; note = 2'-O-Methyl-cytidine
  modified_base 86: mod_base = OTHER; note = 2'-O-Methyl-cytidine
  modified_base 87: mod_base = OTHER; note = 2'-O-Methyl-guanosine
  modified_base 88: mod_base = OTHER; note = 2'-O-Methyl-adenosine
  modified_base 89: mod_base = OTHER; note = 2'-O-Methyl-guanosine
  modified_base 90: mod_base = OTHER; note = 2'-O-Methyl-uridine
  modified_base 91: mod_base = OTHER; note = 2'-O-Methyl-cytidine
  modified_base 92: mod_base = OTHER; note = 2'-O-Methyl-guanosine
  modified_base 93: mod_base = OTHER; note = 2'-O-Methyl-guanosine
  modified_base 94: mod_base = OTHER; note = 2'-O-Methyl-uridine
  modified_base 95: mod_base = OTHER; note = 2'-O-Methyl-guanosine
  modified_base 96: mod_base = OTHER; note = 2'-O-Methyl-cytidine
  modified_base 97: mod_base = OTHER; note = 2'-O-Methyl-uridine phosphorothioate
  modified_base 98: mod_base = OTHER; note = 2'-O-Methyl-uridine phosphorothioate
  modified_base 99: mod_base = OTHER; note = 2'-O-Methyl-uridine phosphorothioate
  modified_base 100: mod_base = OTHER; note = 2'-O-Methyl-uridine

SEQ ID NO: 421 - RNA, 100 nt, synthetic construct
  source 1..100: mol_type = other RNA; note = Description of Artificial Sequence: Synthetic polynucleotide
  modified_base 1: mod_base = OTHER; note = 2'-O-Methyl-cytidine phosphorothioate
  modified_base 2: mod_base = OTHER; note = 2'-O-Methyl-cytidine phosphorothioate
  modified_base 3: mod_base = OTHER; note = 2'-O-Methyl-cytidine phosphorothioate
  modified_base 21: mod_base = OTHER; note = 2'-O-Methyl-guanosine
  modified_base 28: mod_base = OTHER; note = 2'-O-Methyl-adenosine
  modified_base 29: mod_base = OTHER; note = 2'-O-Methyl-guanosine
  modified_base 30: mod_base = OTHER; note = 2'-O-Methyl-cytidine
  modified_base 31: mod_base = OTHER; note = 2'-O-Methyl-uridine
  modified_base 32: mod_base = OTHER; note = 2'-O-Methyl-adenosine
  modified_base 34: mod_base = OTHER; note = 2'-O-Methyl-adenosine
  modified_base 35: mod_base = OTHER; note = 2'-O-Methyl-adenosine
  modified_base 36: mod_base = OTHER; note = 2'-O-Methyl-adenosine
  modified_base 37: mod_base = OTHER; note = 2'-O-Methyl-uridine
  modified_base 38: mod_base = OTHER; note = 2'-O-Methyl-adenosine
  modified_base 39: mod_base = OTHER; note = 2'-O-Methyl-guanosine
  modified_base 40: mod_base = OTHER; note = 2'-O-Methyl-cytidine
  modified_base 41: mod_base = OTHER; note = 2'-O-Methyl-adenosine
  modified_base 42: mod_base = OTHER; note = 2'-O-Methyl-adenosine
  modified_base 46: mod_base = OTHER; note = 2'-O-Methyl-adenosine
  modified_base 48: mod_base = OTHER; note = 2'-O-Methyl-adenosine
  modified_base 50: mod_base = OTHER; note = 2'-O-Methyl-uridine
  modified_base 52: mod_base = OTHER; note = 2'-O-Methyl-adenosine
  modified_base 53: mod_base = OTHER; note = 2'-O-Methyl-guanosine
  modified_base 54: mod_base = OTHER; note = 2'-O-Methyl-guanosine
  modified_base 57: mod_base = OTHER; note = 2'-O-Methyl-adenosine
  modified_base 61: mod_base = OTHER; note = 2'-O-Methyl-cytidine
  modified_base 66: mod_base = OTHER; note = 2'-O-Methyl-uridine
  modified_base 67: mod_base = OTHER; note = 2'-O-Methyl-cytidine
  modified_base 70: mod_base = OTHER; note = 2'-O-Methyl-cytidine
  modified_base 71: mod_base = OTHER; note = 2'-O-Methyl-uridine
  modified_base 72: mod_base = OTHER; note = 2'-O-Methyl-uridine
  modified_base 74: mod_base = OTHER; note = 2'-O-Methyl-adenosine
  modified_base 75: mod_base = OTHER; note = 2'-O-Methyl-adenosine
  modified_base 76: mod_base = OTHER; note = 2'-O-Methyl-adenosine
  modified_base 77: mod_base = OTHER; note = 2'-O-Methyl-adenosine
  modified_base 78: mod_base = OTHER; note = 2'-O-Methyl-adenosine
  modified_base 79: mod_base = OTHER; note = 2'-O-Methyl-guanosine
  modified_base 80: mod_base = OTHER; note = 2'-O-Methyl-uridine
  modified_base 82: mod_base = OTHER; note = 2'-O-Methyl-guanosine
  modified_base 83: mod_base = OTHER; note = 2'-O-Methyl-cytidine
  modified_base 84: mod_base = OTHER; note = 2'-O-Methyl-adenosine
  modified_base 85: mod_base = OTHER; note = 2'-O-Methyl-cytidine
  modified_base 86: mod_base = OTHER; note = 2'-O-Methyl-cytidine
  modified_base 87: mod_base = OTHER; note = 2'-O-Methyl-guanosine
  modified_base 89: mod_base = OTHER; note = 2'-O-Methyl-guanosine
  modified_base 92: mod_base = OTHER; note = 2'-O-Methyl-guanosine
  modified_base 93: mod_base = OTHER; note = 2'-O-Methyl-guanosine
  modified_base 94: mod_base = OTHER; note = 2'-O-Methyl-uridine
  modified_base 95: mod_base = OTHER; note = 2'-O-Methyl-guanosine
  modified_base 96: mod_base = OTHER; note = 2'-O-Methyl-cytidine
  modified_base 97: mod_base = OTHER; note = 2'-O-Methyl-uridine phosphorothioate
  modified_base 98: mod_base = OTHER; note = 2'-O-Methyl-uridine phosphorothioate
  modified_base 99: mod_base = OTHER; note = 2'-O-Methyl-uridine phosphorothioate
  modified_base 100: mod_base = OTHER; note = 2'-O-Methyl-uridine
cccataccttggagcaacgggttttagagctagaaatagcaagttaaaataaggctagtccgttatcaacttgaaaaagtggcaccgagtcggtgctttt

SEQ ID NO: 422 - RNA, 100 nt, synthetic construct
  source 1..100: mol_type = other RNA; note = Description of Artificial Sequence: Synthetic polynucleotide
  modified_base 1: mod_base = OTHER; note = 2'-O-Methyl-guanosine phosphorothioate
  modified_base 2: mod_base = OTHER; note = 2'-O-Methyl-adenosine phosphorothioate
  modified_base 3: mod_base = OTHER; note = 2'-O-Methyl-guanosine phosphorothioate
  modified_base 21: mod_base = OTHER; note = 2'-O-Methyl-guanosine
  modified_base 28: mod_base = OTHER; note = 2'-O-Methyl-adenosine
  modified_base 29: mod_base = OTHER; note = 2'-O-Methyl-guanosine
  modified_base 30: mod_base = OTHER; note = 2'-O-Methyl-cytidine
  modified_base 31: mod_base = OTHER; note = 2'-O-Methyl-uridine
  modified_base 32: mod_base = OTHER; note = 2'-O-Methyl-adenosine
  modified_base 34: mod_base = OTHER; note = 2'-O-Methyl-adenosine
  modified_base 35: mod_base = OTHER; note = 2'-O-Methyl-adenosine
  modified_base 36: mod_base = OTHER; note = 2'-O-Methyl-adenosine
  modified_base 37: mod_base = OTHER; note = 2'-O-Methyl-uridine
  modified_base 38: mod_base = OTHER; note = 2'-O-Methyl-adenosine
  modified_base 39: mod_base = OTHER; note = 2'-O-Methyl-guanosine
  modified_base 40: mod_base = OTHER; note = 2'-O-Methyl-cytidine
  modified_base 41: mod_base = OTHER; note = 2'-O-Methyl-adenosine
  modified_base 42: mod_base = OTHER; note = 2'-O-Methyl-adenosine
  modified_base 46: mod_base = OTHER; note = 2'-O-Methyl-adenosine
  modified_base 48: mod_base = OTHER; note = 2'-O-Methyl-adenosine
  modified_base 50: mod_base = OTHER; note = 2'-O-Methyl-uridine
  modified_base 52: mod_base = OTHER; note = 2'-O-Methyl-adenosine
  modified_base 53: mod_base = OTHER; note = 2'-O-Methyl-guanosine
  modified_base 54: mod_base = OTHER; note = 2'-O-Methyl-guanosine
  modified_base 57: mod_base = OTHER; note = 2'-O-Methyl-adenosine
  modified_base 61: mod_base = OTHER; note = 2'-O-Methyl-cytidine
  modified_base 66: mod_base = OTHER; note = 2'-O-Methyl-uridine
  modified_base 67: mod_base = OTHER; note = 2'-O-Methyl-cytidine
  modified_base 70: mod_base = OTHER; note = 2'-O-Methyl-cytidine
  modified_base 71: mod_base = OTHER; note = 2'-O-Methyl-uridine
  modified_base 72: mod_base = OTHER; note = 2'-O-Methyl-uridine
  modified_base 74: mod_base = OTHER; note = 2'-O-Methyl-adenosine
  modified_base 75: mod_base = OTHER; note = 2'-O-Methyl-adenosine
  modified_base 76: mod_base = OTHER; note = 2'-O-Methyl-adenosine
  modified_base 77: mod_base = OTHER; note = 2'-O-Methyl-adenosine
  modified_base 78: mod_base = OTHER; note = 2'-O-Methyl-adenosine
  modified_base 79: mod_base = OTHER; note = 2'-O-Methyl-guanosine
  modified_base 80: mod_base = OTHER; note = 2'-O-Methyl-uridine
  modified_base 82: mod_base = OTHER; note = 2'-O-Methyl-guanosine
  modified_base 83: mod_base = OTHER; note = 2'-O-Methyl-cytidine
  modified_base 84: mod_base = OTHER; note = 2'-O-Methyl-adenosine
  modified_base 85: mod_base = OTHER; note = 2'-O-Methyl-cytidine
  modified_base 86: mod_base = OTHER; note = 2'-O-Methyl-cytidine
  modified_base 87: mod_base = OTHER; note = 2'-O-Methyl-guanosine
  modified_base 89: mod_base = OTHER; note = 2'-O-Methyl-guanosine
  modified_base 92: mod_base = OTHER; note = 2'-O-Methyl-guanosine
  modified_base 93: mod_base = OTHER; note = 2'-O-Methyl-guanosine
  modified_base 94: mod_base = OTHER; note = 2'-O-Methyl-uridine
  modified_base 95: mod_base = OTHER; note = 2'-O-Methyl-guanosine
  modified_base 96: mod_base = OTHER; note = 2'-O-Methyl-cytidine
  modified_base 97: mod_base = OTHER; note = 2'-O-Methyl-uridine phosphorothioate
  modified_base 98: mod_base = OTHER; note = 2'-O-Methyl-uridine phosphorothioate
  modified_base 99: mod_base = OTHER; note = 2'-O-Methyl-uridine phosphorothioate
  modified_base 100: mod_base = OTHER; note = 2'-O-Methyl-uridine
gagatacctgagtaactttcgttttagagctagaaatagcaagttaaaataaggctagtccgttatcaacttgaaaaagtggcaccgagtcggtgctttt

SEQ ID NO: 423 - RNA, 100 nt, synthetic construct
  source 1..100: mol_type = other RNA; note = Description of Artificial Sequence: Synthetic polynucleotide
  modified_base 1: mod_base = OTHER; note = 2'-O-Methyl-adenosine phosphorothioate
  modified_base 2: mod_base = OTHER; note = 2'-O-Methyl-cytidine phosphorothioate
  modified_base 3: mod_base = OTHER; note = 2'-O-Methyl-guanosine phosphorothioate
  modified_base 97: mod_base = OTHER; note = uridine phosphorothioate
  modified_base 98: mod_base = OTHER; note = 2'-O-Methyl-uridine phosphorothioate
  modified_base 99: mod_base = OTHER; note = 2'-O-Methyl-uridine phosphorothioate
  modified_base 100: mod_base = OTHER; note = 2'-O-Methyl-uridine
acgtgggagaactacaaatagttttagagctagaaatagcaagttaaaataaggctagtccgttatcaacttgaaaaagtggcaccgagtcggtgctttt

SEQ ID NO: 424 - RNA, 100 nt, synthetic construct
  source 1..100: mol_type = other RNA; note = Description of Artificial Sequence: Synthetic polynucleotide
  modified_base 1: mod_base = OTHER; note = 2'-O-Methyl-cytidine phosphorothioate
  modified_base 2: mod_base = OTHER; note = 2'-O-Methyl-guanosine phosphorothioate
  modified_base 3: mod_base = OTHER; note = 2'-O-Methyl-adenosine phosphorothioate
  modified_base 97: mod_base = OTHER; note = uridine phosphorothioate
  modified_base 98: mod_base = OTHER; note = 2'-O-Methyl-uridine phosphorothioate
  modified_base 99: mod_base = OTHER; note = 2'-O-Methyl-uridine phosphorothioate
  modified_base 100: mod_base = OTHER; note = 2'-O-Methyl-uridine
cgatgttgaattaatgtccagttttagagctagaaatagcaagttaaaataaggctagtccgttatcaacttgaaaaagtggcaccgagtcggtgctttt

SEQ ID NO: 425 - RNA, 100 nt, synthetic construct
  source 1..100: mol_type = other RNA; note = Description of Artificial Sequence: Synthetic polynucleotide
  modified_base 1: mod_base = OTHER; note = 2'-O-Methyl-cytidine phosphorothioate
  modified_base 2: mod_base = OTHER; note = 2'-O-Methyl-adenosine phosphorothioate
  modified_base 3: mod_base = OTHER; note = 2'-O-Methyl-cytidine phosphorothioate
  modified_base 97: mod_base = OTHER; note = uridine phosphorothioate
  modified_base 98: mod_base = OTHER; note = 2'-O-Methyl-uridine phosphorothioate
  modified_base 99: mod_base = OTHER; note = 2'-O-Methyl-uridine phosphorothioate
  modified_base 100: mod_base = OTHER; note = 2'-O-Methyl-uridine
cacaaaacttcaatgaaacggttttagagctagaaatagcaagttaaaataaggctagtccgttatcaacttgaaaaagtggcaccgagtcggtgctttt

SEQ ID NO: 426 - RNA, 100 nt, synthetic construct
  source 1..100: mol_type = other RNA; note = Description of Artificial Sequence: Synthetic polynucleotide
  modified_base 1: mod_base = OTHER; note = 2'-O-Methyl-uridine phosphorothioate
  modified_base 2: mod_base = OTHER; note = 2'-O-Methyl-adenosine phosphorothioate
  modified_base 3: mod_base = OTHER; note = 2'-O-Methyl-cytidine phosphorothioate
  modified_base 97: mod_base = OTHER; note = uridine phosphorothioate
  modified_base 98: mod_base = OTHER; note = 2'-O-Methyl-uridine phosphorothioate
  modified_base 99: mod_base = OTHER; note = 2'-O-Methyl-uridine phosphorothioate
  modified_base 100: mod_base = OTHER; note = 2'-O-Methyl-uridine
tacgaattgagttggaagacgttttagagctagaaatagcaagttaaaataaggctagtccgttatcaacttgaaaaagtggcaccgagtcggtgctttt

SEQ ID NO: 427 - RNA, 100 nt, synthetic construct
  source 1..100: mol_type = other RNA; note = Description of Artificial Sequence: Synthetic polynucleotide
  modified_base 1: mod_base = OTHER; note = 2'-O-Methyl-cytidine phosphorothioate
  modified_base 2: mod_base = OTHER; note = 2'-O-Methyl-uridine phosphorothioate
  modified_base 3: mod_base = OTHER; note = 2'-O-Methyl-adenosine phosphorothioate
  modified_base 97: mod_base = OTHER; note = uridine phosphorothioate
  modified_base 98: mod_base = OTHER; note = 2'-O-Methyl-uridine phosphorothioate
  modified_base 99: mod_base = OTHER; note = 2'-O-Methyl-uridine phosphorothioate
  modified_base 100: mod_base = OTHER; note = 2'-O-Methyl-uridine
ctatggagtatatcttctctgttttagagctagaaatagcaagttaaaataaggctagtccgttatcaacttgaaaaagtggcaccgagtcggtgctttt

SEQ ID NO: 428 - RNA, 100 nt, synthetic construct
  source 1..100: mol_type = other RNA; note = Description of Artificial Sequence: Synthetic polynucleotide
  modified_base 1: mod_base = OTHER; note = 2'-O-Methyl-cytidine phosphorothioate
  modified_base 2: mod_base = OTHER; note = 2'-O-Methyl-cytidine phosphorothioate
  modified_base 3: mod_base = OTHER; note = 2'-O-Methyl-cytidine phosphorothioate
  modified_base 21: mod_base = OTHER; note = 2'-O-Methyl-guanosine
  modified_base 28: mod_base = OTHER; note = 2'-O-Methyl-adenosine
  modified_base 29: mod_base = OTHER; note = 2'-O-Methyl-guanosine
  modified_base 30: mod_base = OTHER; note = 2'-O-Methyl-cytidine
  modified_base 31: mod_base = OTHER; note = 2'-O-Methyl-uridine
  modified_base 32: mod_base = OTHER; note = 2'-O-Methyl-adenosine
  modified_base 33: mod_base = OTHER; note = 2'-O-Methyl-guanosine
  modified_base 34: mod_base = OTHER; note = 2'-O-Methyl-adenosine
  modified_base 35: mod_base = OTHER; note = 2'-O-Methyl-adenosine
  modified_base 36: mod_base = OTHER; note = 2'-O-Methyl-adenosine
  modified_base 37: mod_base = OTHER; note = 2'-O-Methyl-uridine
  modified_base 38: mod_base = OTHER; note = 2'-O-Methyl-adenosine
  modified_base 39: mod_base = OTHER; note = 2'-O-Methyl-guanosine
  modified_base 40: mod_base = OTHER; note = 2'-O-Methyl-cytidine
  modified_base 41: mod_base = OTHER; note = 2'-O-Methyl-adenosine
  modified_base 42: mod_base = OTHER; note = 2'-O-Methyl-adenosine
  modified_base 46: mod_base = OTHER; note = 2'-O-Methyl-adenosine
  modified_base 48: mod_base = OTHER; note = 2'-O-Methyl-adenosine
  modified_base 50: mod_base = OTHER; note = 2'-O-Methyl-uridine
  modified_base 52: mod_base = OTHER; note = 2'-O-Methyl-adenosine
  modified_base 53: mod_base = OTHER; note = 2'-O-Methyl-guanosine
  modified_base 54: mod_base = OTHER; note = 2'-O-Methyl-guanosine
  modified_base 55: mod_base = OTHER; note = 2'-O-Methyl-cytidine
  modified_base 56: mod_base = OTHER; note = 2'-O-Methyl-uridine
  modified_base 57: mod_base = OTHER; note = 2'-O-Methyl-adenosine
  modified_base 60: mod_base = OTHER; note = 2'-O-Methyl-cytidine
  modified_base 61: mod_base = OTHER; note = 2'-O-Methyl-cytidine
  modified_base 66: mod_base = OTHER; note = 2'-O-Methyl-adenosine
  modified_base 67: mod_base = OTHER; note = 2'-O-Methyl-cytidine
  modified_base 70: mod_base = OTHER; note = 2'-O-Methyl-cytidine
  modified_base 71: mod_base = OTHER; note = 2'-O-Methyl-guanosine
  modified_base 72: mod_base = OTHER; note = 2'-O-Methyl-guanosine
  modified_base 73: mod_base = OTHER; note = 2'-O-Methyl-guanosine
  modified_base 74: mod_base = OTHER; note = 2'-O-Methyl-adenosine
  modified_base 75: mod_base = OTHER; note = 2'-O-Methyl-adenosine
  modified_base 76: mod_base = OTHER; note = 2'-O-Methyl-adenosine
  modified_base 77: mod_base = OTHER; note = 2'-O-Methyl-cytidine
  modified_base 78: mod_base = OTHER; note = 2'-O-Methyl-cytidine
  modified_base 79: mod_base = OTHER; note = 2'-O-Methyl-guanosine
  modified_base 80: mod_base = OTHER; note = 2'-O-Methyl-uridine
  modified_base 81: mod_base = OTHER; note = 2'-O-Methyl-guanosine
  modified_base 83: mod_base = OTHER; note = 2'-O-Methyl-cytidine
  modified_base 84: mod_base = OTHER; note = 2'-O-Methyl-adenosine
  modified_base 85: mod_base = OTHER; note = 2'-O-Methyl-cytidine
  modified_base 86: mod_base = OTHER; note = 2'-O-Methyl-cytidine
  modified_base 87: mod_base = OTHER; note = 2'-O-Methyl-guanosine
  modified_base 88: mod_base = OTHER; note = 2'-O-Methyl-adenosine
  modified_base 89: mod_base = OTHER; note = 2'-O-Methyl-guanosine
  modified_base 90: mod_base = OTHER; note = 2'-O-Methyl-uridine
  modified_base 91: mod_base = OTHER; note = 2'-O-Methyl-cytidine
  modified_base 92: mod_base = OTHER; note = 2'-O-Methyl-guanosine
  modified_base 93: mod_base = OTHER; note = 2'-O-Methyl-guanosine
  modified_base 94: mod_base = OTHER; note = 2'-O-Methyl-uridine
  modified_base 95: mod_base = OTHER; note = 2'-O-Methyl-guanosine
  modified_base 96: mod_base = OTHER; note = 2'-O-Methyl-cytidine
  modified_base 97: mod_base = OTHER; note = 2'-O-Methyl-uridine phosphorothioate
  modified_base 98: mod_base = OTHER; note = 2'-O-Methyl-uridine phosphorothioate
  modified_base 99: mod_base = OTHER; note = 2'-O-Methyl-uridine phosphorothioate
  modified_base 100: mod_base = OTHER; note = 2'-O-Methyl-uridine
cccgcaccttggcgcagcgggttttagagctagaaatagcaagttaaaataaggctagtccgttaacaacgggaaaccgtggcaccgagtcggtgctttt

SEQ ID NO: 429 - DNA, 100 bp, synthetic construct
  source 1..100: mol_type = other DNA; note = Description of Artificial Sequence: Synthetic oligonucleotide; note = Description of Combined DNA/RNA Molecule: Synthetic oligonucleotide
  modified_base 1: mod_base = OTHER; note = 2'-O-Methyl-cytidine phosphorothioate
  modified_base 2: mod_base = OTHER; note = 2'-O-Methyl-cytidine phosphorothioate
  modified_base 3: mod_base = OTHER; note = 2'-O-Methyl-cytidine phosphorothioate
  modified_base 21: mod_base = OTHER; note = 2'-O-Methyl-guanosine
  modified_base 28: mod_base = OTHER; note = 2'-O-Methyl-adenosine
  modified_base 29: mod_base = OTHER; note = 2'-O-Methyl-guanosine
  modified_base 30: mod_base = OTHER; note = 2'-O-Methyl-cytidine
  modified_base 31: mod_base = OTHER; note = 2'-O-Methyl-uridine
  modified_base 32: mod_base = OTHER; note = 2'-O-Methyl-adenosine
  modified_base 34: mod_base = OTHER; note = 2'-O-Methyl-adenosine
  modified_base 35: mod_base = OTHER; note = 2'-O-Methyl-adenosine
  modified_base 36: mod_base = OTHER; note = 2'-O-Methyl-adenosine
  modified_base 37: mod_base = OTHER; note = 2'-O-Methyl-uridine
  modified_base 38: mod_base = OTHER; note = 2'-O-Methyl-adenosine
  modified_base 39: mod_base = OTHER; note = 2'-O-Methyl-guanosine
  modified_base 40: mod_base = OTHER; note = 2'-O-Methyl-cytidine
  modified_base 41: mod_base = OTHER; note = 2'-O-Methyl-adenosine
  modified_base 42: mod_base = OTHER; note = 2'-O-Methyl-adenosine
  modified_base 46: mod_base = OTHER; note = 2'-O-Methyl-adenosine
  modified_base 48: mod_base = OTHER; note = 2'-O-Methyl-adenosine
  modified_base 50: mod_base = OTHER; note = 2'-O-Methyl-uridine
  modified_base 52: mod_base = OTHER; note = 2'-O-Methyl-adenosine
  modified_base 53: mod_base = OTHER; note = 2'-O-Methyl-guanosine
  modified_base 54: mod_base = OTHER; note = 2'-O-Methyl-guanosine
  modified_base 55: mod_base = OTHER; note = 2'-O-Methyl-cytidine
  modified_base 56: mod_base = OTHER; note = 2'-O-Methyl-uridine
  modified_base 57: mod_base = OTHER; note = 2'-O-Methyl-adenosine
  modified_base 60: mod_base = OTHER; note = 2'-O-Methyl-cytidine
  modified_base 61: mod_base = OTHER; note = 2'-O-Methyl-cytidine
  modified_base 66: mod_base = OTHER; note = 2'-O-Methyl-uridine
  modified_base 67: mod_base = OTHER; note = 2'-O-Methyl-cytidine
  modified_base 70: mod_base = OTHER; note = 2'-O-Methyl-cytidine
  modified_base 71: mod_base = OTHER; note = 2'-O-Methyl-uridine
  modified_base 72: mod_base = OTHER; note = 2'-O-Methyl-uridine
  modified_base 74: mod_base = OTHER; note = 2'-O-Methyl-adenosine
  modified_base 75: mod_base = OTHER; note = 2'-O-Methyl-adenosine
  modified_base 76: mod_base = OTHER; note = 2'-O-Methyl-adenosine
  modified_base 77: mod_base = OTHER; note = 2'-O-Methyl-adenosine
  modified_base 78: mod_base = OTHER; note = 2'-O-Methyl-adenosine
  modified_base 79: mod_base = OTHER; note = 2'-O-Methyl-guanosine
  modified_base 80: mod_base = OTHER; note = 2'-O-Methyl-uridine
  modified_base 81: mod_base = OTHER; note = 2'-O-Methyl-guanosine
  modified_base 83: mod_base = OTHER; note = 2'-O-Methyl-cytidine
  modified_base 84: mod_base = OTHER; note = 2'-O-Methyl-adenosine
  modified_base 85: mod_base = OTHER; note = 2'-O-Methyl-cytidine
  modified_base 86: mod_base = OTHER; note = 2'-O-Methyl-cytidine
  modified_base 87: mod_base = OTHER; note = 2'-O-Methyl-guanosine
  modified_base 88: mod_base = OTHER; note = 2'-O-Methyl-adenosine
  modified_base 89: mod_base = OTHER; note = 2'-O-Methyl-guanosine
  modified_base 90: mod_base = OTHER; note = 2'-O-Methyl-uridine
  modified_base 91: mod_base = OTHER; note = 2'-O-Methyl-cytidine
  modified_base 92: mod_base = OTHER; note = 2'-O-Methyl-guanosine
  modified_base 93: mod_base = OTHER; note = 2'-O-Methyl-guanosine
  modified_base 94: mod_base = OTHER; note = 2'-O-Methyl-uridine
  modified_base 95: mod_base = OTHER; note = 2'-O-Methyl-guanosine
  modified_base 96: mod_base = OTHER; note = 2'-O-Methyl-cytidine
  modified_base 97: mod_base = OTHER; note = 2'-O-Methyl-uridine phosphorothioate
  modified_base 98: mod_base = OTHER; note = 2'-O-Methyl-uridine phosphorothioate
  modified_base 99: mod_base = OTHER; note = 2'-O-Methyl-uridine phosphorothioate
  modified_base 100: mod_base = OTHER; note = 2'-O-Methyl-uridine
  misc_feature 1..3: note = RNA
  misc_feature 4: note = DNA
  misc_feature 5: note = RNA
  misc_feature 6: note = DNA
  misc_feature 7: note = RNA
  misc_feature 8: note = DNA
  misc_feature 9: note = RNA
  misc_feature 10: note = DNA
  misc_feature 11: note = RNA
  misc_feature 12: note = DNA
  misc_feature 13: note = RNA
  misc_feature 14: note = DNA
  misc_feature 15: note = RNA
  misc_feature 16: note = DNA
  misc_feature 17: note = RNA
  misc_feature 18: note = DNA
  misc_feature 19: note = RNA
  misc_feature 20: note = DNA
  misc_feature 21..100: note = RNA
cccgcaccttggcgcagcgggttttagagctagaaatagcaagttaaaataaggctagtccgttatcaacttgaaaaagtggcaccgagtcggtgctttt

SEQ ID NO: 430 - DNA, 100 bp, synthetic construct; identical to SEQ ID NO: 429
  source 1..100: mol_type = other DNA; note = Description of Artificial Sequence: Synthetic oligonucleotide; note = Description of Combined DNA/RNA Molecule: Synthetic oligonucleotide
  modified_base 1: mod_base = OTHER; note = 2'-O-Methyl-cytidine phosphorothioate
  modified_base 2: mod_base = OTHER; note = 2'-O-Methyl-cytidine phosphorothioate
  modified_base 3: mod_base = OTHER; note = 2'-O-Methyl-cytidine phosphorothioate
  modified_base 21: mod_base = OTHER; note = 2'-O-Methyl-guanosine
  modified_base 28: mod_base = OTHER; note = 2'-O-Methyl-adenosine
  modified_base 29: mod_base = OTHER; note = 2'-O-Methyl-guanosine
  modified_base 30: mod_base = OTHER; note = 2'-O-Methyl-cytidine
  modified_base 31: mod_base = OTHER; note = 2'-O-Methyl-uridine
  modified_base 32: mod_base = OTHER; note = 2'-O-Methyl-adenosine
  modified_base 34: mod_base = OTHER; note = 2'-O-Methyl-adenosine
  modified_base 35: mod_base = OTHER; note = 2'-O-Methyl-adenosine
  modified_base 36: mod_base = OTHER; note = 2'-O-Methyl-adenosine
  modified_base 37: mod_base = OTHER; note = 2'-O-Methyl-uridine
  modified_base 38: mod_base = OTHER; note = 2'-O-Methyl-adenosine
  modified_base 39: mod_base = OTHER; note = 2'-O-Methyl-guanosine
  modified_base 40: mod_base = OTHER; note = 2'-O-Methyl-cytidine
  modified_base 41: mod_base = OTHER; note = 2'-O-Methyl-adenosine
  modified_base 42: mod_base = OTHER; note = 2'-O-Methyl-adenosine
  modified_base 46: mod_base = OTHER; note = 2'-O-Methyl-adenosine
  modified_base 48: mod_base = OTHER; note = 2'-O-Methyl-adenosine
  modified_base 50: mod_base = OTHER; note = 2'-O-Methyl-uridine
  modified_base 52: mod_base = OTHER; note = 2'-O-Methyl-adenosine
  modified_base 53: mod_base = OTHER; note = 2'-O-Methyl-guanosine
  modified_base 54: mod_base = OTHER; note = 2'-O-Methyl-guanosine
  modified_base 55: mod_base = OTHER; note = 2'-O-Methyl-cytidine
  modified_base 56: mod_base = OTHER; note = 2'-O-Methyl-uridine
  modified_base 57: mod_base = OTHER; note = 2'-O-Methyl-adenosine
  modified_base 60: mod_base = OTHER; note = 2'-O-Methyl-cytidine
  modified_base 61: mod_base = OTHER; note = 2'-O-Methyl-cytidine
  modified_base 66: mod_base = OTHER; note = 2'-O-Methyl-uridine
  modified_base 67: mod_base = OTHER; note = 2'-O-Methyl-cytidine
  modified_base 70: mod_base = OTHER; note = 2'-O-Methyl-cytidine
  modified_base 71: mod_base = OTHER; note = 2'-O-Methyl-uridine
  modified_base 72: mod_base = OTHER; note = 2'-O-Methyl-uridine
  modified_base 74: mod_base = OTHER; note = 2'-O-Methyl-adenosine
  modified_base 75: mod_base = OTHER; note = 2'-O-Methyl-adenosine
  modified_base 76: mod_base = OTHER; note = 2'-O-Methyl-adenosine
  modified_base 77: mod_base = OTHER; note = 2'-O-Methyl-adenosine
  modified_base 78: mod_base = OTHER; note = 2'-O-Methyl-adenosine
  modified_base 79: mod_base = OTHER; note = 2'-O-Methyl-guanosine
  modified_base 80: mod_base = OTHER; note = 2'-O-Methyl-uridine
  modified_base 81: mod_base = OTHER; note = 2'-O-Methyl-guanosine
  modified_base 83: mod_base = OTHER; note = 2'-O-Methyl-cytidine
  modified_base 84: mod_base = OTHER; note = 2'-O-Methyl-adenosine
  modified_base 85: mod_base = OTHER; note = 2'-O-Methyl-cytidine
  modified_base 86: mod_base = OTHER; note = 2'-O-Methyl-cytidine
  modified_base 87: mod_base = OTHER; note = 2'-O-Methyl-guanosine
  modified_base 88: mod_base = OTHER; note = 2'-O-Methyl-adenosine
  modified_base 89: mod_base = OTHER; note = 2'-O-Methyl-guanosine
  modified_base 90: mod_base = OTHER; note = 2'-O-Methyl-uridine
  modified_base 91: mod_base = OTHER; note = 2'-O-Methyl-cytidine
  modified_base 92: mod_base = OTHER; note = 2'-O-Methyl-guanosine
  modified_base 93: mod_base = OTHER; note = 2'-O-Methyl-guanosine
  modified_base 94: mod_base = OTHER; note = 2'-O-Methyl-uridine
  modified_base 95: mod_base = OTHER; note = 2'-O-Methyl-guanosine
  modified_base 96: mod_base = OTHER; note = 2'-O-Methyl-cytidine
  modified_base 97: mod_base = OTHER; note = 2'-O-Methyl-uridine phosphorothioate
  modified_base 98: mod_base = OTHER; note = 2'-O-Methyl-uridine phosphorothioate
  modified_base 99: mod_base = OTHER; note = 2'-O-Methyl-uridine phosphorothioate
  modified_base 100: mod_base = OTHER; note = 2'-O-Methyl-uridine
  misc_feature 1..4: note = RNA
  misc_feature 5: note = DNA
  misc_feature 6: note = RNA
  misc_feature 7: note = DNA
  misc_feature 8: note = RNA
  misc_feature 9: note = DNA
  misc_feature 10: note = RNA
  misc_feature 11: note = DNA
  misc_feature 12: note = RNA
  misc_feature 13: note = DNA
  misc_feature 14: note = RNA
  misc_feature 15: note = DNA
  misc_feature 16: note = RNA
  misc_feature 17: note = DNA
  misc_feature 18: note = RNA
  misc_feature 19: note = DNA
  misc_feature 20..100: note = RNA

SEQ ID NO: 431 - DNA, 100 bp, synthetic construct; identical to SEQ ID NO: 429
  source 1..100: mol_type = other DNA; note = Description of Artificial Sequence: Synthetic oligonucleotide; note = Description of Combined DNA/RNA Molecule: Synthetic oligonucleotide
  modified_base 1: mod_base = OTHER; note = 2'-O-Methyl-cytidine phosphorothioate
  modified_base 2: mod_base = OTHER; note = 2'-O-Methyl-cytidine phosphorothioate
  modified_base 3: mod_base = OTHER; note = 2'-O-Methyl-cytidine phosphorothioate
  modified_base 21: mod_base = OTHER; note = 2'-O-Methyl-guanosine
  modified_base 28: mod_base = OTHER; note = 2'-O-Methyl-adenosine
  modified_base 29: mod_base = OTHER; note = 2'-O-Methyl-guanosine
  modified_base 30: mod_base = OTHER; note = 2'-O-Methyl-cytidine
  modified_base 31: mod_base = OTHER; note = 2'-O-Methyl-uridine
  modified_base 32: mod_base = OTHER; note = 2'-O-Methyl-adenosine
  modified_base 34: mod_base = OTHER; note = 2'-O-Methyl-adenosine
  modified_base 35: mod_base = OTHER; note = 2'-O-Methyl-adenosine
  modified_base 36: mod_base = OTHER; note = 2'-O-Methyl-adenosine
  modified_base 37: mod_base = OTHER; note = 2'-O-Methyl-uridine
  modified_base 38: mod_base = OTHER; note = 2'-O-Methyl-adenosine
  modified_base 39: mod_base = OTHER; note = 2'-O-Methyl-guanosine
  modified_base 40: mod_base = OTHER; note = 2'-O-Methyl-cytidine
  modified_base 41: mod_base = OTHER; note = 2'-O-Methyl-adenosine
  modified_base 42: mod_base = OTHER; note = 2'-O-Methyl-adenosine
  modified_base 46: mod_base = OTHER; note = 2'-O-Methyl-adenosine
  modified_base 48: mod_base = OTHER; note = 2'-O-Methyl-adenosine
  modified_base 50: mod_base = OTHER; note = 2'-O-Methyl-uridine
  modified_base 52: mod_base = OTHER; note = 2'-O-Methyl-adenosine
  modified_base 53: mod_base = OTHER; note = 2'-O-Methyl-guanosine
  modified_base 54: mod_base = OTHER; note = 2'-O-Methyl-guanosine
  modified_base 55: mod_base = OTHER; note = 2'-O-Methyl-cytidine
  modified_base 56: mod_base = OTHER; note = 2'-O-Methyl-uridine
  modified_base 57: mod_base = OTHER; note = 2'-O-Methyl-adenosine
  modified_base 60: mod_base = OTHER; note = 2'-O-Methyl-cytidine
  modified_base 61: mod_base = OTHER; note = 2'-O-Methyl-cytidine
  modified_base 66: mod_base = OTHER; note = 2'-O-Methyl-uridine
  modified_base 67: mod_base = OTHER; note = 2'-O-Methyl-cytidine
  modified_base 70: mod_base = OTHER; note = 2'-O-Methyl-cytidine
  modified_base 71: mod_base = OTHER; note = 2'-O-Methyl-uridine
  modified_base 72: mod_base = OTHER; note = 2'-O-Methyl-uridine
  modified_base 74: mod_base = OTHER; note = 2'-O-Methyl-adenosine
  modified_base 75: mod_base = OTHER; note = 2'-O-Methyl-adenosine
  modified_base 76: mod_base = OTHER; note = 2'-O-Methyl-adenosine
  modified_base 77: mod_base = OTHER; note = 2'-O-Methyl-adenosine
  modified_base 78: mod_base = OTHER; note = 2'-O-Methyl-adenosine
  modified_base 79: mod_base = OTHER; note = 2'-O-Methyl-guanosine
  modified_base 80: mod_base = OTHER; note = 2'-O-Methyl-uridine
  modified_base 81: mod_base = OTHER; note = 2'-O-Methyl-guanosine
  modified_base 83: mod_base = OTHER; note = 2'-O-Methyl-cytidine
  modified_base 84: mod_base = OTHER; note = 2'-O-Methyl-adenosine
  modified_base 85: mod_base = OTHER; note = 2'-O-Methyl-cytidine
  modified_base 86: mod_base = OTHER; note = 2'-O-Methyl-cytidine
  modified_base 87: mod_base = OTHER; note = 2'-O-Methyl-guanosine
  modified_base 88: mod_base = OTHER; note = 2'-O-Methyl-adenosine
  modified_base 89: mod_base = OTHER; note = 2'-O-Methyl-guanosine
  modified_base 90: mod_base = OTHER; note = 2'-O-Methyl-uridine
  modified_base 91: mod_base = OTHER; note = 2'-O-Methyl-cytidine
  modified_base 92: mod_base = OTHER; note = 2'-O-Methyl-guanosine
  modified_base 93: mod_base = OTHER; note = 2'-O-Methyl-guanosine
  modified_base 94: mod_base = OTHER; note = 2'-O-Methyl-uridine
  modified_base 95: mod_base = OTHER; note = 2'-O-Methyl-guanosine
  modified_base 96: mod_base = OTHER; note = 2'-O-Methyl-cytidine
  modified_base 97: mod_base = OTHER; note = 2'-O-Methyl-uridine phosphorothioate
  modified_base 98: mod_base = OTHER; note = 2'-O-Methyl-uridine phosphorothioate
  modified_base 99: mod_base = OTHER; note = 2'-O-Methyl-uridine phosphorothioate
  modified_base 100: mod_base = OTHER; note = 2'-O-Methyl-uridine
  misc_feature 1..4: note = RNA
  misc_feature 5: note = DNA
  misc_feature 6..14: note = RNA
  misc_feature 15: note = DNA
  misc_feature 16..100: note = RNA

SEQ ID NO: 432 - DNA, 100 bp, synthetic construct; identical to SEQ ID NO: 429
  source 1..100: mol_type = other DNA; note = Description of Artificial Sequence: Synthetic oligonucleotide; note = Description of Combined DNA/RNA Molecule: Synthetic oligonucleotide
  modified_base 1: mod_base = OTHER; note = 2'-O-Methyl-cytidine phosphorothioate
  modified_base 2: mod_base = OTHER; note = 2'-O-Methyl-cytidine phosphorothioate
  modified_base 3: mod_base = OTHER; note = 2'-O-Methyl-cytidine phosphorothioate
  modified_base 21: mod_base = OTHER; note = 2'-O-Methyl-guanosine
  modified_base 28: mod_base = OTHER; note = 2'-O-Methyl-adenosine
  modified_base 29: mod_base = OTHER; note = 2'-O-Methyl-guanosine
  modified_base 30: mod_base = OTHER; note = 2'-O-Methyl-cytidine
  modified_base 31: mod_base = OTHER; note = 2'-O-Methyl-uridine
  modified_base 32: mod_base = OTHER; note = 2'-O-Methyl-adenosine
  modified_base 34: mod_base = OTHER; note = 2'-O-Methyl-adenosine
  modified_base 35: mod_base = OTHER; note = 2'-O-Methyl-adenosine
  modified_base 36: mod_base = OTHER; note = 2'-O-Methyl-adenosine
  modified_base 37: mod_base = OTHER; note = 2'-O-Methyl-uridine
  modified_base 38: mod_base = OTHER; note = 2'-O-Methyl-adenosine
  modified_base 39: mod_base = OTHER; note = 2'-O-Methyl-guanosine
  modified_base 40: mod_base = OTHER; note = 2'-O-Methyl-cytidine
  modified_base 41: mod_base = OTHER; note = 2'-O-Methyl-adenosine
  modified_base 42: mod_base = OTHER; note = 2'-O-Methyl-adenosine
  modified_base 46: mod_base = OTHER; note = 2'-O-Methyl-adenosine
  modified_base 48: mod_base = OTHER; note = 2'-O-Methyl-adenosine
  modified_base 50: mod_base = OTHER; note = 2'-O-Methyl-uridine
  modified_base 52: mod_base = OTHER; note = 2'-O-Methyl-adenosine
  modified_base 53: mod_base = OTHER; note = 2'-O-Methyl-guanosine
  modified_base 54: mod_base = OTHER; note = 2'-O-Methyl-guanosine
  modified_base 55: mod_base = OTHER; note = 2'-O-Methyl-cytidine
  modified_base 56: mod_base = OTHER; note = 2'-O-Methyl-uridine
  modified_base 57: mod_base = OTHER; note = 2'-O-Methyl-adenosine
  modified_base 60: mod_base = OTHER; note = 2'-O-Methyl-cytidine
  modified_base 61: mod_base = OTHER; note = 2'-O-Methyl-cytidine
  modified_base 66: mod_base = OTHER; note = 2'-O-Methyl-uridine
  modified_base 67: mod_base = OTHER; note = 2'-O-Methyl-cytidine
  modified_base 70: mod_base = OTHER; note = 2'-O-Methyl-cytidine
  modified_base 71: mod_base = OTHER; note = 2'-O-Methyl-uridine
  modified_base 72: mod_base = OTHER; note = 2'-O-Methyl-uridine
  modified_base 74: mod_base = OTHER; note = 2'-O-Methyl-adenosine
  modified_base 75: mod_base = OTHER; note = 2'-O-Methyl-adenosine
  modified_base 76: mod_base = OTHER; note = 2'-O-Methyl-adenosine
  modified_base 77: mod_base = OTHER; note = 2'-O-Methyl-adenosine
  modified_base 78: mod_base = OTHER; note = 2'-O-Methyl-adenosine
  modified_base 79: mod_base = OTHER; note = 2'-O-Methyl-guanosine
  modified_base 80: mod_base = OTHER; note = 2'-O-Methyl-uridine
  modified_base 81: mod_base = OTHER; note = 2'-O-Methyl-guanosine
  modified_base 83: mod_base = OTHER; note = 2'-O-Methyl-cytidine
  modified_base 84: mod_base = OTHER; note = 2'-O-Methyl-adenosine
  modified_base 85: mod_base = OTHER; note = 2'-O-Methyl-cytidine
  modified_base 86: mod_base = OTHER; note = 2'-O-Methyl-cytidine
  modified_base 87: mod_base = OTHER; note = 2'-O-Methyl-guanosine
  modified_base 88: mod_base = OTHER; note = 2'-O-Methyl-adenosine
  modified_base 89: mod_base = OTHER; note = 2'-O-Methyl-guanosine
  modified_base 90: mod_base = OTHER; note = 2'-O-Methyl-uridine
  modified_base 91: mod_base = OTHER; note = 2'-O-Methyl-cytidine
  modified_base 92: mod_base = OTHER; note = 2'-O-Methyl-guanosine
  modified_base 93: mod_base = OTHER; note = 2'-O-Methyl-guanosine
  modified_base 94: mod_base = OTHER; note = 2'-O-Methyl-uridine
  modified_base 95: mod_base = OTHER; note = 2'-O-Methyl-guanosine
  modified_base 96: mod_base = OTHER; note = 2'-O-Methyl-cytidine
  modified_base 97: mod_base = OTHER; note = 2'-O-Methyl-uridine phosphorothioate
  modified_base 98: mod_base = OTHER; note = 2'-O-Methyl-uridine phosphorothioate
  modified_base 99: mod_base = OTHER; note = 2'-O-Methyl-uridine phosphorothioate
  modified_base 100: mod_base = OTHER; note = 2'-O-Methyl-uridine
  misc_feature 1..5: note = RNA
  misc_feature 6: note = DNA
  misc_feature 7..15: note = RNA
  misc_feature 16: note = DNA
  misc_feature 17..100: note = RNA

SEQ ID NO: 433 - DNA, 100 bp, synthetic construct; identical to SEQ ID NO: 429
  source 1..100: mol_type = other DNA; note = Description of Artificial Sequence: Synthetic oligonucleotide; note = Description of Combined DNA/RNA Molecule: Synthetic oligonucleotide
  modified_base 1: mod_base = OTHER; note = 2'-O-Methyl-cytidine phosphorothioate
  modified_base 2: mod_base = OTHER; note = 2'-O-Methyl-cytidine phosphorothioate
  modified_base 3: mod_base = OTHER; note = 2'-O-Methyl-cytidine phosphorothioate
  modified_base 21: mod_base = OTHER; note = 2'-O-Methyl-guanosine
  modified_base 28: mod_base = OTHER; note = 2'-O-Methyl-adenosine
  modified_base 29: mod_base = OTHER; note = 2'-O-Methyl-guanosine
  modified_base 30: mod_base = OTHER; note = 2'-O-Methyl-cytidine
  modified_base 31: mod_base = OTHER; note = 2'-O-Methyl-uridine
  modified_base 32: mod_base = OTHER; note = 2'-O-Methyl-adenosine
  modified_base 34: mod_base = OTHER; note = 2'-O-Methyl-adenosine
  modified_base 35: mod_base = OTHER; note = 2'-O-Methyl-adenosine
  modified_base 36: mod_base = OTHER; note = 2'-O-Methyl-adenosine
  modified_base 37: mod_base = OTHER; note = 2'-O-Methyl-uridine
  modified_base 38: mod_base = OTHER; note = 2'-O-Methyl-adenosine
  modified_base 39: mod_base = OTHER; note = 2'-O-Methyl-guanosine
  modified_base 40: mod_base = OTHER; note = 2'-O-Methyl-cytidine
  modified_base 41: mod_base = OTHER; note = 2'-O-Methyl-adenosine
  modified_base 42: mod_base = OTHER; note = 2'-O-Methyl-adenosine
  modified_base 46: mod_base = OTHER; note = 2'-O-Methyl-adenosine
  modified_base 48: mod_base = OTHER; note = 2'-O-Methyl-adenosine
  modified_base 50: mod_base = OTHER; note = 2'-O-Methyl-uridine
  modified_base 52: mod_base = OTHER; note = 2'-O-Methyl-adenosine
  modified_base 53: mod_base = OTHER; note = 2'-O-Methyl-guanosine
  modified_base 54: mod_base = OTHER; note = 2'-O-Methyl-guanosine
  modified_base 55: mod_base = OTHER; note = 2'-O-Methyl-cytidine
  modified_base 56: mod_base = OTHER; note = 2'-O-Methyl-uridine
  modified_base 57: mod_base = OTHER; note = 2'-O-Methyl-adenosine
  modified_base 60: mod_base = OTHER; note = 2'-O-Methyl-cytidine
  modified_base 61: mod_base = OTHER; note = 2'-O-Methyl-cytidine
  modified_base 66: mod_base = OTHER; note = 2'-O-Methyl-uridine
  modified_base 67: mod_base = OTHER; note = 2'-O-Methyl-cytidine
  modified_base 70: mod_base = OTHER; note = 2'-O-Methyl-cytidine
  modified_base 71: mod_base = OTHER; note = 2'-O-Methyl-uridine
  modified_base 72: mod_base = OTHER; note = 2'-O-Methyl-uridine
  modified_base 74: mod_base = OTHER; note = 2'-O-Methyl-adenosine
  modified_base 75: mod_base = OTHER; note = 2'-O-Methyl-adenosine
  modified_base 76: mod_base = OTHER; note = 2'-O-Methyl-adenosine
  modified_base 77: mod_base = OTHER; note = 2'-O-Methyl-adenosine
  modified_base 78: mod_base = OTHER; note = 2'-O-Methyl-adenosine
  modified_base 79: mod_base = OTHER; note = 2'-O-Methyl-guanosine
  modified_base 80: mod_base = OTHER; note = 2'-O-Methyl-uridine
  modified_base 81: mod_base = OTHER; note = 2'-O-Methyl-guanosine
  modified_base 83: mod_base = OTHER; note = 2'-O-Methyl-cytidine
  modified_base 84: mod_base = OTHER; note = 2'-O-Methyl-adenosine
  modified_base 85: mod_base = OTHER; note = 2'-O-Methyl-cytidine
  modified_base 86: mod_base = OTHER; note = 2'-O-Methyl-cytidine
  modified_base 87: mod_base = OTHER; note = 2'-O-Methyl-guanosine
  modified_base 88: mod_base = OTHER; note = 2'-O-Methyl-adenosine
  modified_base 89: mod_base = OTHER; note = 2'-O-Methyl-guanosine
  modified_base 90: mod_base = OTHER; note = 2'-O-Methyl-uridine
  modified_base 91: mod_base = OTHER; note = 2'-O-Methyl-cytidine
  modified_base 92: mod_base = OTHER; note = 2'-O-Methyl-guanosine
  modified_base 93: mod_base = OTHER; note = 2'-O-Methyl-guanosine
  modified_base 94: mod_base = OTHER; note = 2'-O-Methyl-uridine
  modified_base 95: mod_base = OTHER; note = 2'-O-Methyl-guanosine
  modified_base 96: mod_base = OTHER; note = 2'-O-Methyl-cytidine
  modified_base 97: mod_base = OTHER; note = 2'-O-Methyl-uridine phosphorothioate
  modified_base 98: mod_base = OTHER; note = 2'-O-Methyl-uridine phosphorothioate
  modified_base 99: mod_base = OTHER; note = 2'-O-Methyl-uridine phosphorothioate
  modified_base 100: mod_base = OTHER; note = 2'-O-Methyl-uridine
  misc_feature 1..9: note = RNA
  misc_feature 10: note = DNA
  misc_feature 11..12: note = RNA
  misc_feature 13: note = DNA
  misc_feature 14..17: note = RNA
  misc_feature 18: note = DNA
  misc_feature 19..100: note = RNA

SEQ ID NO: 434 - DNA, 100 bp, synthetic construct; identical to SEQ ID NO: 429
  source 1..100: mol_type = other DNA; note = Description of Artificial Sequence: Synthetic oligonucleotide; note = Description of Combined DNA/RNA Molecule: Synthetic oligonucleotide
  modified_base 1: mod_base = OTHER; note = 2'-O-Methyl-cytidine phosphorothioate
  modified_base 2: mod_base = OTHER; note = 2'-O-Methyl-cytidine phosphorothioate
  modified_base 3: mod_base = OTHER; note = 2'-O-Methyl-cytidine phosphorothioate
  modified_base 21: mod_base = OTHER; note = 2'-O-Methyl-guanosine
  modified_base 28: mod_base = OTHER; note = 2'-O-Methyl-adenosine
  modified_base 29: mod_base = OTHER; note = 2'-O-Methyl-guanosine
  modified_base 30: mod_base = OTHER; note = 2'-O-Methyl-cytidine
  modified_base 31: mod_base = OTHER; note = 2'-O-Methyl-uridine
  modified_base 32: mod_base = OTHER; note = 2'-O-Methyl-adenosine
  modified_base 34: mod_base = OTHER; note = 2'-O-Methyl-adenosine
  modified_base 35: mod_base = OTHER; note = 2'-O-Methyl-adenosine
  modified_base 36: mod_base = OTHER; note = 2'-O-Methyl-adenosine
  modified_base 37: mod_base = OTHER; note = 2'-O-Methyl-uridine
  modified_base 38: mod_base = OTHER; note = 2'-O-Methyl-adenosine
  modified_base 39: mod_base = OTHER; note = 2'-O-Methyl-guanosine
  modified_base 40: mod_base = OTHER; note = 2'-O-Methyl-cytidine
  modified_base 41: mod_base = OTHER; note = 2'-O-Methyl-adenosine
  modified_base 42: mod_base = OTHER; note = 2'-O-Methyl-adenosine
  modified_base 46: mod_base = OTHER; note = 2'-O-Methyl-adenosine
  modified_base 48: mod_base = OTHER; note = 2'-O-Methyl-adenosine
  modified_base 50: mod_base = OTHER; note = 2'-O-Methyl-uridine
  modified_base 52: mod_base = OTHER; note = 2'-O-Methyl-adenosine
  modified_base 53: mod_base = OTHER; note = 2'-O-Methyl-guanosine
  modified_base 54: mod_base = OTHER; note = 2'-O-Methyl-guanosine
  modified_base 55: mod_base = OTHER; note = 2'-O-Methyl-cytidine
  modified_base 56: mod_base = OTHER; note = 2'-O-Methyl-uridine
  modified_base 57: mod_base = OTHER; note = 2'-O-Methyl-adenosine
  modified_base 60: mod_base = OTHER; note = 2'-O-Methyl-cytidine
  modified_base 61: mod_base = OTHER; note = 2'-O-Methyl-cytidine
  modified_base 66: mod_base = OTHER; note = 2'-O-Methyl-uridine
  modified_base 67: mod_base = OTHER; note = 2'-O-Methyl-cytidine
  modified_base 70: mod_base = OTHER; note = 2'-O-Methyl-cytidine
  modified_base 71: mod_base = OTHER; note = 2'-O-Methyl-uridine
  modified_base 72: mod_base = OTHER; note = 2'-O-Methyl-uridine
  modified_base 74: mod_base = OTHER; note = 2'-O-Methyl-adenosine
  modified_base 75: mod_base = OTHER; note = 2'-O-Methyl-adenosine
  modified_base 76: mod_base = OTHER; note = 2'-O-Methyl-adenosine
  modified_base 77: mod_base = OTHER; note = 2'-O-Methyl-adenosine
  modified_base 78: mod_base = OTHER; note = 2'-O-Methyl-adenosine
  modified_base 79: mod_base = OTHER; note = 2'-O-Methyl-guanosine
  modified_base 80: mod_base = OTHER; note = 2'-O-Methyl-uridine
  modified_base 81: mod_base = OTHER; note = 2'-O-Methyl-guanosine
  modified_base 83: mod_base = OTHER; note = 2'-O-Methyl-cytidine
  modified_base 84: mod_base = OTHER; note = 2'-O-Methyl-adenosine
  modified_base 85: mod_base = OTHER; note = 2'-O-Methyl-cytidine
  modified_base 86: mod_base = OTHER; note = 2'-O-Methyl-cytidine
  modified_base 87: mod_base = OTHER; note = 2'-O-Methyl-guanosine
  modified_base 88: mod_base = OTHER; note = 2'-O-Methyl-adenosine
  modified_base 89: mod_base = OTHER; note = 2'-O-Methyl-guanosine
  modified_base 90: mod_base = OTHER; note = 2'-O-Methyl-uridine
  modified_base 91: mod_base = OTHER; note = 2'-O-Methyl-cytidine
  modified_base 92: mod_base = OTHER; note = 2'-O-Methyl-guanosine
  modified_base 93: mod_base = OTHER; note = 2'-O-Methyl-guanosine
  modified_base 94: mod_base = OTHER; note = 2'-O-Methyl-uridine
  modified_base 95: mod_base = OTHER; note = 2'-O-Methyl-guanosine
  modified_base 96: mod_base = OTHER; note = 2'-O-Methyl-cytidine
  modified_base 97: mod_base = OTHER; note = 2'-O-Methyl-uridine phosphorothioate
  modified_base 98: mod_base = OTHER; note = 2'-O-Methyl-uridine phosphorothioate
  modified_base 99: mod_base = OTHER; note = 2'-O-Methyl-uridine phosphorothioate
  modified_base 100: mod_base = OTHER; note = 2'-O-Methyl-uridine
  misc_feature 1..10: note = RNA
  misc_feature 11: note = DNA
  misc_feature 12..13: note = RNA
  misc_feature 14: note = DNA
  misc_feature 15..18: note = RNA
  misc_feature 19: note = DNA
  misc_feature 20..100: note = RNA

SEQ ID NO: 435 - DNA, 100 bp, synthetic construct; identical to SEQ ID NO: 429
  source 1..100: mol_type = other DNA; note = Description of Artificial Sequence: Synthetic oligonucleotide; note = Description of Combined DNA/RNA Molecule: Synthetic oligonucleotide
  modified_base 1: mod_base = OTHER; note = 2'-O-Methyl-cytidine phosphorothioate
  modified_base 2: mod_base = OTHER; note = 2'-O-Methyl-cytidine phosphorothioate
  modified_base 3: mod_base = OTHER; note = 2'-O-Methyl-cytidine phosphorothioate
  modified_base 21: mod_base = OTHER; note = 2'-O-Methyl-guanosine
  modified_base 28: mod_base = OTHER; note = 2'-O-Methyl-adenosine
  modified_base 29: mod_base = OTHER; note = 2'-O-Methyl-guanosine
  modified_base 30: mod_base = OTHER; note = 2'-O-Methyl-cytidine
  modified_base 31: mod_base = OTHER; note = 2'-O-Methyl-uridine
  modified_base 32: mod_base = OTHER; note = 2'-O-Methyl-adenosine
  modified_base 34: mod_base = OTHER; note = 2'-O-Methyl-adenosine
  modified_base 35: mod_base = OTHER; note = 2'-O-Methyl-adenosine
  modified_base 36: mod_base = OTHER; note = 2'-O-Methyl-adenosine
  modified_base 37: mod_base = OTHER; note = 2'-O-Methyl-uridine
  modified_base 38: mod_base = OTHER; note = 2'-O-Methyl-adenosine
  modified_base 39: mod_base = OTHER; note = 2'-O-Methyl-guanosine
  modified_base 40: mod_base = OTHER; note = 2'-O-Methyl-cytidine
  modified_base 41: mod_base = OTHER; note = 2'-O-Methyl-adenosine
  modified_base 42: mod_base = OTHER; note = 2'-O-Methyl-adenosine
  modified_base 46: mod_base = OTHER; note = 2'-O-Methyl-adenosine
  modified_base 48: mod_base = OTHER; note = 2'-O-Methyl-adenosine
  modified_base 50: mod_base = OTHER; note = 2'-O-Methyl-uridine
  modified_base 52: mod_base = OTHER; note = 2'-O-Methyl-adenosine
  modified_base 53: mod_base = OTHER; note = 2'-O-Methyl-guanosine
  modified_base 54: mod_base = OTHER; note = 2'-O-Methyl-guanosine
  modified_base 55: mod_base = OTHER; note = 2'-O-Methyl-cytidine
  modified_base 56: mod_base = OTHER; note = 2'-O-Methyl-uridine
  modified_base 57: mod_base = OTHER; note = 2'-O-Methyl-adenosine
  modified_base 60: mod_base = OTHER; note = 2'-O-Methyl-cytidine
  modified_base 61: mod_base = OTHER; note = 2'-O-Methyl-cytidine
  modified_base 66: mod_base = OTHER; note = 2'-O-Methyl-uridine
  modified_base 67: mod_base = OTHER; note = 2'-O-Methyl-cytidine
  modified_base 70: mod_base = OTHER; note = 2'-O-Methyl-cytidine
  modified_base 71: mod_base = OTHER; note = 2'-O-Methyl-uridine
  modified_base 72: mod_base = OTHER; note = 2'-O-Methyl-uridine
  modified_base 74: mod_base = OTHER; note = 2'-O-Methyl-adenosine
  modified_base 75: mod_base = OTHER; note = 2'-O-Methyl-adenosine
  modified_base 76: mod_base = OTHER; note = 2'-O-Methyl-adenosine
  modified_base 77: mod_base = OTHER; note = 2'-O-Methyl-adenosine
  modified_base 78: mod_base = OTHER; note = 2'-O-Methyl-adenosine
  modified_base 79: mod_base = OTHER; note = 2'-O-Methyl-guanosine
  modified_base 80: mod_base = OTHER; note = 2'-O-Methyl-uridine
  modified_base 81: mod_base = OTHER; note = 2'-O-Methyl-guanosine
  modified_base 83: mod_base = OTHER; note = 2'-O-Methyl-cytidine
  modified_base 84: mod_base = OTHER; note = 2'-O-Methyl-adenosine
  modified_base 85: mod_base = OTHER; note = 2'-O-Methyl-cytidine
  modified_base 86: mod_base = OTHER; note = 2'-O-Methyl-cytidine
  modified_base 87: mod_base = OTHER; note = 2'-O-Methyl-guanosine
  modified_base 88: mod_base = OTHER; note = 2'-O-Methyl-adenosine
  modified_base 89: mod_base = OTHER; note = 2'-O-Methyl-guanosine
  modified_base 90: mod_base = OTHER; note = 2'-O-Methyl-uridine
  modified_base 91: mod_base = OTHER; note = 2'-O-Methyl-cytidine
  modified_base 92: mod_base = OTHER; note = 2'-O-Methyl-guanosine
  modified_base 93: mod_base = OTHER; note = 2'-O-Methyl-guanosine
  modified_base 94: mod_base = OTHER; note = 2'-O-Methyl-uridine
  modified_base 95: mod_base = OTHER; note = 2'-O-Methyl-guanosine
  modified_base 96: mod_base = OTHER; note = 2'-O-Methyl-cytidine
  modified_base 97: mod_base = OTHER; note = 2'-O-Methyl-uridine phosphorothioate
  modified_base 98: mod_base = OTHER; note = 2'-O-Methyl-uridine phosphorothioate
  modified_base 99: mod_base = OTHER; note = 2'-O-Methyl-uridine phosphorothioate
  modified_base 100: mod_base = OTHER; note = 2'-O-Methyl-uridine
  misc_feature 1..3: note = RNA
  misc_feature 4..6: note = DNA
  misc_feature 7..8: note = RNA
  misc_feature 9..10: note = DNA
  misc_feature 11..12: note = RNA
  misc_feature 13: note = DNA
  misc_feature 14..16: note = RNA
  misc_feature 17: note = DNA
  misc_feature 18..19: note = RNA
  misc_feature 20: note = DNA
  misc_feature 21..100: note = RNA

SEQ ID NO: 436 - RNA, 102 nt, synthetic construct; identical to SEQ ID NO: 12
  source 1..102: mol_type = other RNA; note = Description of Artificial Sequence: Synthetic polynucleotide
  modified_base 1: mod_base = OTHER; note = 2'-O-Methyl-cytidine phosphorothioate
  modified_base 2: mod_base = OTHER; note = 2'-O-Methyl-cytidine phosphorothioate
  modified_base 3: mod_base = OTHER; note = 2'-O-Methyl-cytidine phosphorothioate
  modified_base 20: mod_base = OTHER; note = 2'-O-Methyl-guanosine
  modified_base 27: mod_base = OTHER; note = 2'-O-Methyl-adenosine
  modified_base 28: mod_base = OTHER; note = 2'-O-Methyl-guanosine
  modified_base 29: mod_base = OTHER; note = 2'-O-Methyl-cytidine
  modified_base 30: mod_base = OTHER; note = 2'-O-Methyl-uridine
  modified_base 31: mod_base = OTHER; note = 2'-O-Methyl-adenosine
  modified_base 33: mod_base = OTHER; note = 2'-O-Methyl-adenosine
  modified_base 34: mod_base = OTHER; note = 2'-O-Methyl-adenosine
  modified_base 35: mod_base = OTHER; note = 2'-O-Methyl-adenosine
  modified_base 36: mod_base = OTHER; note = 2'-O-Methyl-uridine
  modified_base 37: mod_base = OTHER; note = 2'-O-Methyl-adenosine
  modified_base 38: mod_base = OTHER; note = 2'-O-Methyl-guanosine
  modified_base 39: mod_base = OTHER; note = 2'-O-Methyl-cytidine
  modified_base 40: mod_base = OTHER; note = 2'-O-Methyl-adenosine
  modified_base 41: mod_base = OTHER; note = 2'-O-Methyl-adenosine
  modified_base 45: mod_base = OTHER; note = 2'-O-Methyl-adenosine
  modified_base 47: mod_base = OTHER; note = 2'-O-Methyl-adenosine
  modified_base 49: mod_base = OTHER; note = 2'-O-Methyl-uridine
  modified_base 51: mod_base = OTHER; note = 2'-O-Methyl-adenosine
  modified_base 52: mod_base = OTHER; note = 2'-O-Methyl-guanosine
  modified_base 53: mod_base = OTHER; note = 2'-O-Methyl-guanosine
  modified_base 54: mod_base = OTHER; note = 2'-O-Methyl-cytidine
  modified_base 55: mod_base = OTHER; note = 2'-O-Methyl-uridine
  modified_base 56: mod_base = OTHER; note = 2'-O-Methyl-adenosine
  modified_base 59: mod_base = OTHER; note = 2'-O-Methyl-cytidine
  modified_base 60: mod_base = OTHER; note = 2'-O-Methyl-cytidine
  modified_base 65: mod_base = OTHER; note = 2'-O-Methyl-uridine
  modified_base 66: mod_base = OTHER; note = 2'-O-Methyl-cytidine
  modified_base 69: mod_base = OTHER; note = 2'-O-Methyl-cytidine
  modified_base 70: mod_base = OTHER; note = 2'-O-Methyl-uridine
  modified_base 71: mod_base = OTHER; note = 2'-O-Methyl-uridine
  modified_base 73: mod_base = OTHER; note = 2'-O-Methyl-adenosine
  modified_base 74: mod_base = OTHER; note = 2'-O-Methyl-adenosine
  modified_base 75: mod_base = OTHER; note = 2'-O-Methyl-adenosine
  modified_base 76: mod_base = OTHER; note = 2'-O-Methyl-adenosine
  modified_base 77: mod_base = OTHER; note = 2'-O-Methyl-adenosine
  modified_base 78: mod_base = OTHER; note = 2'-O-Methyl-guanosine
  modified_base 79: mod_base = OTHER; note = 2'-O-Methyl-uridine
  modified_base 80: mod_base = OTHER; note = 2'-O-Methyl-guanosine
  modified_base 82: mod_base = OTHER; note = 2'-O-Methyl-cytidine
  modified_base 83: mod_base = OTHER; note = 2'-O-Methyl-adenosine
  modified_base 84: mod_base = OTHER; note = 2'-O-Methyl-cytidine
  modified_base 85: mod_base = OTHER; note = 2'-O-Methyl-cytidine
  modified_base 86: mod_base = OTHER; note = 2'-O-Methyl-guanosine
  modified_base 87: mod_base = OTHER; note = 2'-O-Methyl-adenosine
  modified_base 88: mod_base = OTHER; note = 2'-O-Methyl-guanosine
  modified_base 89: mod_base = OTHER; note = 2'-O-Methyl-uridine
  modified_base 90: mod_base = OTHER; note = 2'-O-Methyl-cytidine
  modified_base 91: mod_base = OTHER; note = 2'-O-Methyl-guanosine
  modified_base 92: mod_base = OTHER; note = 2'-O-Methyl-guanosine
  modified_base 93: mod_base = OTHER; note = 2'-O-Methyl-uridine
  modified_base 94: mod_base = OTHER; note = 2'-O-Methyl-guanosine
  modified_base 95: mod_base = OTHER; note = 2'-O-Methyl-cytidine
  modified_base 96: mod_base = OTHER; note = 2'-O-Methyl-uridine
  modified_base 97: mod_base = OTHER; note = 2'-O-Methyl-uridine phosphorothioate
  modified_base 98: mod_base = OTHER; note = 2'-O-Methyl-uridine phosphorothioate
  modified_base 99: mod_base = OTHER; note = 2'-O-Methyl-uridine
  modified_base 100: mod_base = OTHER; note = 2'-O-Methyl-uridine
  modified_base 101: mod_base = OTHER; note = 2'-O-Methyl-uridine
  modified_base 102: mod_base = OTHER; note = 2'-O-Methyl-uridine

SEQ ID NO: 437 - RNA, 99 nt, synthetic construct
  source 1..99: mol_type = other RNA; note = Description of Artificial Sequence: Synthetic oligonucleotide
  modified_base 1: mod_base = OTHER; note = 2'-O-Methyl-cytidine phosphorothioate
  modified_base 2: mod_base = OTHER; note = 2'-O-Methyl-cytidine phosphorothioate
  modified_base 20: mod_base = OTHER; note = 2'-O-Methyl-guanosine
  modified_base 27: mod_base = OTHER; note = 2'-O-Methyl-adenosine
  modified_base 28: mod_base = OTHER; note = 2'-O-Methyl-guanosine
  modified_base 29: mod_base = OTHER; note = 2'-O-Methyl-cytidine
  modified_base 30: mod_base = OTHER; note = 2'-O-Methyl-uridine
  modified_base 31: mod_base = OTHER; note = 2'-O-Methyl-adenosine
  modified_base 33: mod_base = OTHER; note = 2'-O-Methyl-adenosine
  modified_base 34: mod_base = OTHER; note = 2'-O-Methyl-adenosine
  modified_base 35: mod_base = OTHER; note = 2'-O-Methyl-adenosine
  modified_base 36: mod_base = OTHER; note = 2'-O-Methyl-uridine
  modified_base 37: mod_base = OTHER; note = 2'-O-Methyl-adenosine
  modified_base 38: mod_base = OTHER; note = 2'-O-Methyl-guanosine
  modified_base 39: mod_base = OTHER; note = 2'-O-Methyl-cytidine
  modified_base 40: mod_base = OTHER; note = 2'-O-Methyl-adenosine
  modified_base 41: mod_base = OTHER; note = 2'-O-Methyl-adenosine
  modified_base 45: mod_base = OTHER; note = 2'-O-Methyl-adenosine
  modified_base 47: mod_base = OTHER; note = 2'-O-Methyl-adenosine
  modified_base 49: mod_base = OTHER; note = 2'-O-Methyl-uridine
  modified_base 51: mod_base = OTHER; note = 2'-O-Methyl-adenosine
  modified_base 52: mod_base = OTHER; note = 2'-O-Methyl-guanosine
  modified_base 53: mod_base = OTHER; note = 2'-O-Methyl-guanosine
  modified_base 54: mod_base = OTHER; note = 2'-O-Methyl-cytidine
  modified_base 55: mod_base = OTHER; note = 2'-O-Methyl-uridine
  modified_base 56: mod_base = OTHER; note = 2'-O-Methyl-adenosine
  modified_base 59: mod_base = OTHER; note = 2'-O-Methyl-cytidine
  modified_base 60: mod_base = OTHER; note = 2'-O-Methyl-cytidine
  modified_base 65: mod_base = OTHER; note = 2'-O-Methyl-uridine
  modified_base 66: mod_base = OTHER; note = 2'-O-Methyl-cytidine
  modified_base 69: mod_base = OTHER; note = 2'-O-Methyl-cytidine
  modified_base 70: mod_base = OTHER; note = 2'-O-Methyl-uridine
  modified_base 71: mod_base = OTHER; note = 2'-O-Methyl-uridine
  modified_base 73: mod_base = OTHER; note = 2'-O-Methyl-adenosine
  modified_base 74: mod_base = OTHER; note = 2'-O-Methyl-adenosine
  modified_base 75: mod_base = OTHER; note = 2'-O-Methyl-adenosine
  modified_base 76: mod_base = OTHER; note = 2'-O-Methyl-adenosine
  modified_base 77: mod_base = OTHER; note = 2'-O-Methyl-adenosine
  modified_base 78: mod_base = OTHER; note = 2'-O-Methyl-guanosine
  modified_base 79: mod_base = OTHER; note = 2'-O-Methyl-uridine
  modified_base 80: mod_base = OTHER; note = 2'-O-Methyl-guanosine
  modified_base 82: mod_base = OTHER; note = 2'-O-Methyl-cytidine
  modified_base 83: mod_base = OTHER; note = 2'-O-Methyl-adenosine
  modified_base 84: mod_base = OTHER; note = 2'-O-Methyl-cytidine
  modified_base 85: mod_base = OTHER; note = 2'-O-Methyl-cytidine
  modified_base 86: mod_base = OTHER; note = 2'-O-Methyl-guanosine
  modified_base 87: mod_base = OTHER; note = 2'-O-Methyl-adenosine
  modified_base 88: mod_base = OTHER; note = 2'-O-Methyl-guanosine
  modified_base 89: mod_base = OTHER; note = 2'-O-Methyl-uridine
  modified_base 90: mod_base = OTHER; note = 2'-O-Methyl-cytidine
  modified_base 91: mod_base = OTHER; note = 2'-O-Methyl-guanosine
  modified_base 92: mod_base = OTHER; note = 2'-O-Methyl-guanosine
  modified_base 93: mod_base = OTHER; note = 2'-O-Methyl-uridine
  modified_base 94: mod_base = OTHER; note = 2'-O-Methyl-guanosine
  modified_base 95: mod_base = OTHER; note = 2'-O-Methyl-cytidine
  modified_base 96: mod_base = OTHER; note = 2'-O-Methyl-uridine phosphorothioate
  modified_base 97: mod_base = OTHER; note = 2'-O-Methyl-uridine phosphorothioate
  modified_base 98: mod_base = OTHER; note = 2'-O-Methyl-uridine phosphorothioate
  modified_base 99: mod_base = OTHER; note = 2'-O-Methyl-uridine
ccgcaccttggcgcagcgggttttagagctagaaatagcaagttaaaataaggctagtccgttatcaacttgaaaaagtggcaccgagtcggtgctttt

SEQ ID NO: 438 - RNA, 103 nt, synthetic construct
  source 1..103: mol_type = other RNA; note = Description of Artificial Sequence: Synthetic polynucleotide
  modified_base 1: mod_base = OTHER; note = 2'-O-Methyl-adenosine phosphorothioate
  modified_base 2: mod_base = OTHER; note = 2'-O-Methyl-adenosine phosphorothioate
  modified_base 3: mod_base = OTHER; note = 2'-O-Methyl-guanosine phosphorothioate
  modified_base 21: mod_base = OTHER; note = 2'-O-Methyl-guanosine
  modified_base 28: mod_base = OTHER; note = 2'-O-Methyl-adenosine
  modified_base 29: mod_base = OTHER; note = 2'-O-Methyl-guanosine
  modified_base 30: mod_base = OTHER; note = 2'-O-Methyl-cytidine
  modified_base 31: mod_base = OTHER; note = 2'-O-Methyl-uridine
  modified_base 32: mod_base = OTHER; note = 2'-O-Methyl-adenosine
  modified_base 34: mod_base = OTHER; note = 2'-O-Methyl-adenosine
  modified_base 35: mod_base = OTHER; note = 2'-O-Methyl-adenosine
  modified_base 36: mod_base = OTHER; note = 2'-O-Methyl-adenosine
  modified_base 37: mod_base = OTHER; note = 2'-O-Methyl-uridine
  modified_base 38: mod_base = OTHER; note = 2'-O-Methyl-adenosine
  modified_base 39: mod_base = OTHER; note = 2'-O-Methyl-guanosine
  modified_base 40: mod_base = OTHER; note = 2'-O-Methyl-cytidine
  modified_base 41: mod_base = OTHER; note = 2'-O-Methyl-adenosine
  modified_base 42: mod_base = OTHER; note = 2'-O-Methyl-adenosine
  modified_base 46: mod_base = OTHER; note = 2'-O-Methyl-adenosine
  modified_base 48: mod_base = OTHER; note = 2'-O-Methyl-adenosine
  modified_base 50: mod_base = OTHER; note = 2'-O-Methyl-uridine
  modified_base 52: mod_base = OTHER; note = 2'-O-Methyl-adenosine
  modified_base 53: mod_base = OTHER; note = 2'-O-Methyl-guanosine
  modified_base 54: mod_base = OTHER; note = 2'-O-Methyl-guanosine
  modified_base 55: mod_base = OTHER; note = 2'-O-Methyl-cytidine
  modified_base 56: mod_base = OTHER; note = 2'-O-Methyl-uridine
  modified_base 57: mod_base = OTHER; note = 2'-O-Methyl-adenosine
  modified_base 60: mod_base = OTHER; note = 2'-O-Methyl-cytidine
  modified_base 61: mod_base = OTHER; note = 2'-O-Methyl-cytidine
  modified_base 66: mod_base = OTHER; note = 2'-O-Methyl-uridine
  modified_base 67: mod_base = OTHER; note = 2'-O-Methyl-cytidine
  modified_base 70: mod_base = OTHER; note = 2'-O-Methyl-cytidine
  modified_base 71: mod_base = OTHER; note = 2'-O-Methyl-uridine
  modified_base 72: mod_base = OTHER; note = 2'-O-Methyl-uridine
  modified_base 74: mod_base = OTHER; note = 2'-O-Methyl-adenosine
  modified_base 75: mod_base = OTHER; note = 2'-O-Methyl-adenosine
  modified_base 76: mod_base = OTHER; note = 2'-O-Methyl-adenosine
  modified_base 77: mod_base = OTHER; note = 2'-O-Methyl-adenosine
  modified_base 78: mod_base = OTHER; note = 2'-O-Methyl-adenosine
  modified_base 79: mod_base = OTHER; note = 2'-O-Methyl-guanosine
  modified_base 80: mod_base = OTHER; note = 2'-O-Methyl-uridine
  modified_base 81: mod_base = OTHER; note = 2'-O-Methyl-guanosine
  modified_base 83: mod_base = OTHER; note = 2'-O-Methyl-cytidine
  modified_base 84: mod_base = OTHER; note = 2'-O-Methyl-adenosine
  modified_base 85: mod_base = OTHER; note = 2'-O-Methyl-cytidine
  modified_base 86: mod_base = OTHER; note = 2'-O-Methyl-cytidine
  modified_base 87: mod_base = OTHER; note = 2'-O-Methyl-guanosine
  modified_base 88: mod_base = OTHER; note = 2'-O-Methyl-adenosine
  modified_base 89: mod_base = OTHER; note = 2'-O-Methyl-guanosine
  modified_base 90: mod_base = OTHER; note = 2'-O-Methyl-uridine
  modified_base 91: mod_base = OTHER; note = 2'-O-Methyl-cytidine
  modified_base 92: mod_base = OTHER; note = 2'-O-Methyl-guanosine
  modified_base 93: mod_base = OTHER; note = 2'-O-Methyl-guanosine
  modified_base 94: mod_base = OTHER; note = 2'-O-Methyl-uridine
  modified_base 95: mod_base = OTHER; note = 2'-O-Methyl-guanosine
  modified_base 96: mod_base = OTHER; note = 2'-O-Methyl-cytidine
  modified_base 97: mod_base = OTHER; note = 2'-O-Methyl-uridine phosphorothioate
  modified_base 98: mod_base = OTHER; note = 2'-O-Methyl-uridine phosphorothioate
  modified_base 99: mod_base = OTHER; note = 2'-O-Methyl-uridine phosphorothioate
  modified_base 100: mod_base = OTHER; note = 2'-O-Methyl-uridine
  modified_base 103: mod_base = OTHER; note = 2'-O-Methyl-uridine
aagatacctgaataaccctcgttttagagctagaaatagcaagttaaaataaggctagtccgttatcaacttgaaaaagtggcaccgagtcggtgcttttttt

SEQ ID NO: 439 - RNA, 100 nt, synthetic construct
  source 1..100: mol_type = other RNA; note = Description of Artificial Sequence: Synthetic polynucleotide
  modified_base 1: mod_base = OTHER; note = 2'-O-Methyl-adenosine phosphorothioate
  modified_base 2: mod_base = OTHER; note = 2'-O-Methyl-adenosine phosphorothioate
  modified_base 3: mod_base = OTHER; note = 2'-O-Methyl-inosine phosphorothioate
  modified_base 21: mod_base = OTHER; note = 2'-O-Methyl-guanosine
  modified_base 28: mod_base = OTHER; note = 2'-O-Methyl-adenosine
  modified_base 29: mod_base = OTHER; note = 2'-O-Methyl-guanosine
  modified_base 30: mod_base = OTHER; note = 2'-O-Methyl-cytidine
  modified_base 31: mod_base = OTHER; note = 2'-O-Methyl-uridine
  modified_base 32: mod_base = OTHER; note = 2'-O-Methyl-adenosine
  modified_base 34: mod_base = OTHER; note = 2'-O-Methyl-adenosine
  modified_base 35: mod_base = OTHER; note = 2'-O-Methyl-adenosine
  modified_base 36: mod_base = OTHER; note = 2'-O-Methyl-adenosine
  modified_base 37: mod_base = OTHER; note = 2'-O-Methyl-uridine
  modified_base 38: mod_base = OTHER; note = 2'-O-Methyl-adenosine
  modified_base 39: mod_base = OTHER; note = 2'-O-Methyl-guanosine
  modified_base 40: mod_base = OTHER; note = 2'-O-Methyl-cytidine
  modified_base 41: mod_base = OTHER; note = 2'-O-Methyl-adenosine
  modified_base 42: mod_base = OTHER; note = 2'-O-Methyl-adenosine
  modified_base 46: mod_base = OTHER; note = 2'-O-Methyl-adenosine
  modified_base 48: mod_base = OTHER; note = 2'-O-Methyl-adenosine
  modified_base 50: mod_base = OTHER; note = 2'-O-Methyl-uridine
  modified_base 52: mod_base = OTHER; note = 2'-O-Methyl-adenosine
  modified_base 53: mod_base = OTHER; note = 2'-O-Methyl-guanosine
  modified_base 54: mod_base = OTHER; note = 2'-O-Methyl-guanosine
  modified_base 55: mod_base = OTHER; note = 2'-O-Methyl-cytidine
  modified_base 56: mod_base = OTHER; note = 2'-O-Methyl-uridine
  modified_base 57: mod_base = OTHER; note = 2'-O-Methyl-adenosine
  modified_base 60: mod_base = OTHER; note = 2'-O-Methyl-cytidine
  modified_base 61: mod_base = OTHER; note = 2'-O-Methyl-cytidine
  modified_base 66: mod_base = OTHER; note = 2'-O-Methyl-uridine
  modified_base 67: mod_base = OTHER; note = 2'-O-Methyl-cytidine
  modified_base 70: mod_base = OTHER; note = 2'-O-Methyl-cytidine
  modified_base 71: mod_base = OTHER; note = 2'-O-Methyl-uridine
  modified_base 72: mod_base = OTHER; note = 2'-O-Methyl-uridine
  modified_base 74: mod_base = OTHER; note = 2'-O-Methyl-adenosine
  modified_base 75: mod_base = OTHER; note = 2'-O-Methyl-adenosine
  modified_base 76: mod_base = OTHER; note = 2'-O-Methyl-adenosine
  modified_base 77: mod_base = OTHER; note = 2'-O-Methyl-adenosine
  modified_base 78: mod_base = OTHER; note = 2'-O-Methyl-adenosine
  modified_base 79: mod_base = OTHER; note = 2'-O-Methyl-guanosine
  modified_base 80: mod_base = OTHER; note = 2'-O-Methyl-uridine
  modified_base 81: mod_base = OTHER; note = 2'-O-Methyl-guanosine
  modified_base 83: mod_base = OTHER; note = 2'-O-Methyl-cytidine
  modified_base 84: mod_base = OTHER; note = 2'-O-Methyl-adenosine
  modified_base 85: mod_base = OTHER; note = 2'-O-Methyl-cytidine
  modified_base 86: mod_base = OTHER; note = 2'-O-Methyl-cytidine
  modified_base 87: mod_base = OTHER; note = 2'-O-Methyl-guanosine
  modified_base 88: mod_base = OTHER; note = 2'-O-Methyl-adenosine
  modified_base 89: mod_base = OTHER; note = 2'-O-Methyl-guanosine
  modified_base 90: mod_base = OTHER; note = 2'-O-Methyl-uridine
  modified_base 91: mod_base = OTHER; note = 2'-O-Methyl-cytidine
  modified_base 92: mod_base = OTHER; note = 2'-O-Methyl-guanosine
  modified_base 93: mod_base = OTHER; note = 2'-O-Methyl-guanosine
  modified_base 94: mod_base = OTHER; note = 2'-O-Methyl-uridine
  modified_base 95: mod_base = OTHER; note = 2'-O-Methyl-guanosine
  modified_base 96: mod_base = OTHER; note = 2'-O-Methyl-cytidine
  modified_base 97: mod_base = OTHER; note = 2'-O-Methyl-uridine phosphorothioate
  modified_base 98: mod_base = OTHER; note = 2'-O-Methyl-uridine phosphorothioate
  modified_base 99: mod_base = OTHER; note = 2'-O-Methyl-uridine phosphorothioate
  modified_base 100: mod_base = OTHER; note = 2'-O-Methyl-uridine
aanatacctgaataaccctcgttttagagctagaaatagcaagttaaaataaggctagtccgttatcaacttgaaaaagtggcaccgagtcggtgctttt

SEQ ID NO: 440 - RNA, 100 nt, synthetic construct
  source 1..100: mol_type = other RNA; note = Description of Artificial Sequence: Synthetic polynucleotide
  modified_base 1: mod_base = OTHER; note = 2'-O-Methyl-adenosine phosphorothioate
  modified_base 2: mod_base = OTHER; note = 2'-O-Methyl-adenosine phosphorothioate
  modified_base 3: mod_base = OTHER; note = 2'-O-Methyl-inosine phosphorothioate
  modified_base 10: mod_base = OTHER; note = inosine
  modified_base 21: mod_base = OTHER; note = 2'-O-Methyl-guanosine
  modified_base 28: mod_base = OTHER; note = 2'-O-Methyl-adenosine
  modified_base 29: mod_base = OTHER; note = 2'-O-Methyl-guanosine
  modified_base 30: mod_base = OTHER; note = 2'-O-Methyl-cytidine
  modified_base 31: mod_base = OTHER; note = 2'-O-Methyl-uridine
  modified_base 32: mod_base = OTHER; note = 2'-O-Methyl-adenosine
  modified_base 34: mod_base = OTHER; note = 2'-O-Methyl-adenosine
  modified_base 35: mod_base = OTHER; note = 2'-O-Methyl-adenosine
  modified_base 36: mod_base = OTHER; note = 2'-O-Methyl-adenosine
  modified_base 37: mod_base = OTHER; note = 2'-O-Methyl-uridine
  modified_base 38: mod_base = OTHER; note = 2'-O-Methyl-adenosine
  modified_base 39: mod_base = OTHER; note = 2'-O-Methyl-guanosine
  modified_base 40: mod_base = OTHER; note = 2'-O-Methyl-cytidine
  modified_base 41: mod_base = OTHER; note = 2'-O-Methyl-adenosine
  modified_base 42: mod_base = OTHER; note = 2'-O-Methyl-adenosine
  modified_base 46: mod_base = OTHER; note = 2'-O-Methyl-adenosine
  modified_base 48: mod_base = OTHER; note = 2'-O-Methyl-adenosine
  modified_base 50: mod_base = OTHER; note = 2'-O-Methyl-uridine
  modified_base 52: mod_base = OTHER; note = 2'-O-Methyl-adenosine
  modified_base 53: mod_base = OTHER; note = 2'-O-Methyl-guanosine
  modified_base 54: mod_base = OTHER; note = 2'-O-Methyl-guanosine
  modified_base 55: mod_base = OTHER; note = 2'-O-Methyl-cytidine
  modified_base 56: mod_base = OTHER; note = 2'-O-Methyl-uridine
  modified_base 57: mod_base = OTHER; note = 2'-O-Methyl-adenosine
  modified_base 60: mod_base = OTHER; note = 2'-O-Methyl-cytidine
  modified_base 61: mod_base = OTHER; note = 2'-O-Methyl-cytidine
  modified_base 66: mod_base = OTHER; note = 2'-O-Methyl-uridine
  modified_base 67: mod_base = OTHER; note = 2'-O-Methyl-cytidine
  modified_base 70: mod_base = OTHER; note = 2'-O-Methyl-cytidine
  modified_base 71: mod_base = OTHER; note = 2'-O-Methyl-uridine
  modified_base 72: mod_base = OTHER; note = 2'-O-Methyl-uridine
  modified_base 74: mod_base = OTHER; note = 2'-O-Methyl-adenosine
  modified_base 75: mod_base = OTHER; note = 2'-O-Methyl-adenosine
  modified_base 76: mod_base = OTHER; note = 2'-O-Methyl-adenosine
  modified_base 77: mod_base = OTHER; note = 2'-O-Methyl-adenosine
  modified_base 78: mod_base = OTHER; note = 2'-O-Methyl-adenosine
  modified_base 79: mod_base = OTHER; note = 2'-O-Methyl-guanosine
  modified_base 80: mod_base = OTHER; note = 2'-O-Methyl-uridine
  modified_base 81: mod_base = OTHER; note = 2'-O-Methyl-guanosine
  modified_base 83: mod_base = OTHER; note = 2'-O-Methyl-cytidine
  modified_base 84: mod_base = OTHER; note = 2'-O-Methyl-adenosine
  modified_base 85: mod_base = OTHER; note = 2'-O-Methyl-cytidine
  modified_base 86: mod_base = OTHER; note = 2'-O-Methyl-cytidine
  modified_base 87: mod_base = OTHER; note = 2'-O-Methyl-guanosine
  modified_base 88: mod_base = OTHER; note = 2'-O-Methyl-adenosine
  modified_base 89: mod_base = OTHER; note = 2'-O-Methyl-guanosine
  modified_base 90: mod_base = OTHER; note = 2'-O-Methyl-uridine
  modified_base 91: mod_base = OTHER; note = 2'-O-Methyl-cytidine
  modified_base 92: mod_base = OTHER; note = 2'-O-Methyl-guanosine
  modified_base 93: mod_base = OTHER; note = 2'-O-Methyl-guanosine
  modified_base 94: mod_base = OTHER; note = 2'-O-Methyl-uridine
  modified_base 95: mod_base = OTHER; note = 2'-O-Methyl-guanosine
  modified_base 96: mod_base = OTHER; note = 2'-O-Methyl-cytidine
  modified_base 97: mod_base = OTHER; note = 2'-O-Methyl-uridine phosphorothioate
  modified_base 98: mod_base = OTHER; note = 2'-O-Methyl-uridine phosphorothioate
  modified_base 99: mod_base = OTHER; note = 2'-O-Methyl-uridine phosphorothioate
  modified_base 100: mod_base = OTHER; note = 2'-O-Methyl-uridine
aanatacctnaataaccctcgttttagagctagaaatagcaagttaaaataaggctagtccgttatcaacttgaaaaagtggcaccgagtcggtgctttt

SEQ ID NO: 441 - RNA, 100 nt, synthetic construct
  source 1..100: mol_type = other RNA; note = Description of Artificial Sequence: Synthetic polynucleotide
  modified_base 1: mod_base = OTHER; note = 2'-O-Methyl-adenosine phosphorothioate
  modified_base 2: mod_base = OTHER; note = 2'-O-Methyl-adenosine phosphorothioate
  modified_base 3: mod_base = OTHER; note = 2'-O-Methyl-guanosine phosphorothioate
  modified_base 10: mod_base = OTHER; note = inosine
  modified_base 21: mod_base = OTHER; note = 2'-O-Methyl-guanosine
  modified_base 28: mod_base = OTHER; note = 2'-O-Methyl-adenosine
  modified_base 29: mod_base = OTHER; note = 2'-O-Methyl-guanosine
  modified_base 30: mod_base = OTHER; note = 2'-O-Methyl-cytidine
  modified_base 31: mod_base = OTHER; note = 2'-O-Methyl-uridine
  modified_base 32: mod_base = OTHER; note = 2'-O-Methyl-adenosine
  modified_base 34: mod_base = OTHER; note = 2'-O-Methyl-adenosine
  modified_base 35: mod_base = OTHER; note = 2'-O-Methyl-adenosine
  modified_base 36: mod_base = OTHER; note = 2'-O-Methyl-adenosine
  modified_base 37: mod_base = OTHER; note = 2'-O-Methyl-uridine
  modified_base 38: mod_base = OTHER; note = 2'-O-Methyl-adenosine
  modified_base 39: mod_base = OTHER; note = 2'-O-Methyl-guanosine
  modified_base 40: mod_base = OTHER; note = 2'-O-Methyl-cytidine
  modified_base 41: mod_base = OTHER; note = 2'-O-Methyl-adenosine
  modified_base 42: mod_base = OTHER; note = 2'-O-Methyl-adenosine
  modified_base 46: mod_base = OTHER; note = 2'-O-Methyl-adenosine
  modified_base 48: mod_base = OTHER; note = 2'-O-Methyl-adenosine
  modified_base 50: mod_base = OTHER; note = 2'-O-Methyl-uridine
  modified_base 52: mod_base = OTHER; note = 2'-O-Methyl-adenosine
  modified_base 53: mod_base = OTHER; note = 2'-O-Methyl-guanosine
  modified_base 54: mod_base = OTHER; note = 2'-O-Methyl-guanosine
  modified_base 55: mod_base = OTHER; note = 2'-O-Methyl-cytidine
  modified_base 56: mod_base = OTHER; note = 2'-O-Methyl-uridine
  modified_base 57: mod_base = OTHER; note = 2'-O-Methyl-adenosine
  modified_base 60: mod_base = OTHER; note = 2'-O-Methyl-cytidine
  modified_base 61: mod_base = OTHER; note = 2'-O-Methyl-cytidine
  modified_base 66: mod_base = OTHER; note = 2'-O-Methyl-uridine
  modified_base 67: mod_base = OTHER; note = 2'-O-Methyl-cytidine
  modified_base 70: mod_base = OTHER; note = 2'-O-Methyl-cytidine
  modified_base 71: mod_base = OTHER; note = 2'-O-Methyl-uridine
  modified_base 72: mod_base = OTHER; note = 2'-O-Methyl-uridine
  modified_base 74: mod_base = OTHER; note = 2'-O-Methyl-adenosine
  modified_base 75: mod_base = OTHER; note = 2'-O-Methyl-adenosine
  modified_base 76: mod_base = OTHER; note = 2'-O-Methyl-adenosine
  modified_base 77: mod_base = OTHER; note = 2'-O-Methyl-adenosine
  modified_base 78: mod_base = OTHER; note = 2'-O-Methyl-adenosine
  modified_base 79: mod_base = OTHER; note = 2'-O-Methyl-guanosine
  modified_base 80: mod_base = OTHER; note = 2'-O-Methyl-uridine
  modified_base 81: mod_base = OTHER; note = 2'-O-Methyl-guanosine
  modified_base 83: mod_base = OTHER; note = 2'-O-Methyl-cytidine
  modified_base 84: mod_base = OTHER; note = 2'-O-Methyl-adenosine
  modified_base 85: mod_base = OTHER; note = 2'-O-Methyl-cytidine
  modified_base 86: mod_base = OTHER; note = 2'-O-Methyl-cytidine
  modified_base 87: mod_base = OTHER; note = 2'-O-Methyl-guanosine
  modified_base 88: mod_base = OTHER; note = 2'-O-Methyl-adenosine
  modified_base 89: mod_base = OTHER; note = 2'-O-Methyl-guanosine
  modified_base 90: mod_base = OTHER; note = 2'-O-Methyl-uridine
  modified_base 91: mod_base = OTHER; note = 2'-O-Methyl-cytidine
  modified_base 92: mod_base = OTHER; note = 2'-O-Methyl-guanosine
  modified_base 93: mod_base = OTHER; note = 2'-O-Methyl-guanosine
  modified_base 94: mod_base = OTHER; note = 2'-O-Methyl-uridine
  modified_base 95: mod_base = OTHER; note = 2'-O-Methyl-guanosine
  modified_base 96: mod_base = OTHER; note = 2'-O-Methyl-cytidine
  modified_base 97: mod_base = OTHER; note = 2'-O-Methyl-uridine phosphorothioate
  modified_base 98: mod_base = OTHER; note = 2'-O-Methyl-uridine phosphorothioate
  modified_base 99: mod_base = OTHER; note = 2'-O-Methyl-uridine phosphorothioate
  modified_base 100: mod_base = OTHER; note = 2'-O-Methyl-uridine
aagatacctnaataaccctcgttttagagctagaaatagcaagttaaaataaggctagtccgttatcaacttgaaaaagtggcaccgagtcggtgctttt

SEQ ID NO: 442 - RNA, 99 nt, synthetic construct
  source 1..99: mol_type = other RNA; note = Description of Artificial Sequence: Synthetic oligonucleotide
  modified_base 1: mod_base = OTHER; note = 2'-O-Methyl-adenosine phosphorothioate
  modified_base 2: mod_base = OTHER; note = 2'-O-Methyl-guanosine phosphorothioate
  modified_base 3: mod_base = OTHER; note = 2'-O-Methyl-adenosine phosphorothioate
  modified_base 20: mod_base = OTHER; note = 2'-O-Methyl-guanosine
  modified_base 27: mod_base = OTHER; note = 2'-O-Methyl-adenosine
  modified_base 28: mod_base = OTHER; note = 2'-O-Methyl-guanosine
  modified_base 29: mod_base = OTHER; note = 2'-O-Methyl-cytidine
  modified_base 30: mod_base = OTHER; note = 2'-O-Methyl-uridine
  modified_base 31: mod_base = OTHER; note = 2'-O-Methyl-adenosine
  modified_base 33: mod_base = OTHER; note = 2'-O-Methyl-adenosine
  modified_base 34: mod_base = OTHER; note = 2'-O-Methyl-adenosine
  modified_base 35: mod_base = OTHER; note = 2'-O-Methyl-adenosine
  modified_base 36: mod_base = OTHER; note = 2'-O-Methyl-uridine
  modified_base 37: mod_base = OTHER; note = 2'-O-Methyl-adenosine
  modified_base 38: mod_base = OTHER; note = 2'-O-Methyl-guanosine
  modified_base 39: mod_base = OTHER; note = 2'-O-Methyl-cytidine
  modified_base 40: mod_base = OTHER; note = 2'-O-Methyl-adenosine
  modified_base 41: mod_base = OTHER; note = 2'-O-Methyl-adenosine
  modified_base 45: mod_base = OTHER; note = 2'-O-Methyl-adenosine
  modified_base 47: mod_base = OTHER; note = 2'-O-Methyl-adenosine
  modified_base 49: mod_base = OTHER; note = 2'-O-Methyl-uridine
  modified_base 51: mod_base = OTHER; note = 2'-O-Methyl-adenosine
  modified_base 52: mod_base = OTHER; note = 2'-O-Methyl-guanosine
  modified_base 53: mod_base = OTHER; note = 2'-O-Methyl-guanosine
  modified_base 54: mod_base = OTHER; note = 2'-O-Methyl-cytidine
  modified_base 55: mod_base = OTHER; note = 2'-O-Methyl-uridine
  modified_base 56: mod_base = OTHER; note = 2'-O-Methyl-adenosine
  modified_base 59: mod_base = OTHER; note = 2'-O-Methyl-cytidine
  modified_base 60: mod_base = OTHER; note = 2'-O-Methyl-cytidine
  modified_base 65: mod_base = OTHER; note = 2'-O-Methyl-uridine
  modified_base 66: mod_base = OTHER; note = 2'-O-Methyl-cytidine
  modified_base 69: mod_base = OTHER; note = 2'-O-Methyl-cytidine
  modified_base 70: mod_base = OTHER; note = 2'-O-Methyl-uridine
  modified_base 71: mod_base = OTHER; note = 2'-O-Methyl-uridine
  modified_base 73: mod_base = OTHER; note = 2'-O-Methyl-adenosine
  modified_base 74: mod_base = OTHER; note = 2'-O-Methyl-adenosine
  modified_base 75: mod_base = OTHER; note = 2'-O-Methyl-adenosine
  modified_base 76: mod_base = OTHER; note = 2'-O-Methyl-adenosine
  modified_base 77: mod_base = OTHER; note = 2'-O-Methyl-adenosine
  modified_base 78: mod_base = OTHER; note = 2'-O-Methyl-guanosine
  modified_base 79: mod_base = OTHER; note = 2'-O-Methyl-uridine
  modified_base 80: mod_base = OTHER; note = 2'-O-Methyl-guanosine
  modified_base 82: mod_base = OTHER; note = 2'-O-Methyl-cytidine
  modified_base 83: mod_base = OTHER; note = 2'-O-Methyl-adenosine
  modified_base 84: mod_base = OTHER; note = 2'-O-Methyl-cytidine
  modified_base 85: mod_base = OTHER; note = 2'-O-Methyl-cytidine
  modified_base 86: mod_base = OTHER; note = 2'-O-Methyl-guanosine
  modified_base 87: mod_base = OTHER; note = 2'-O-Methyl-adenosine
  modified_base 88: mod_base = OTHER; note = 2'-O-Methyl-guanosine
  modified_base 89: mod_base = OTHER; note = 2'-O-Methyl-uridine
  modified_base 90: mod_base = OTHER; note = 2'-O-Methyl-cytidine
  modified_base 91: mod_base = OTHER; note = 2'-O-Methyl-guanosine
  modified_base 92: mod_base = OTHER; note = 2'-O-Methyl-guanosine
  modified_base 93: mod_base = OTHER; note = 2'-O-Methyl-uridine
  modified_base 94: mod_base = OTHER; note = 2'-O-Methyl-guanosine
  modified_base 95: mod_base = OTHER; note = 2'-O-Methyl-cytidine
  modified_base 96: mod_base = OTHER; note = 2'-O-Methyl-uridine phosphorothioate
  modified_base 97: mod_base = OTHER; note = 2'-O-Methyl-uridine phosphorothioate
  modified_base 98: mod_base = OTHER; note = 2'-O-Methyl-uridine phosphorothioate
  modified_base 99: mod_base = OTHER; note = 2'-O-Methyl-uridine
agatacctgaataaccctcgttttagagctagaaatagcaagttaaaataaggctagtccgttatcaacttgaaaaagtggcaccgagtcggtgctttt

SEQ ID NO: 443 - RNA, 98 nt, synthetic construct
  source 1..98: mol_type = other RNA; note = Description of Artificial Sequence: Synthetic oligonucleotide
  modified_base 1: mod_base = OTHER; note = 2'-O-Methyl-guanosine phosphorothioate
  modified_base 2: mod_base = OTHER; note = 2'-O-Methyl-adenosine phosphorothioate
  modified_base 19: mod_base = OTHER; note = 2'-O-Methyl-guanosine
  modified_base 26: mod_base = OTHER; note = 2'-O-Methyl-adenosine
  modified_base 27: mod_base = OTHER; note = 2'-O-Methyl-guanosine
  modified_base 28: mod_base = OTHER; note = 2'-O-Methyl-cytidine
  modified_base 29: mod_base = OTHER; note = 2'-O-Methyl-uridine
  modified_base 30: mod_base = OTHER; note = 2'-O-Methyl-adenosine
  modified_base 32: mod_base = OTHER; note = 2'-O-Methyl-adenosine
  modified_base 33: mod_base = OTHER; note = 2'-O-Methyl-adenosine
  modified_base 34: mod_base = OTHER; note = 2'-O-Methyl-adenosine
  modified_base 35: mod_base = OTHER; note = 2'-O-Methyl-uridine
  modified_base 36: mod_base = OTHER; note = 2'-O-Methyl-adenosine
  modified_base 37: mod_base = OTHER; note = 2'-O-Methyl-guanosine
  modified_base 38: mod_base = OTHER; note = 2'-O-Methyl-cytidine
  modified_base 39: mod_base = OTHER; note = 2'-O-Methyl-adenosine
  modified_base 40: mod_base = OTHER; note = 2'-O-Methyl-adenosine
  modified_base 44: mod_base = OTHER; note = 2'-O-Methyl-adenosine
  modified_base 46: mod_base = OTHER; note = 2'-O-Methyl-adenosine
  modified_base 48: mod_base = OTHER; note = 2'-O-Methyl-uridine
  modified_base 50: mod_base = OTHER; note = 2'-O-Methyl-adenosine
  modified_base 51: mod_base = OTHER; note = 2'-O-Methyl-guanosine
  modified_base 52: mod_base = OTHER; note = 2'-O-Methyl-guanosine
  modified_base 53: mod_base = OTHER; note = 2'-O-Methyl-cytidine
  modified_base 54: mod_base = OTHER; note = 2'-O-Methyl-uridine
  modified_base 55: mod_base = OTHER; note = 2'-O-Methyl-adenosine
  modified_base 58: mod_base = OTHER; note = 2'-O-Methyl-cytidine
  modified_base 59: mod_base = OTHER; note = 2'-O-Methyl-cytidine
  modified_base 64: mod_base = OTHER; note = 2'-O-Methyl-uridine
  modified_base 65: mod_base = OTHER; note = 2'-O-Methyl-cytidine
  modified_base 68: mod_base = OTHER; note = 2'-O-Methyl-cytidine
  modified_base 69: mod_base = OTHER; note = 2'-O-Methyl-uridine
  modified_base 70: mod_base = OTHER; note = 2'-O-Methyl-uridine
  modified_base 72: mod_base = OTHER; note = 2'-O-Methyl-adenosine
  modified_base 73: mod_base = OTHER; note = 2'-O-Methyl-adenosine
  modified_base 74: mod_base = OTHER; note = 2'-O-Methyl-adenosine
  modified_base 75: mod_base = OTHER; note = 2'-O-Methyl-adenosine
  modified_base 76: mod_base = OTHER; note = 2'-O-Methyl-adenosine
  modified_base 77: mod_base = OTHER; note = 2'-O-Methyl-guanosine
  modified_base 78: mod_base = OTHER; note = 2'-O-Methyl-uridine
  modified_base 79: mod_base = OTHER; note = 2'-O-Methyl-guanosine
  modified_base 81: mod_base = OTHER; note = 2'-O-Methyl-cytidine
  modified_base 82: mod_base = OTHER; note = 2'-O-Methyl-adenosine
  modified_base 83: mod_base = OTHER; note = 2'-O-Methyl-cytidine
  modified_base 84: mod_base = OTHER; note = 2'-O-Methyl-cytidine
  modified_base 85: mod_base = OTHER; note = 2'-O-Methyl-guanosine
  modified_base 86: mod_base = OTHER; note = 2'-O-Methyl-adenosine
  modified_base 87: mod_base = OTHER; note = 2'-O-Methyl-guanosine
  modified_base 88: mod_base = OTHER; note = 2'-O-Methyl-uridine
  modified_base 89: mod_base = OTHER; note = 2'-O-Methyl-cytidine
  modified_base 90: mod_base = OTHER; note = 2'-O-Methyl-guanosine
  modified_base 91: mod_base = OTHER; note = 2'-O-Methyl-guanosine
  modified_base 92: mod_base = OTHER; note = 2'-O-Methyl-uridine
  modified_base 93: mod_base = OTHER; note = 2'-O-Methyl-guanosine
  modified_base 94: mod_base = OTHER; note = 2'-O-Methyl-cytidine
  modified_base 95: mod_base = OTHER; note = 2'-O-Methyl-uridine phosphorothioate
  modified_base 96: mod_base = OTHER; note = 2'-O-Methyl-uridine phosphorothioate
  modified_base 97: mod_base = OTHER; note = 2'-O-Methyl-uridine phosphorothioate
  modified_base 98: mod_base = OTHER; note = 2'-O-Methyl-uridine
gatacctgaataaccctcgttttagagctagaaatagcaagttaaaataaggctagtccgttatcaacttgaaaaagtggcaccgagtcggtgctttt

SEQ ID NO: 444 - RNA, 97 nt, synthetic construct
  source 1..97: mol_type = other RNA; note = Description of Artificial Sequence: Synthetic oligonucleotide
  modified_base 1: mod_base = OTHER; note = 2'-O-Methyl-adenosine phosphorothioate
  modified_base 2: mod_base = OTHER; note = 2'-O-Methyl-uridine phosphorothioate
  modified_base 18: mod_base = OTHER; note = 2'-O-Methyl-guanosine
  modified_base 25: mod_base = OTHER; note = 2'-O-Methyl-adenosine
  modified_base 26: mod_base = OTHER; note = 2'-O-Methyl-guanosine
  modified_base 27: mod_base = OTHER; note = 2'-O-Methyl-cytidine
  modified_base 28: mod_base = OTHER; note = 2'-O-Methyl-uridine
  modified_base 29: mod_base = OTHER; note = 2'-O-Methyl-adenosine
  modified_base 31: mod_base = OTHER; note = 2'-O-Methyl-adenosine
  modified_base 32: mod_base = OTHER; note = 2'-O-Methyl-adenosine
  modified_base 33: mod_base = OTHER; note = 2'-O-Methyl-adenosine
  modified_base 34: mod_base = OTHER; note = 2'-O-Methyl-uridine
  modified_base 35: mod_base = OTHER; note = 2'-O-Methyl-adenosine
  modified_base 36: mod_base = OTHER; note = 2'-O-Methyl-guanosine
  modified_base 37: mod_base = OTHER; note = 2'-O-Methyl-cytidine
  modified_base 38: mod_base = OTHER; note = 2'-O-Methyl-adenosine
  modified_base 39: mod_base = OTHER; note = 2'-O-Methyl-adenosine
  modified_base 43: mod_base = OTHER; note = 2'-O-Methyl-adenosine
  modified_base 45: mod_base = OTHER; note = 2'-O-Methyl-adenosine
  modified_base 47: mod_base = OTHER; note = 2'-O-Methyl-uridine
  modified_base 49: mod_base = OTHER; note = 2'-O-Methyl-adenosine
  modified_base 50: mod_base = OTHER; note = 2'-O-Methyl-guanosine
  modified_base 51: mod_base = OTHER; note = 2'-O-Methyl-guanosine
  modified_base 52: mod_base = OTHER; note = 2'-O-Methyl-cytidine
  modified_base 53: mod_base = OTHER; note = 2'-O-Methyl-uridine
  modified_base 54: mod_base = OTHER; note = 2'-O-Methyl-adenosine
  modified_base 57: mod_base = OTHER; note = 2'-O-Methyl-cytidine
  modified_base 58: mod_base = OTHER; note = 2'-O-Methyl-cytidine
  modified_base 63: mod_base = OTHER; note = 2'-O-Methyl-uridine
  modified_base 64: mod_base = OTHER; note = 2'-O-Methyl-cytidine
  modified_base 67: mod_base = OTHER; note = 2'-O-Methyl-cytidine
  modified_base 68: mod_base = OTHER; note = 2'-O-Methyl-uridine
  modified_base 69: mod_base = OTHER; note = 2'-O-Methyl-uridine
  modified_base 71: mod_base = OTHER; note = 2'-O-Methyl-adenosine
  modified_base 72: mod_base = OTHER; note = 2'-O-Methyl-adenosine
  modified_base 73: mod_base = OTHER; note = 2'-O-Methyl-adenosine
  modified_base 74: mod_base = OTHER; note = 2'-O-Methyl-adenosine
  modified_base 75: mod_base = OTHER; note = 2'-O-Methyl-adenosine
  modified_base 76: mod_base = OTHER; note = 2'-O-Methyl-guanosine
  modified_base 77: mod_base = OTHER; note = 2'-O-Methyl-uridine
  modified_base 78: mod_base = OTHER; note = 2'-O-Methyl-guanosine
  modified_base 80: mod_base = OTHER; note = 2'-O-Methyl-cytidine
  modified_base 81: mod_base = OTHER; note = 2'-O-Methyl-adenosine
  modified_base 82: mod_base = OTHER; note = 2'-O-Methyl-cytidine
  modified_base 83: mod_base = OTHER; note = 2'-O-Methyl-cytidine
  modified_base 84: mod_base = OTHER; note = 2'-O-Methyl-guanosine
  modified_base 85: mod_base = OTHER; note = 2'-O-Methyl-adenosine
  modified_base 86: mod_base = OTHER; note = 2'-O-Methyl-guanosine
  modified_base 87: mod_base = OTHER; note = 2'-O-Methyl-uridine
  modified_base 88: mod_base = OTHER; note = 2'-O-Methyl-cytidine
  modified_base 89: mod_base = OTHER; note = 2'-O-Methyl-guanosine
  modified_base 90: mod_base = OTHER; note = 2'-O-Methyl-guanosine
  modified_base 91: mod_base = OTHER; note = 2'-O-Methyl-uridine
  modified_base 92: mod_base = OTHER; note = 2'-O-Methyl-guanosine
  modified_base 93: mod_base = OTHER; note = 2'-O-Methyl-cytidine
  modified_base 94: mod_base = OTHER; note = 2'-O-Methyl-uridine phosphorothioate
  modified_base 95: mod_base = OTHER; note = 2'-O-Methyl-uridine phosphorothioate
  modified_base 96: mod_base = OTHER; note = 2'-O-Methyl-uridine phosphorothioate
  modified_base 97: mod_base = OTHER; note = 2'-O-Methyl-uridine
atacctgaataaccctcgttttagagctagaaatagcaagttaaaataaggctagtccgttatcaacttgaaaaagtggcaccgagtcggtgctttt

SEQ ID NO: 445 - RNA, 103 nt, synthetic construct
  source 1..103: mol_type = other RNA; note = Description of Artificial Sequence: Synthetic polynucleotide
  modified_base 1: mod_base = OTHER; note = 2'-O-Methyl-adenosine phosphorothioate
  modified_base 2: mod_base = OTHER; note = 2'-O-Methyl-adenosine phosphorothioate
  modified_base 3: mod_base = OTHER; note = 2'-O-Methyl-guanosine phosphorothioate
  modified_base 21: mod_base = OTHER; note = 2'-O-Methyl-guanosine
  modified_base 28: mod_base = OTHER; note = 2'-O-Methyl-adenosine
  modified_base 29: mod_base = OTHER; note = 2'-O-Methyl-guanosine
  modified_base 30: mod_base = OTHER; note = 2'-O-Methyl-cytidine
  modified_base 31: mod_base = OTHER; note = 2'-O-Methyl-uridine
  modified_base 32: mod_base = OTHER; note = 2'-O-Methyl-adenosine
  modified_base 34: mod_base = OTHER; note = 2'-O-Methyl-adenosine
  modified_base 35: mod_base = OTHER; note = 2'-O-Methyl-adenosine
  modified_base 36: mod_base = OTHER; note = 2'-O-Methyl-adenosine
  modified_base 37: mod_base = OTHER; note = 2'-O-Methyl-uridine
  modified_base 38: mod_base = OTHER; note = 2'-O-Methyl-adenosine
  modified_base 39: mod_base = OTHER; note = 2'-O-Methyl-guanosine
  modified_base 40: mod_base = OTHER; note = 2'-O-Methyl-cytidine
  modified_base 41: mod_base = OTHER; note = 2'-O-Methyl-adenosine
  modified_base 42: mod_base = OTHER; note = 2'-O-Methyl-adenosine
  modified_base 46: mod_base = OTHER; note = 2'-O-Methyl-adenosine
  modified_base 48: mod_base = OTHER; note = 2'-O-Methyl-adenosine
  modified_base 50: mod_base = OTHER; note = 2'-O-Methyl-uridine
  modified_base 52: mod_base = OTHER; note = 2'-O-Methyl-adenosine
  modified_base 53: mod_base = OTHER; note = 2'-O-Methyl-guanosine
  modified_base 54: mod_base = OTHER; note = 2'-O-Methyl-guanosine
  modified_base 55: mod_base = OTHER; note = 2'-O-Methyl-cytidine
  modified_base 56: mod_base = OTHER; note = 2'-O-Methyl-uridine
  modified_base 57: mod_base = OTHER; note = 2'-O-Methyl-adenosine
  modified_base 60: mod_base = OTHER; note = 2'-O-Methyl-cytidine
  modified_base 61: mod_base = OTHER; note = 2'-O-Methyl-cytidine
  modified_base 66: mod_base = OTHER; note = 2'-O-Methyl-uridine
  modified_base 67: mod_base = OTHER; note = 2'-O-Methyl-cytidine
  modified_base 70: mod_base = OTHER; note = 2'-O-Methyl-cytidine
  modified_base 71: mod_base = OTHER; note = 2'-O-Methyl-uridine
  modified_base 72: mod_base = OTHER; note = 2'-O-Methyl-uridine
  modified_base 74: mod_base = OTHER; note = 2'-O-Methyl-adenosine
  modified_base 75: mod_base = OTHER; note = 2'-O-Methyl-adenosine
  modified_base 76: mod_base = OTHER; note = 2'-O-Methyl-adenosine
  modified_base 77: mod_base = OTHER; note = 2'-O-Methyl-adenosine
  modified_base 78: mod_base = OTHER; note = 2'-O-Methyl-adenosine
  modified_base 79: mod_base = OTHER; note = 2'-O-Methyl-guanosine
  modified_base 80: mod_base = OTHER; note = 2'-O-Methyl-uridine
  modified_base 81: mod_base = OTHER; note = 2'-O-Methyl-guanosine
  modified_base 82: mod_base = OTHER; note = 2'-O-Methyl-guanosine
  modified_base 83: mod_base = OTHER; note = 2'-O-Methyl-cytidine
  modified_base 84: mod_base = OTHER; note = 2'-O-Methyl-adenosine
  modified_base 85: mod_base = OTHER; note = 2'-O-Methyl-cytidine
  modified_base 86: mod_base = OTHER; note = 2'-O-Methyl-cytidine
  modified_base 87: mod_base = OTHER; note = 2'-O-Methyl-guanosine
  modified_base 88: mod_base = OTHER; note = 2'-O-Methyl-adenosine
  modified_base 89: mod_base = OTHER; note = 2'-O-Methyl-guanosine
  modified_base 90: mod_base = OTHER; note = 2'-O-Methyl-uridine
  modified_base 91: mod_base = OTHER; note = 2'-O-Methyl-cytidine
  modified_base 92: mod_base = OTHER; note = 2'-O-Methyl-guanosine
  modified_base 93: mod_base = OTHER; note = 2'-O-Methyl-guanosine
  modified_base 94: mod_base = OTHER; note = 2'-O-Methyl-uridine
  modified_base 95: mod_base = OTHER; note = 2'-O-Methyl-guanosine
  modified_base 96: mod_base = OTHER; note = 2'-O-Methyl-cytidine
  modified_base 97: mod_base = OTHER; note = 2'-O-Methyl-uridine phosphorothioate
  modified_base 98: mod_base = OTHER; note = 2'-O-Methyl-uridine phosphorothioate
  modified_base 99: mod_base = OTHER; note = 2'-O-Methyl-uridine phosphorothioate
  modified_base 100: mod_base = OTHER; note = 2'-O-Methyl-uridine
  modified_base 103: mod_base = OTHER; note = 2'-O-Methyl-uridine
aagatacctgaataactctcgttttagagctagaaatagcaagttaaaataaggctagtccgttatcaacttgaaaaagtggcaccgagtcggtgcttttttt

SEQ ID NO: 446 - RNA, 100 nt, synthetic construct
  source 1..100: mol_type = other RNA; note = Description of Artificial Sequence: Synthetic polynucleotide
  modified_base 1: mod_base = OTHER; note = 2'-O-Methyl-guanosine phosphorothioate
  modified_base 2: mod_base = OTHER; note = 2'-O-Methyl-guanosine phosphorothioate
  modified_base 3: mod_base = OTHER; note = 2'-O-Methyl-cytidine phosphorothioate
  modified_base 29: mod_base = OTHER; note = 2'-O-Methyl-guanosine
  modified_base 30: mod_base = OTHER; note = 2'-O-Methyl-cytidine
  modified_base 31: mod_base = OTHER; note = 2'-O-Methyl-uridine
  modified_base 32: mod_base = OTHER; note = 2'-O-Methyl-adenosine
  modified_base 33: mod_base = OTHER; note = 2'-O-Methyl-guanosine
  modified_base 34: mod_base = OTHER; note = 2'-O-Methyl-adenosine
  modified_base 35: mod_base = OTHER; note = 2'-O-Methyl-adenosine
  modified_base 36: mod_base = OTHER; note = 2'-O-Methyl-adenosine
  modified_base 37: mod_base = OTHER; note = 2'-O-Methyl-uridine
  modified_base 38: mod_base = OTHER; note = 2'-O-Methyl-adenosine
  modified_base 39: mod_base = OTHER; note = 2'-O-Methyl-guanosine
  modified_base 40: mod_base = OTHER; note = 2'-O-Methyl-cytidine
  modified_base 69: mod_base = OTHER; note = 2'-O-Methyl-adenosine
  modified_base 70: mod_base = OTHER; note = 2'-O-Methyl-cytidine
  modified_base 71: mod_base = OTHER; note = 2'-O-Methyl-uridine
  modified_base 72: mod_base = OTHER; note = 2'-O-Methyl-uridine
  modified_base 73: mod_base = OTHER; note = 2'-O-Methyl-guanosine
  modified_base 74: mod_base = OTHER; note = 2'-O-Methyl-adenosine
  modified_base 75: mod_base = OTHER; note = 2'-O-Methyl-adenosine
  modified_base 76: mod_base = OTHER; note = 2'-O-Methyl-adenosine
  modified_base 77: mod_base = OTHER; note = 2'-O-Methyl-adenosine
  modified_base 78: mod_base = OTHER; note = 2'-O-Methyl-adenosine
  modified_base 79: mod_base = OTHER; note = 2'-O-Methyl-guanosine
  modified_base 80: mod_base = OTHER; note = 2'-O-Methyl-uridine
  modified_base 81: mod_base = OTHER; note = 2'-O-Methyl-guanosine
  modified_base 82: mod_base = OTHER; note = 2'-O-Methyl-guanosine
  modified_base 83: mod_base = OTHER; note = 2'-O-Methyl-cytidine
  modified_base 84: mod_base = OTHER; note = 2'-O-Methyl-adenosine
  modified_base 85: mod_base = OTHER; note = 2'-O-Methyl-cytidine
  modified_base 86: mod_base = OTHER; note = 2'-O-Methyl-cytidine
  modified_base 87: mod_base = OTHER; note = 2'-O-Methyl-guanosine
  modified_base 88: mod_base = OTHER; note = 2'-O-Methyl-adenosine
  modified_base 89: mod_base = OTHER; note = 2'-O-Methyl-guanosine
  modified_base 90: mod_base = OTHER; note = 2'-O-Methyl-uridine
  modified_base 91: mod_base = OTHER; note = 2'-O-Methyl-cytidine
  modified_base 92: mod_base = OTHER; note = 2'-O-Methyl-guanosine
  modified_base 93: mod_base = OTHER; note = 2'-O-Methyl-guanosine
  modified_base 94: mod_base = OTHER; note = 2'-O-Methyl-uridine
  modified_base 95: mod_base = OTHER; note = 2'-O-Methyl-guanosine
  modified_base 96: mod_base = OTHER; note = 2'-O-Methyl-cytidine
  modified_base 97: mod_base = OTHER; note = 2'-O-Methyl-uridine phosphorothioate
  modified_base 98: mod_base = OTHER; note = 2'-O-Methyl-uridine phosphorothioate
  modified_base 99: mod_base = OTHER; note = 2'-O-Methyl-uridine phosphorothioate
  modified_base 100: mod_base = OTHER; note = 2'-O-Methyl-uridine
ggctgatgaggccgcacatggttttagagctagaaatagcaagttaaaataaggctagtccgttatcaacttgaaaaagtggcaccgagtcggtgctttt

SEQ ID NO: 447 - RNA, 103 nt, synthetic construct
  source 1..103: mol_type = other RNA; note = Description of Artificial Sequence: Synthetic polynucleotide
  modified_base 1: mod_base = OTHER; note = 2'-O-Methyl-uridine phosphorothioate
  modified_base 2: mod_base = OTHER; note = 2'-O-Methyl-cytidine phosphorothioate
  modified_base 3: mod_base = OTHER; note = 2'-O-Methyl-adenosine phosphorothioate
  modified_base 21: mod_base = OTHER; note = 2'-O-Methyl-guanosine
  modified_base 28: mod_base = OTHER; note = 2'-O-Methyl-adenosine
  modified_base 29: mod_base = OTHER; note = 2'-O-Methyl-guanosine
  modified_base 30: mod_base = OTHER; note = 2'-O-Methyl-cytidine
  modified_base 31: mod_base = OTHER; note = 2'-O-Methyl-uridine
  modified_base 32: mod_base = OTHER; note = 2'-O-Methyl-adenosine
  modified_base 34: mod_base = OTHER; note = 2'-O-Methyl-adenosine
  modified_base 35: mod_base = OTHER; note = 2'-O-Methyl-adenosine
  modified_base 36: mod_base = OTHER; note = 2'-O-Methyl-adenosine
  modified_base 37: mod_base = OTHER; note = 2'-O-Methyl-uridine
  modified_base 38: mod_base = OTHER; note = 2'-O-Methyl-adenosine
  modified_base 39: mod_base = OTHER; note = 2'-O-Methyl-guanosine
  modified_base 40: mod_base = OTHER; note = 2'-O-Methyl-cytidine
  modified_base 41: mod_base = OTHER; note = 2'-O-Methyl-adenosine
  modified_base 42: mod_base = OTHER; note = 2'-O-Methyl-adenosine
  modified_base 46: mod_base = OTHER; note = 2'-O-Methyl-adenosine
  modified_base 48: mod_base = OTHER; note = 2'-O-Methyl-adenosine
  modified_base 50: mod_base = OTHER; note = 2'-O-Methyl-uridine
  modified_base 52: mod_base = OTHER; note = 2'-O-Methyl-adenosine
  modified_base 53: mod_base = OTHER; note = 2'-O-Methyl-guanosine
  modified_base 54: mod_base = OTHER; note = 2'-O-Methyl-guanosine
  modified_base 55: mod_base = OTHER; note = 2'-O-Methyl-cytidine
  modified_base 56: mod_base = OTHER; note = 2'-O-Methyl-uridine
  modified_base 57: mod_base = OTHER; note = 2'-O-Methyl-adenosine
  modified_base 60: mod_base = OTHER; note = 2'-O-Methyl-cytidine
  modified_base 61: mod_base = OTHER; note = 2'-O-Methyl-cytidine
  modified_base 66: mod_base = OTHER; note = 2'-O-Methyl-uridine
  modified_base 67: mod_base = OTHER; note = 2'-O-Methyl-cytidine
  modified_base 70: mod_base = OTHER; note = 2'-O-Methyl-cytidine
  modified_base 71: mod_base = OTHER; note = 2'-O-Methyl-uridine
  modified_base 72: mod_base = OTHER; note = 2'-O-Methyl-uridine
  modified_base 74: mod_base = OTHER; note = 2'-O-Methyl-adenosine
  modified_base 75: mod_base = OTHER; note = 2'-O-Methyl-adenosine
  modified_base 76: mod_base = OTHER; note = 2'-O-Methyl-adenosine
  modified_base 77: mod_base = OTHER; note = 2'-O-Methyl-adenosine
  modified_base 78: mod_base = OTHER; note = 2'-O-Methyl-adenosine
  modified_base 79: mod_base = OTHER; note = 2'-O-Methyl-guanosine
  modified_base 80: mod_base = OTHER; note = 2'-O-Methyl-uridine
  modified_base 81: mod_base = OTHER; note = 2'-O-Methyl-guanosine
  modified_base 83: mod_base = OTHER; note = 2'-O-Methyl-cytidine
  modified_base 84: mod_base = OTHER; note = 2'-O-Methyl-adenosine
  modified_base 85: mod_base = OTHER; note = 2'-O-Methyl-cytidine
  modified_base 86: mod_base = OTHER; note = 2'-O-Methyl-cytidine
  modified_base 87: mod_base = OTHER; note = 2'-O-Methyl-guanosine
  modified_base 88: mod_base = OTHER; note = 2'-O-Methyl-adenosine
  modified_base 89: mod_base = OTHER; note = 2'-O-Methyl-guanosine
  modified_base 90: mod_base = OTHER; note = 2'-O-Methyl-uridine
  modified_base 91: mod_base = OTHER; note = 2'-O-Methyl-cytidine
  modified_base 92: mod_base = OTHER; note = 2'-O-Methyl-guanosine
  modified_base 93: mod_base = OTHER; note = 2'-O-Methyl-guanosine
  modified_base 94: mod_base = OTHER; note = 2'-O-Methyl-uridine
  modified_base 95: mod_base = OTHER; note = 2'-O-Methyl-guanosine
  modified_base 96: mod_base = OTHER; note = 2'-O-Methyl-cytidine
  modified_base 97: mod_base = OTHER; note = 2'-O-Methyl-uridine phosphorothioate
  modified_base 98: mod_base = OTHER; note = 2'-O-Methyl-uridine phosphorothioate
  modified_base 99: mod_base = OTHER; note = 2'-O-Methyl-uridine phosphorothioate
  modified_base 100: mod_base = OTHER; note = 2'-O-Methyl-uridine
  modified_base 101: mod_base = OTHER; note = 2'-O-Methyl-uridine
  modified_base 102: mod_base = OTHER; note = 2'-O-Methyl-uridine
  modified_base 103: mod_base = OTHER; note = 2'-O-Methyl-uridine
tcagctccaggcggtcctgggttttagagctagaaatagcaagttaaaataaggctagtccgttatcaacttgaaaaagtggcaccgagtcggtgcttttttt

SEQ ID NO: 448 - RNA, 103 nt, synthetic construct; identical to SEQ ID NO: 447
  source 1..103: mol_type = other RNA; note = Description of Artificial Sequence: Synthetic polynucleotide
  modified_base 1: mod_base = OTHER; note = 2'-O-Methyl-uridine phosphorothioate
  modified_base 2: mod_base = OTHER; note = 2'-O-Methyl-cytidine phosphorothioate
  modified_base 3: mod_base = OTHER; note = 2'-O-Methyl-adenosine phosphorothioate
  modified_base 21: mod_base = OTHER; note = 2'-O-Methyl-guanosine
  modified_base 28: mod_base = OTHER; note = 2'-O-Methyl-adenosine
  modified_base 29: mod_base = OTHER; note = 2'-O-Methyl-guanosine
  modified_base 30: mod_base = OTHER; note = 2'-O-Methyl-cytidine
  modified_base 31: mod_base = OTHER; note = 2'-O-Methyl-uridine
  modified_base 32: mod_base = OTHER; note = 2'-O-Methyl-adenosine
  modified_base 34: mod_base = OTHER; note = 2'-O-Methyl-adenosine
  modified_base 35: mod_base = OTHER; note = 2'-O-Methyl-adenosine
  modified_base 36: mod_base = OTHER; note = 2'-O-Methyl-adenosine
  modified_base 37: mod_base = OTHER; note = 2'-O-Methyl-uridine
  modified_base 38: mod_base = OTHER; note = 2'-O-Methyl-adenosine
  modified_base 39: mod_base = OTHER; note = 2'-O-Methyl-guanosine
  modified_base 40: mod_base = OTHER; note = 2'-O-Methyl-cytidine
  modified_base 41: mod_base = OTHER; note = 2'-O-Methyl-adenosine
  modified_base 42: mod_base = OTHER; note = 2'-O-Methyl-adenosine
  modified_base 45: mod_base = OTHER; note = uridine phosphorothioate
  modified_base 46: mod_base = OTHER; note = 2'-O-Methyl-adenosine
  modified_base 48: mod_base = OTHER; note = 2'-O-Methyl-adenosine
  modified_base 50: mod_base = OTHER; note = 2'-O-Methyl-uridine
  modified_base 52: mod_base = OTHER; note = 2'-O-Methyl-adenosine
  modified_base 53: mod_base = OTHER; note = 2'-O-Methyl-guanosine
  modified_base 54: mod_base = OTHER; note = 2'-O-Methyl-guanosine
  modified_base 55: mod_base = OTHER; note = 2'-O-Methyl-cytidine
  modified_base 56: mod_base = OTHER; note = 2'-O-Methyl-uridine
  modified_base 57: mod_base = OTHER; note = 2'-O-Methyl-adenosine
  modified_base 60: mod_base = OTHER; note = 2'-O-Methyl-cytidine
  modified_base 61: mod_base = OTHER; note = 2'-O-Methyl-cytidine
  modified_base 66: mod_base = OTHER; note = 2'-O-Methyl-uridine
  modified_base 67: mod_base = OTHER; note = 2'-O-Methyl-cytidine
  modified_base 70: mod_base = OTHER; note = 2'-O-Methyl-cytidine
  modified_base 71: mod_base = OTHER; note = 2'-O-Methyl-uridine
  modified_base 72: mod_base = OTHER; note = 2'-O-Methyl-uridine
  modified_base 74: mod_base = OTHER; note = 2'-O-Methyl-adenosine
  modified_base 75: mod_base = OTHER; note = 2'-O-Methyl-adenosine
  modified_base 76: mod_base = OTHER; note = 2'-O-Methyl-adenosine
  modified_base 77: mod_base = OTHER; note = 2'-O-Methyl-adenosine
  modified_base 78: mod_base = OTHER; note = 2'-O-Methyl-adenosine
  modified_base 79: mod_base = OTHER; note = 2'-O-Methyl-guanosine
  modified_base 80: mod_base = OTHER; note = 2'-O-Methyl-uridine
  modified_base 81: mod_base = OTHER; note = 2'-O-Methyl-guanosine
  modified_base 83: mod_base = OTHER; note = 2'-O-Methyl-cytidine
  modified_base 84: mod_base = OTHER; note = 2'-O-Methyl-adenosine
  modified_base 85: mod_base = OTHER; note = 2'-O-Methyl-cytidine
  modified_base 86: mod_base = OTHER; note = 2'-O-Methyl-cytidine
  modified_base 87: mod_base = OTHER; note = 2'-O-Methyl-guanosine
  modified_base 88: mod_base = OTHER; note = 2'-O-Methyl-adenosine
  modified_base 89: mod_base = OTHER; note = 2'-O-Methyl-guanosine
  modified_base 90: mod_base = OTHER; note = 2'-O-Methyl-uridine
  modified_base 91: mod_base = OTHER; note = 2'-O-Methyl-cytidine
  modified_base 92: mod_base = OTHER; note = 2'-O-Methyl-guanosine
  modified_base 93: mod_base = OTHER; note = 2'-O-Methyl-guanosine
  modified_base 94: mod_base = OTHER; note = 2'-O-Methyl-uridine
  modified_base 95: mod_base = OTHER; note = 2'-O-Methyl-guanosine
  modified_base 96: mod_base = OTHER; note = 2'-O-Methyl-cytidine
  modified_base 97: mod_base = OTHER; note = 2'-O-Methyl-uridine phosphorothioate
  modified_base 98: mod_base = OTHER; note = 2'-O-Methyl-uridine phosphorothioate
  modified_base 99: mod_base = OTHER; note = 2'-O-Methyl-uridine phosphorothioate
  modified_base 100: mod_base = OTHER; note = 2'-O-Methyl-uridine
  modified_base 101: mod_base = OTHER; note = 2'-O-Methyl-uridine
  modified_base 102: mod_base = OTHER; note = 2'-O-Methyl-uridine
  modified_base 103: mod_base = OTHER; note = 2'-O-Methyl-uridine

SEQ ID NO: 449 - RNA, 103 nt, synthetic construct; identical to SEQ ID NO: 447
  source 1..103: mol_type = other RNA; note = Description of Artificial Sequence: Synthetic polynucleotide
  modified_base 1: mod_base = OTHER; note = 2'-O-Methyl-uridine phosphorothioate
  modified_base 2: mod_base = OTHER; note = 2'-O-Methyl-cytidine phosphorothioate
  modified_base 3: mod_base = OTHER; note = 2'-O-Methyl-adenosine phosphorothioate
  modified_base 21: mod_base = OTHER; note = 2'-O-Methyl-guanosine
  modified_base 28: mod_base = OTHER; note = 2'-O-Methyl-adenosine
  modified_base 29: mod_base = OTHER; note = 2'-O-Methyl-guanosine
  modified_base 30: mod_base = OTHER; note = 2'-O-Methyl-cytidine
  modified_base 31: mod_base = OTHER; note = 2'-O-Methyl-uridine
  modified_base 32: mod_base = OTHER; note = 2'-O-Methyl-adenosine
  modified_base 34: mod_base = OTHER; note = 2'-O-Methyl-adenosine
  modified_base 35: mod_base = OTHER; note = 2'-O-Methyl-adenosine
  modified_base 36: mod_base = OTHER; note = 2'-O-Methyl-adenosine
  modified_base 37: mod_base = OTHER; note = 2'-O-Methyl-uridine
  modified_base 38: mod_base = OTHER; note = 2'-O-Methyl-adenosine
  modified_base 39: mod_base = OTHER; note = 2'-O-Methyl-guanosine
  modified_base 40: mod_base = OTHER; note = 2'-O-Methyl-cytidine
  modified_base 41: mod_base = OTHER; note = 2'-O-Methyl-adenosine
  modified_base 42: mod_base = OTHER; note = 2'-O-Methyl-adenosine
  modified_base 46: mod_base = OTHER; note = 2'-O-Methyl-adenosine
  modified_base 48: mod_base = OTHER; note = 2'-O-Methyl-adenosine
  modified_base 50: mod_base = OTHER; note = 2'-O-Methyl-uridine
  modified_base 52: mod_base = OTHER; note = 2'-O-Methyl-adenosine
  modified_base 53: mod_base = OTHER; note = 2'-O-Methyl-guanosine
  modified_base 54: mod_base = OTHER; note = 2'-O-Methyl-guanosine
  modified_base 55: mod_base = OTHER; note = 2'-O-Methyl-cytidine
  modified_base 56: mod_base = OTHER; note = 2'-O-Methyl-uridine
  modified_base 57: mod_base = OTHER; note = 2'-O-Methyl-adenosine
  modified_base 60: mod_base = OTHER; note = 2'-O-Methyl-cytidine
  modified_base 61: mod_base = OTHER; note = 2'-O-Methyl-cytidine
  modified_base 64: mod_base = OTHER; note = uridine phosphorothioate
  modified_base 66: mod_base = OTHER; note = 2'-O-Methyl-uridine
  modified_base 67: mod_base = OTHER; note = 2'-O-Methyl-cytidine
  modified_base 70: mod_base = OTHER; note = 2'-O-Methyl-cytidine
  modified_base 71: mod_base = OTHER; note = 2'-O-Methyl-uridine
  modified_base 72: mod_base = OTHER; note = 2'-O-Methyl-uridine
  modified_base 74: mod_base = OTHER; note = 2'-O-Methyl-adenosine
  modified_base 75: mod_base = OTHER; note = 2'-O-Methyl-adenosine
  modified_base 76: mod_base = OTHER; note = 2'-O-Methyl-adenosine
  modified_base 77: mod_base = OTHER; note = 2'-O-Methyl-adenosine
  modified_base 78: mod_base = OTHER; note = 2'-O-Methyl-adenosine
  modified_base 79: mod_base = OTHER; note = 2'-O-Methyl-guanosine
  modified_base 80: mod_base = OTHER; note = 2'-O-Methyl-uridine
  modified_base 81: mod_base = OTHER; note = 2'-O-Methyl-guanosine
  modified_base 83: mod_base = OTHER; note = 2'-O-Methyl-cytidine
  modified_base 84: mod_base = OTHER; note = 2'-O-Methyl-adenosine
  modified_base 85: mod_base = OTHER; note = 2'-O-Methyl-cytidine
  modified_base 86: mod_base = OTHER; note = 2'-O-Methyl-cytidine
  modified_base 87: mod_base = OTHER; note = 2'-O-Methyl-guanosine
  modified_base 88: mod_base = OTHER; note = 2'-O-Methyl-adenosine
  modified_base 89: mod_base = OTHER; note = 2'-O-Methyl-guanosine
  modified_base 90: mod_base = OTHER; note = 2'-O-Methyl-uridine
  modified_base 91: mod_base = OTHER; note = 2'-O-Methyl-cytidine
  modified_base 92: mod_base = OTHER; note = 2'-O-Methyl-guanosine
  modified_base 93: mod_base = OTHER; note = 2'-O-Methyl-guanosine
  modified_base 94: mod_base = OTHER; note = 2'-O-Methyl-uridine
  modified_base 95: mod_base = OTHER; note = 2'-O-Methyl-guanosine
  modified_base 96: mod_base = OTHER; note = 2'-O-Methyl-cytidine
  modified_base 97: mod_base = OTHER; note = 2'-O-Methyl-uridine phosphorothioate
  modified_base 98: mod_base = OTHER; note = 2'-O-Methyl-uridine phosphorothioate
  modified_base 99: mod_base = OTHER; note = 2'-O-Methyl-uridine phosphorothioate
  modified_base 100: mod_base = OTHER; note = 2'-O-Methyl-uridine
  modified_base 101: mod_base = OTHER; note = 2'-O-Methyl-uridine
  modified_base 102: mod_base = OTHER; note = 2'-O-Methyl-uridine
  modified_base 103: mod_base = OTHER; note = 2'-O-Methyl-uridine

SEQ ID NO: 450 - RNA, 100 nt, synthetic construct; identical to SEQ ID NO: 339
  source 1..100: mol_type = other RNA; note = Description of Artificial Sequence: Synthetic polynucleotide
  modified_base 1: mod_base = OTHER; note = 2'-O-Methyl-uridine phosphorothioate
  modified_base 2: mod_base = OTHER; note = 2'-O-Methyl-cytidine phosphorothioate
  modified_base 3: mod_base = OTHER; note = 2'-O-Methyl-adenosine phosphorothioate
  modified_base 5: mod_base = OTHER; note = cytidine phosphonoacetate
  modified_base 21: mod_base = OTHER; note = 2'-O-Methyl-guanosine
  modified_base 28: mod_base = OTHER; note = 2'-O-Methyl-adenosine
  modified_base 29: mod_base = OTHER; note = 2'-O-Methyl-guanosine
  modified_base 30: mod_base = OTHER; note = 2'-O-Methyl-cytidine
  modified_base 31: mod_base = OTHER; note = 2'-O-Methyl-uridine
  modified_base 32: mod_base = OTHER; note = 2'-O-Methyl-adenosine
  modified_base 33: mod_base = OTHER; note = 2'-O-Methyl-guanosine
  modified_base 34: mod_base = OTHER; note = 2'-O-Methyl-adenosine
  modified_base 35: mod_base = OTHER; note = 2'-O-Methyl-adenosine
  modified_base 36: mod_base = OTHER; note = 2'-O-Methyl-adenosine
  modified_base 37: mod_base = OTHER; note = 2'-O-Methyl-uridine
  modified_base 38: mod_base = OTHER; note = 2'-O-Methyl-adenosine
  modified_base 39: mod_base = OTHER; note = 2'-O-Methyl-guanosine
  modified_base 40: mod_base = OTHER; note = 2'-O-Methyl-cytidine
  modified_base 41: mod_base = OTHER; note = 2'-O-Methyl-adenosine
  modified_base 42: mod_base = OTHER; note = 2'-O-Methyl-adenosine
  modified_base 46: mod_base = OTHER; note = 2'-O-Methyl-adenosine
  modified_base 48: mod_base = OTHER; note = 2'-O-Methyl-adenosine
  modified_base 50: mod_base = OTHER; note = 2'-O-Methyl-uridine
  modified_base 52: mod_base = OTHER; note = 2'-O-Methyl-adenosine
  modified_base 53: mod_base = OTHER; note = 2'-O-Methyl-guanosine
  modified_base 54: mod_base = OTHER; note = 2'-O-Methyl-guanosine
  modified_base 55: mod_base = OTHER; note = 2'-O-Methyl-cytidine
  modified_base 56: mod_base = OTHER; note = 2'-O-Methyl-uridine
  modified_base 57: mod_base = OTHER; note = 2'-O-Methyl-adenosine
  modified_base 60: mod_base = OTHER; note = 2'-O-Methyl-cytidine
  modified_base 61: mod_base = OTHER; note = 2'-O-Methyl-cytidine
  modified_base 66: mod_base = OTHER; note = 2'-O-Methyl-uridine
  modified_base 67: mod_base = OTHER; note = 2'-O-Methyl-cytidine
  modified_base 70: mod_base = OTHER; note = 2'-O-Methyl-cytidine
  modified_base 71: mod_base = OTHER; note = 2'-O-Methyl-uridine
  modified_base 72: mod_base = OTHER; note = 2'-O-Methyl-uridine
  modified_base 73: mod_base = OTHER; note = 2'-O-Methyl-guanosine
  modified_base 74: mod_base = OTHER; note = 2'-O-Methyl-adenosine
  modified_base 75: mod_base = OTHER; note = 2'-O-Methyl-adenosine
  modified_base 76: mod_base = OTHER; note = 2'-O-Methyl-adenosine
  modified_base 77: mod_base = OTHER; note = 2'-O-Methyl-adenosine
  modified_base 78: mod_base = OTHER; note = 2'-O-Methyl-adenosine
  modified_base 79: mod_base = OTHER; note = 2'-O-Methyl-guanosine
  modified_base 80: mod_base = OTHER; note = 2'-O-Methyl-uridine
  modified_base 81: mod_base = OTHER; note = 2'-O-Methyl-guanosine
  modified_base 83: mod_base = OTHER; note = 2'-O-Methyl-cytidine
  modified_base 84: mod_base = OTHER; note = 2'-O-Methyl-adenosine
  modified_base 85: mod_base = OTHER; note = 2'-O-Methyl-cytidine
  modified_base 86: mod_base = OTHER; note = 2'-O-Methyl-cytidine
  modified_base 87: mod_base = OTHER; note = 2'-O-Methyl-guanosine
  modified_base 88: mod_base = OTHER; note = 2'-O-Methyl-adenosine
  modified_base 89: mod_base = OTHER; note = 2'-O-Methyl-guanosine
  modified_base 90: mod_base = OTHER; note = 2'-O-Methyl-uridine
  modified_base 91: mod_base = OTHER; note = 2'-O-Methyl-cytidine
  modified_base 92: mod_base = OTHER; note = 2'-O-Methyl-guanosine
  modified_base 93: mod_base = OTHER; note = 2'-O-Methyl-guanosine
  modified_base 94: mod_base = OTHER; note = 2'-O-Methyl-uridine
  modified_base 95: mod_base = OTHER; note = 2'-O-Methyl-guanosine
  modified_base 96: mod_base = OTHER; note = 2'-O-Methyl-cytidine
  modified_base 97: mod_base = OTHER; note = 2'-O-Methyl-uridine phosphorothioate
  modified_base 98: mod_base = OTHER; note = 2'-O-Methyl-uridine phosphorothioate
  modified_base 99: mod_base = OTHER; note = 2'-O-Methyl-uridine phosphorothioate
  modified_base 100: mod_base = OTHER; note = 2'-O-Methyl-uridine

SEQ ID NO: 451 - RNA, 100 nt, synthetic construct; identical to SEQ ID NO: 339
  source 1..100: mol_type = other RNA; note = Description of Artificial Sequence: Synthetic polynucleotide
  modified_base 1: mod_base = OTHER; note = 2'-O-Methyl-uridine phosphorothioate
  modified_base 2: mod_base = OTHER; note = 2'-O-Methyl-cytidine phosphorothioate
  modified_base 3: mod_base = OTHER; note = 2'-O-Methyl-adenosine phosphorothioate
  modified_base 11: mod_base = OTHER; note = guanosine phosphonoacetate
  modified_base 21: mod_base = OTHER; note = 2'-O-Methyl-guanosine
  modified_base 28: mod_base = OTHER; note = 2'-O-Methyl-adenosine
  modified_base 29: mod_base = OTHER; note = 2'-O-Methyl-guanosine
  modified_base 30: mod_base = OTHER; note = 2'-O-Methyl-cytidine
  modified_base 31: mod_base = OTHER; note = 2'-O-Methyl-uridine
  modified_base 32: mod_base = OTHER; note = 2'-O-Methyl-adenosine
  modified_base 33: mod_base = OTHER; note = 2'-O-Methyl-guanosine
  modified_base 34: mod_base = OTHER; note = 2'-O-Methyl-adenosine
  modified_base 35: mod_base = OTHER; note = 2'-O-Methyl-adenosine
  modified_base 36: mod_base = OTHER; note = 2'-O-Methyl-adenosine
  modified_base 37: mod_base = OTHER; note = 2'-O-Methyl-uridine
  modified_base 38: mod_base = OTHER; note = 2'-O-Methyl-adenosine
  modified_base 39: mod_base = OTHER; note = 2'-O-Methyl-guanosine
  modified_base 40: mod_base = OTHER; note = 2'-O-Methyl-cytidine
  modified_base 41: mod_base = OTHER; note = 2'-O-Methyl-adenosine
  modified_base 42: mod_base = OTHER; note = 2'-O-Methyl-adenosine
  modified_base 46: mod_base = OTHER; note = 2'-O-Methyl-adenosine
  modified_base 48: mod_base = OTHER; note = 2'-O-Methyl-adenosine
  modified_base 50: mod_base = OTHER; note = 2'-O-Methyl-uridine
  modified_base 52: mod_base = OTHER; note = 2'-O-Methyl-adenosine
  modified_base 53: mod_base = OTHER; note = 2'-O-Methyl-guanosine
  modified_base 54: mod_base = OTHER; note = 2'-O-Methyl-guanosine
  modified_base 55: mod_base = OTHER; note = 2'-O-Methyl-cytidine
  modified_base 56: mod_base = OTHER; note = 2'-O-Methyl-uridine
  modified_base 57: mod_base = OTHER; note = 2'-O-Methyl-adenosine
  modified_base 60: mod_base = OTHER; note = 2'-O-Methyl-cytidine
  modified_base 61: mod_base = OTHER; note = 2'-O-Methyl-cytidine
  modified_base 66: mod_base = OTHER; note = 2'-O-Methyl-uridine
  modified_base 67: mod_base = OTHER; note = 2'-O-Methyl-cytidine
  modified_base 70: mod_base = OTHER; note = 2'-O-Methyl-cytidine
  modified_base 71: mod_base = OTHER; note = 2'-O-Methyl-uridine
  modified_base 72: mod_base = OTHER; note = 2'-O-Methyl-uridine
  modified_base 73: mod_base = OTHER; note = 2'-O-Methyl-guanosine
  modified_base 74: mod_base = OTHER; note = 2'-O-Methyl-adenosine
  modified_base 75: mod_base = OTHER; note = 2'-O-Methyl-adenosine
  modified_base 76: mod_base = OTHER; note = 2'-O-Methyl-adenosine
  modified_base 77: mod_base = OTHER; note = 2'-O-Methyl-adenosine
  modified_base 78: mod_base = OTHER; note = 2'-O-Methyl-adenosine
  modified_base 79: mod_base = OTHER; note = 2'-O-Methyl-guanosine
  modified_base 80: mod_base = OTHER; note = 2'-O-Methyl-uridine
  modified_base 81: mod_base = OTHER; note = 2'-O-Methyl-guanosine
  modified_base 83: mod_base = OTHER; note = 2'-O-Methyl-cytidine
  modified_base 84: mod_base = OTHER; note = 2'-O-Methyl-adenosine
  modified_base 85: mod_base = OTHER; note = 2'-O-Methyl-cytidine
  modified_base 86: mod_base = OTHER; note = 2'-O-Methyl-cytidine
  modified_base 87: mod_base = OTHER; note = 2'-O-Methyl-guanosine
  modified_base 88: mod_base = OTHER; note = 2'-O-Methyl-adenosine
  modified_base 89: mod_base = OTHER; note = 2'-O-Methyl-guanosine
  modified_base 90: mod_base = OTHER; note = 2'-O-Methyl-uridine
  modified_base 91: mod_base = OTHER; note = 2'-O-Methyl-cytidine
  modified_base 92: mod_base = OTHER; note = 2'-O-Methyl-guanosine
  modified_base 93: mod_base = OTHER; note = 2'-O-Methyl-guanosine
  modified_base 94: mod_base = OTHER; note = 2'-O-Methyl-uridine
  modified_base 95: mod_base = OTHER; note = 2'-O-Methyl-guanosine
  modified_base 96: mod_base = OTHER; note = 2'-O-Methyl-cytidine
  modified_base 97: mod_base = OTHER; note = 2'-O-Methyl-uridine phosphorothioate
  modified_base 98: mod_base = OTHER; note = 2'-O-Methyl-uridine phosphorothioate
  modified_base 99: mod_base = OTHER; note = 2'-O-Methyl-uridine phosphorothioate
  modified_base 100: mod_base = OTHER; note = 2'-O-Methyl-uridine

SEQ ID NO: 452 - RNA, 100 nt, synthetic construct
  source 1..100: mol_type = other RNA; note = Description of Artificial Sequence: Synthetic polynucleotide
  modified_base 1: mod_base = OTHER; note = 2'-O-Methyl-cytidine phosphorothioate
  modified_base 2: mod_base = OTHER; note = 2'-O-Methyl-guanosine phosphorothioate
  modified_base 3: mod_base = OTHER; note = 2'-O-Methyl-cytidine phosphorothioate
  modified_base 97: mod_base = OTHER; note = uridine phosphorothioate
  modified_base 98: mod_base = OTHER; note = 2'-O-Methyl-uridine phosphorothioate
  modified_base 99: mod_base = OTHER; note = 2'-O-Methyl-uridine phosphorothioate
  modified_base 100: mod_base = OTHER; note = 2'-O-Methyl-uridine
cgcctgccagcgcctggcgagttttagagctagaaatagcaagttaaaataaggctagtccgttatcaacttgaaaaagtggcaccgagtcggtgctttt

SEQ ID NO: 453 - DNA, 22 bp, synthetic construct
  source 1..22: mol_type = other DNA; note = Description of Artificial Sequence: Synthetic oligonucleotide
ctagcacctgccccagcggtgg

SEQ ID NO: 454 - DNA, 23 bp, synthetic construct
  source 1..23: mol_type = other DNA; note = Description of Artificial Sequence: Synthetic oligonucleotide
tccctaccctggcacagcagggg

SEQ ID NO: 455 - DNA, 23 bp, synthetic construct
  source 1..23: mol_type = other DNA; note = Description of Artificial Sequence: Synthetic oligonucleotide
cccacactcagacgcagcgaggg

SEQ ID NO: 456 - DNA, 21 bp, synthetic construct
  source 1..21: mol_type = other DNA; note = Description of Artificial Sequence: Synthetic oligonucleotide
cccgcactggagcagcaggga

SEQ ID NO: 457 - DNA, 24 bp, synthetic construct
  source 1..24: mol_type = other DNA; note = Description of Artificial Sequence: Synthetic oligonucleotide
cttgcaccttggtagcagctgggg

SEQ ID NO: 458 - DNA, 23 bp, synthetic construct
  source 1..23: mol_type = other DNA; note = Description of Artificial Sequence: Synthetic oligonucleotide
ctggcaccatggcccagcagtgg

SEQ ID NO: 459 - DNA, 23 bp, synthetic construct
  source 1..23: mol_type = other DNA; note = Description of Artificial Sequence: Synthetic oligonucleotide
actgcatcttagtgcagaggtgg

SEQ ID NO: 460 - DNA, 23 bp, synthetic construct
  source 1..23: mol_type = other DNA; note = Description of Artificial Sequence: Synthetic oligonucleotide
tccacaccttggcgcactggaag

SEQ ID NO: 461 - DNA, 23 bp, synthetic construct
  source 1..23: mol_type = other DNA; note = Description of Artificial Sequence: Synthetic oligonucleotide
cattcaccttgtcacagctgggg

SEQ ID NO: 462 - DNA, 23 bp, synthetic construct
  source 1..23: mol_type = other DNA; note = Description of Artificial Sequence: Synthetic oligonucleotide
accgcaccattgcacagcctagg

SEQ ID NO: 463 - DNA, 24 bp, synthetic construct
  source 1..24: mol_type = other DNA; note = Description of Artificial Sequence: Synthetic oligonucleotide
gccgcaccatgggcacagcgggga

SEQ ID NO: 464 - DNA, 22 bp, synthetic construct
  source 1..22: mol_type = other DNA; note = Description of Artificial Sequence: Synthetic oligonucleotide
cccatacctggcacagcggtgg

SEQ ID NO: 465 - DNA, 22 bp, synthetic construct
  source 1..22: mol_type = other DNA; note = Description of Artificial Sequence: Synthetic oligonucleotide
caagcacctggctcagaggtgg

SEQ ID NO: 466 - DNA, 22 bp, synthetic construct
  source 1..22: mol_type = other DNA; note = Description of Artificial Sequence: Synthetic oligonucleotide
accgcacctggcacagtggaag

SEQ ID NO: 467 - DNA, 23 bp, synthetic construct
  source 1..23: mol_type = other DNA; note = Description of Artificial Sequence: Synthetic oligonucleotide
ccccacccttggcacagagcagg

SEQ ID NO: 468 - DNA, 22 bp, synthetic construct
  source 1..22: mol_type = other DNA; note = Description of Artificial Sequence: Synthetic oligonucleotide
ccagcacctagcgcagagctgg

SEQ ID NO: 469 - DNA, 22 bp, synthetic construct
  source 1..22: mol_type = other DNA; note = Description of Artificial Sequence: Synthetic oligonucleotide
cccgcacctacctcagcagggg

SEQ ID NO: 470 - DNA, 23 bp, synthetic construct
  source 1..23: mol_type = other DNA; note = Description of Artificial Sequence: Synthetic oligonucleotide
cccgcaccccaccgcagcggggg

SEQ ID NO: 471 - DNA, 23 bp, synthetic construct
  source 1..23: mol_type = other DNA; note = Description of Artificial Sequence: Synthetic oligonucleotide
tctttaccttggagcagctgagg

SEQ ID NO: 472 - DNA, 23 bp, synthetic construct
  source 1..23: mol_type = other DNA; note = Description of Artificial Sequence: Synthetic oligonucleotide
cccgcaccacagtgcaccggggg

SEQ ID NO: 473 - DNA, 23 bp, synthetic construct
  source 1..23: mol_type = other DNA; note = Description of Artificial Sequence: Synthetic oligonucleotide
cctccacaatggcgcaggggcgg

SEQ ID NO: 474 - DNA, 22 bp, synthetic construct
  source 1..22: mol_type = other DNA; note = Description of Artificial Sequence: Synthetic oligonucleotide
ccagcacctggcacagaagagg

SEQ ID NO: 475 - DNA, 23 bp, synthetic construct
  source 1..23: mol_type = other DNA; note = Description of Artificial Sequence: Synthetic oligonucleotide
accgcaccaaggtgcataggagg

SEQ ID NO: 476 - DNA, 22 bp, synthetic construct
  source 1..22: mol_type = other DNA; note = Description of Artificial Sequence: Synthetic oligonucleotide
ccagcacttgccccagcagagg

SEQ ID NO: 477 - DNA, 23 bp, synthetic construct
  source 1..23: mol_type = other DNA; note = Description of Artificial Sequence: Synthetic oligonucleotide
ctcccaccctggcccagcggggg

SEQ ID NO: 478 - DNA, 23 bp, synthetic construct
  source 1..23: mol_type = other DNA; note = Description of Artificial Sequence: Synthetic oligonucleotide
acagcaccttggcccagaggcga

SEQ ID NO: 479 - DNA, 23 bp, synthetic construct
  source 1..23: mol_type = other DNA; note = Description of Artificial Sequence: Synthetic oligonucleotide
acggcaccttgggctagcggggg

SEQ ID NO: 480 - DNA, 23 bp, synthetic construct
  source 1..23: mol_type = other DNA; note = Description of Artificial Sequence: Synthetic oligonucleotide
cccgcacccagctgcagccgagg

SEQ ID NO: 481 - DNA, 22 bp, synthetic construct
  source 1..22: mol_type = other DNA; note = Description of Artificial Sequence: Synthetic oligonucleotide
ccagcacctggtgcagagtagg

SEQ ID NO: 482 - DNA, 23 bp, synthetic construct
  source 1..23: mol_type = other DNA; note = Description of Artificial Sequence: Synthetic oligonucleotide
cccacacctgggcccagtggagg

SEQ ID NO: 483 - DNA, 22 bp, synthetic construct
  source 1..22: mol_type = other DNA; note = Description of Artificial Sequence: Synthetic oligonucleotide
ccagcacctggtgcagcttagg

SEQ ID NO: 484 - DNA, 23 bp, synthetic construct
  source 1..23: mol_type = other DNA; note = Description of Artificial Sequence: Synthetic oligonucleotide
tccacacaatggcacagcagagg

SEQ ID NO: 485 - DNA, 22 bp, synthetic construct
  source 1..22: mol_type = other DNA; note = Description of Artificial Sequence: Synthetic oligonucleotide
cccgcacctggctcagagggtc

SEQ ID NO: 486 - DNA, 24 bp, synthetic construct
  source 1..24: mol_type = other DNA; note = Description of Artificial Sequence: Synthetic oligonucleotide
cgggcaccatggcagcagcggagg

SEQ ID NO: 487 - DNA, 23 bp, synthetic construct
  source 1..23: mol_type = other DNA; note = Description of Artificial Sequence: Synthetic oligonucleotide
cccacaccatggcccagtgagag

SEQ ID NO: 488 - DNA, 22 bp, synthetic construct
  source 1..22: mol_type = other DNA; note = Description of Artificial Sequence: Synthetic oligonucleotide
ccagcacctggcacagtgaagg

SEQ ID NO: 489 - DNA, 23 bp, synthetic construct
  source 1..23: mol_type = other DNA; note = Description of Artificial Sequence: Synthetic oligonucleotide
cccacacatggccacagcagtgg

SEQ ID NO: 490 - DNA, 23 bp, synthetic construct
  source 1..23: mol_type = other DNA; note = Description of Artificial Sequence: Synthetic oligonucleotide
ctggcaccttagcacagaggagg

SEQ ID NO: 491 - DNA, 23 bp, synthetic construct
  source 1..23: mol_type = other DNA; note = Description of Artificial Sequence: Synthetic oligonucleotide
cccgcaccagagcgcagggggag

SEQ ID NO: 492 - DNA, 22 bp, synthetic construct
  source 1..22: mol_type = other DNA; note = Description of Artificial Sequence: Synthetic oligonucleotide
gccacacctggcccagcagggg

SEQ ID NO: 493 - DNA, 23 bp, synthetic construct
  source 1..23: mol_type = other DNA; note = Description of Artificial Sequence: Synthetic oligonucleotide
cccgcaccagggcgcagatggag

SEQ ID NO: 494 - DNA, 23 bp, synthetic construct
  source 1..23: mol_type = other DNA; note = Description of Artificial Sequence: Synthetic oligonucleotide
tccacacctcagcacagcagagg

SEQ ID NO: 495 - DNA, 23 bp, synthetic construct
  source 1..23: mol_type = other DNA; note = Description of Artificial Sequence: Synthetic oligonucleotide
accgcaccttggcccagtgctgg

SEQ ID NO: 496 - DNA, 22 bp, synthetic construct
  source 1..22: mol_type = other DNA; note = Description of Artificial Sequence: Synthetic oligonucleotide
accgcagctggcgcagcatggg

SEQ ID NO: 497 - DNA, 22 bp, synthetic construct
  source 1..22: mol_type = other DNA; note = Description of Artificial Sequence: Synthetic oligonucleotide
cccgcatttgcctcagcggtgg

SEQ ID NO: 498 - DNA, 22 bp, synthetic construct
  source 1..22: mol_type = other DNA; note = Description of Artificial Sequence: Synthetic oligonucleotide
ccagcacttggcacagcagtgg

SEQ ID NO: 499 - DNA, 24 bp, synthetic construct
  source 1..24: mol_type = other DNA; note = Description of Artificial Sequence: Synthetic oligonucleotide
cccacaccttggtgtcagcggagg

SEQ ID NO: 500 - DNA, 22 bp, synthetic construct
  source 1..22: mol_type = other DNA; note = Description of Artificial Sequence: Synthetic oligonucleotide
cctgcacccggagcagcagggg

SEQ ID NO: 501 - DNA, 23 bp, synthetic construct
  source 1..23: mol_type = other DNA; note = Description of Artificial Sequence: Synthetic oligonucleotide
cctccaccttggcccagtggagg

SEQ ID NO: 502 - DNA, 23 bp, synthetic construct
  source 1..23: mol_type = other DNA; note = Description of Artificial Sequence: Synthetic oligonucleotide
ctcccaccctggcgcagaggagg

SEQ ID NO: 503 - DNA, 22 bp, synthetic construct
  source 1..22: mol_type = other DNA; note = Description of Artificial Sequence: Synthetic oligonucleotide
tcagcacctggtgcagaggagg

SEQ ID NO: 504 - DNA, 23 bp, synthetic construct
  source 1..23: mol_type = other DNA; note = Description of Artificial Sequence: Synthetic oligonucleotide
cgagcaccatggcgcagccccgg

SEQ ID NO: 505 - DNA, 22 bp, synthetic construct
  source 1..22: mol_type = other DNA; note = Description of Artificial Sequence: Synthetic oligonucleotide
cccgcacttggagcagccggcg

SEQ ID NO: 506 - DNA, 23 bp, synthetic construct
  source 1..23: mol_type = other DNA; note = Description of Artificial Sequence: Synthetic oligonucleotide
ggagcaccttgacccagcagagg

SEQ ID NO: 507 - DNA, 22 bp, synthetic construct
  source 1..22: mol_type = other DNA; note = Description of Artificial Sequence: Synthetic oligonucleotide
ccagcacttagcccagcagcgg

SEQ ID NO: 508 - DNA, 23 bp, synthetic construct
  source 1..23: mol_type = other DNA; note = Description of Artificial Sequence: Synthetic oligonucleotide
cccgcacctcggcacagctaggg

SEQ ID NO: 509 - DNA, 23 bp, synthetic construct
  source 1..23: mol_type = other DNA; note = Description of Artificial Sequence: Synthetic oligonucleotide
gccccatcttggcccagcggagg

SEQ ID NO: 510 - DNA, 23 bp, synthetic construct
  source 1..23: mol_type = other DNA; note = Description of Artificial Sequence: Synthetic oligonucleotide
ctagaaccatggtgcagaggggg

SEQ ID NO: 511 - DNA, 23 bp, synthetic construct
  source 1..23: mol_type = other DNA; note = Description of Artificial Sequence: Synthetic oligonucleotide
atcccacctcggcacagctgggg

SEQ ID NO: 512 - DNA, 23 bp, synthetic construct
  source 1..23: mol_type = other DNA; note = Description of Artificial Sequence: Synthetic oligonucleotide
cccgcaccgtggtacagcctgtg

SEQ ID NO: 513 - DNA, 22 bp, synthetic construct
  source 1..22: mol_type = other DNA; note = Description of Artificial Sequence: Synthetic oligonucleotide
cccgcaccaggcccagctggcg

SEQ ID NO: 514 - DNA, 23 bp, synthetic construct
  source 1..23: mol_type = other DNA; note = Description of Artificial Sequence: Synthetic oligonucleotide
cccacaccttggtgcagctctgt

SEQ ID NO: 515 - DNA, 22 bp, synthetic construct
  source 1..22: mol_type = other DNA; note = Description of Artificial Sequence: Synthetic oligonucleotide
accacacctgtcccagcggagg

SEQ ID NO: 516 - DNA, 23 bp, synthetic construct
  source 1..23: mol_type = other DNA; note = Description of Artificial Sequence: Synthetic oligonucleotide
cacactacttggcacagaggagg

SEQ ID NO: 517 - DNA, 22 bp, synthetic construct
  source 1..22: mol_type = other DNA; note = Description of Artificial Sequence: Synthetic oligonucleotide
accgcactcagagcagcggagg

SEQ ID NO: 518 - DNA, 22 bp, synthetic construct
  source 1..22: mol_type = other DNA; note = Description of Artificial Sequence: Synthetic oligonucleotide
tccgcacttggctcagcggggc

SEQ ID NO: 519 - DNA, 23 bp, synthetic construct
  source 1..23: mol_type = other DNA; note = Description of Artificial Sequence: Synthetic oligonucleotide
ccccgcactcggagcagcggcgg

SEQ ID NO: 520 - DNA, 24 bp, synthetic construct
  source 1..24: mol_type = other DNA; note = Description of Artificial Sequence: Synthetic oligonucleotide
tccgcaccctgagagcagtggagg

SEQ ID NO: 521 - DNA, 23 bp, synthetic construct
  source 1..23: mol_type = other DNA; note = Description of Artificial Sequence: Synthetic oligonucleotide
ccctgcacttggtgcagctgggg

SEQ ID NO: 522 - DNA, 22 bp, synthetic construct
  source 1..22: mol_type = other DNA; note = Description of Artificial Sequence: Synthetic oligonucleotide
accgcacctgacccagtggtgg

SEQ ID NO: 523 - DNA, 23 bp, synthetic construct
  source 1..23: mol_type = other DNA; note = Description of Artificial Sequence: Synthetic oligonucleotide
ctcctaccatggcacagctgagg

SEQ ID NO: 524 - DNA, 23 bp, synthetic construct
  source 1..23: mol_type = other DNA; note = Description of Artificial Sequence: Synthetic oligonucleotide
cccacaccagggcgcagctgaag

SEQ ID NO: 525 - DNA, 23 bp, synthetic construct
  source 1..23: mol_type = other DNA; note = Description of Artificial Sequence: Synthetic oligonucleotide
ccagtaccttggcccagctttgg

SEQ ID NO: 526 - DNA, 22 bp, synthetic construct
  source 1..22: mol_type = other DNA; note = Description of Artificial Sequence: Synthetic oligonucleotide
acagcacctggcacagtggtgg

SEQ ID NO: 527 - DNA, 22 bp, synthetic construct
  source 1..22: mol_type = other DNA; note = Description of Artificial Sequence: Synthetic oligonucleotide
cccacacctggagcaccagggg

SEQ ID NO: 528 - DNA, 24 bp, synthetic construct
  source 1..24: mol_type = other DNA; note = Description of Artificial Sequence: Synthetic oligonucleotide
caagcaccttggcagcagctgagg

SEQ ID NO: 529 - DNA, 23 bp, synthetic construct
  source 1..23: mol_type = other DNA; note = Description of Artificial Sequence: Synthetic oligonucleotide
cccatgccttagcacagcgatgg

SEQ ID NO: 530 - DNA, 23 bp, synthetic construct
  source 1..23: mol_type = other DNA; note = Description of Artificial Sequence: Synthetic oligonucleotide
ctctatccttggcccagcagtgg

SEQ ID NO: 531 - DNA, 23 bp, synthetic construct
  source 1..23: mol_type = other DNA; note = Description of Artificial Sequence: Synthetic oligonucleotide
cccgcaccttgccgcagcggccc

SEQ ID NO: 532 - DNA, 23 bp, synthetic construct
  source 1..23: mol_type = other DNA; note = Description of Artificial Sequence: Synthetic oligonucleotide
atggcaccttggcacatcagagg

SEQ ID NO: 533 - DNA, 23 bp, synthetic construct
  source 1..23: mol_type = other DNA; note = Description of Artificial Sequence: Synthetic oligonucleotide
tccccacactgtcgcagaggagg

SEQ ID NO: 534 - DNA, 23 bp, synthetic construct
  source 1..23: mol_type = other DNA; note = Description of Artificial Sequence: Synthetic oligonucleotide
ccagcaccatggcacagagaggt

SEQ ID NO: 535 - DNA, 22 bp, synthetic construct
  source 1..22: mol_type = other DNA; note = Description of Artificial Sequence: Synthetic oligonucleotide
acagcacctggcacagaggagg

SEQ ID NO: 536 - DNA, 23 bp, synthetic construct
  source 1..23: mol_type = other DNA; note = Description of Artificial Sequence: Synthetic oligonucleotide
accgcacctggcagcagccgtgg

SEQ ID NO: 537 - DNA, 22 bp, synthetic construct
  source 1..22: mol_type = other DNA; note = Description of Artificial Sequence: Synthetic oligonucleotide
ccagcacctggagcagccgagg

SEQ ID NO: 538 - DNA, 22 bp, synthetic construct
  source 1..22: mol_type = other DNA; note = Description of Artificial Sequence: Synthetic oligonucleotide
ccagcacctggcacaaaggagg

SEQ ID NO: 539 - DNA, 23 bp, synthetic construct
  source 1..23: mol_type = other DNA; note = Description of Artificial Sequence: Synthetic oligonucleotide
gaggcaccttggaccagcagcgg

SEQ ID NO: 540 - DNA, 22 bp, synthetic construct
  source 1..22: mol_type = other DNA; note = Description of Artificial Sequence: Synthetic oligonucleotide
cccgcacttggagcagccggtg

SEQ ID NO: 541 - DNA, 22 bp, synthetic construct
  source 1..22: mol_type = other DNA; note = Description of Artificial Sequence: Synthetic oligonucleotide
ccagcacttagtgcagcgcagg

SEQ ID NO: 542 - DNA, 22 bp, synthetic construct
  source 1..22: mol_type = other DNA; note = Description of Artificial Sequence: Synthetic oligonucleotide
cccacacctggagcagcaggag

SEQ ID NO: 543 - DNA, 22 bp, synthetic construct
  source 1..22: mol_type = other DNA; note = Description of Artificial Sequence: Synthetic oligonucleotide
cccacaccaggcacggcggggg

SEQ ID NO: 544 - DNA, 22 bp, synthetic construct
  source 1..22: mol_type = other DNA; note = Description of Artificial Sequence: Synthetic oligonucleotide
ccctcaccagccgcagcagggg

SEQ ID NO: 545 - DNA, 24 bp, synthetic construct
  source 1..24: mol_type = other DNA; note = Description of Artificial Sequence: Synthetic oligonucleotide
cacccgacttggcgacagcggggg

SEQ ID NO: 546 - DNA, 22 bp, synthetic construct
  source 1..22: mol_type = other DNA; note = Description of Artificial Sequence: Synthetic oligonucleotide
accgcacctggcacagaagggg

SEQ ID NO: 547 - DNA, 22 bp, synthetic construct
  source 1..22: mol_type = other DNA; note = Description of Artificial Sequence: Synthetic oligonucleotide
accacacctggcccagcagtgg

SEQ ID NO: 548 - DNA, 22 bp, synthetic construct
  source 1..22: mol_type = other DNA; note = Description of Artificial Sequence: Synthetic oligonucleotide
ccctcaccgggcacagaggagg

SEQ ID NO: 549 - DNA, 22 bp, synthetic construct
  source 1..22: mol_type = other DNA; note = Description of Artificial Sequence: Synthetic oligonucleotide
ccagtacctggcccagaggagg

SEQ ID NO: 550 - DNA, 22 bp, synthetic construct
  source 1..22: mol_type = other DNA; note = Description of Artificial Sequence: Synthetic oligonucleotide
cccgcaccaggcgcaggtggag

SEQ ID NO: 551 - DNA, 24 bp, synthetic construct
  source 1..24: mol_type = other DNA; note = Description of Artificial Sequence: Synthetic oligonucleotide
caggcaccttggcggcagccgcgg

SEQ ID NO: 552 - DNA, 23 bp, synthetic construct
  source 1..23: mol_type = other DNA; note = Description of Artificial Sequence: Synthetic oligonucleotide
tgtgcaccatggcacagcgggga

SEQ ID NO: 553 - DNA, 23 bp, synthetic construct
  source 1..23: mol_type = other DNA; note = Description of Artificial Sequence: Synthetic oligonucleotide
cccgcacacagacgcagagcagg

SEQ ID NO: 554 - DNA, 22 bp, synthetic construct
  source 1..22: mol_type = other DNA; note = Description of Artificial Sequence: Synthetic oligonucleotide
tccacacctggcccagctgtgg

SEQ ID NO: 555 - DNA, 21 bp, synthetic construct
  source 1..21: mol_type = other DNA; note = Description of Artificial Sequence: Synthetic oligonucleotide
cctgcactggcccagcagcgg

SEQ ID NO: 556 - DNA, 22 bp, synthetic construct
  source 1..22: mol_type = other DNA; note = Description of Artificial Sequence: Synthetic oligonucleotide
cctgcactagccgcaacggggg

SEQ ID NO: 557 - DNA, 23 bp, synthetic construct
  source 1..23: mol_type = other DNA; note = Description of Artificial Sequence: Synthetic oligonucleotide
tgagcaccttggggcagctgggg

SEQ ID NO: 558 - DNA, 22 bp, synthetic construct
  source 1..22: mol_type = other DNA; note = Description of Artificial Sequence: Synthetic oligonucleotide
cccgcacttggcgcagctggcc

SEQ ID NO: 559 - DNA, 24 bp, synthetic construct
  source 1..24: mol_type = other DNA; note = Description of Artificial Sequence: Synthetic oligonucleotide
ccagcaccttggcagcagcaccgg

SEQ ID NO: 560 - DNA, 23 bp, synthetic construct
  source 1..23: mol_type = other DNA; note = Description of Artificial Sequence: Synthetic oligonucleotide
tcccccacttggcacagctgggg

SEQ ID NO: 561 - DNA, 22 bp, synthetic construct
  source 1..22: mol_type = other DNA; note = Description of Artificial Sequence: Synthetic oligonucleotide
ccagcacagggcgcagaggtgg

SEQ ID NO: 562 - DNA, 23 bp, synthetic construct
  source 1..23: mol_type = other DNA; note = Description of Artificial Sequence: Synthetic oligonucleotide
cccaccccttagcacagcaatgg

SEQ ID NO: 563 - DNA, 23 bp, synthetic construct
  source 1..23: mol_type = other DNA; note = Description of Artificial Sequence: Synthetic oligonucleotide
cccacaccgtggcccagaggtgg

SEQ ID NO: 564 - DNA, 22 bp, synthetic construct
  source 1..22: mol_type = other DNA; note = Description of Artificial Sequence: Synthetic oligonucleotide
ccagcacctggcacagcatagg

SEQ ID NO: 565 - DNA, 23 bp, synthetic construct
  source 1..23: mol_type = other DNA; note = Description of Artificial Sequence: Synthetic oligonucleotide
accactacctggcccagcggtgg

SEQ ID NO: 566 - DNA, 23 bp, synthetic construct
  source 1..23: mol_type = other DNA; note = Description of Artificial Sequence: Synthetic oligonucleotide
tccgcaccttggtccagcagggg

SEQ ID NO: 567 - DNA, 22 bp, synthetic construct
  source 1..22: mol_type = other DNA; note = Description of Artificial Sequence: Synthetic oligonucleotide
tacgcacctggctcagcagagg

SEQ ID NO: 568 - DNA, 23 bp, synthetic construct
  source 1..23: mol_type = other DNA; note = Description of Artificial Sequence: Synthetic oligonucleotide
agcccagcatggcgcagaggtgg

SEQ ID NO: 569 - DNA, 22 bp, synthetic construct
  source 1..22: mol_type = other DNA; note = Description of Artificial Sequence: Synthetic oligonucleotide
ccagcacctggcacagaggaga

SEQ ID NO: 570 - DNA, 22 bp, synthetic construct
  source 1..22: mol_type = other DNA; note = Description of Artificial Sequence: Synthetic oligonucleotide
accgcacctggcccagatgggg

SEQ ID NO: 571 - DNA, 22 bp, synthetic construct
  source 1..22: mol_type = other DNA; note = Description of Artificial Sequence: Synthetic oligonucleotide
cccgcacctggctcagaggggt

SEQ ID NO: 572 - DNA, 22 bp, synthetic construct
  source 1..22: mol_type = other DNA; note = Description of Artificial Sequence: Synthetic oligonucleotide
accgcacctggcccagtggagg

SEQ ID NO: 573 - DNA, 23 bp, synthetic construct
  source 1..23: mol_type = other DNA; note = Description of Artificial Sequence: Synthetic oligonucleotide
cccacatcctggcccagcagggg

SEQ ID NO: 574 - DNA, 22 bp, synthetic construct
  source 1..22: mol_type = other DNA; note = Description of Artificial Sequence: Synthetic oligonucleotide
cctgcaccaggctcagtggggg

SEQ ID NO: 575 - DNA, 24 bp, synthetic construct
  source 1..24: mol_type = other DNA; note = Description of Artificial Sequence: Synthetic oligonucleotide
cgagcaccttggcagcagctgagg

SEQ ID NO: 576 - DNA, 22 bp, synthetic construct
  source 1..22: mol_type = other DNA; note = Description of Artificial Sequence: Synthetic oligonucleotide
accgcacctggcccagagtagg

SEQ ID NO: 577 - DNA, 22 bp, synthetic construct
  source 1..22: mol_type = other DNA; note = Description of Artificial Sequence: Synthetic oligonucleotide
acagcacctggcgcagagcggg

SEQ ID NO: 578 - DNA, 23 bp, synthetic construct
  source 1..23: mol_type = other DNA; note = Description of Artificial Sequence: Synthetic oligonucleotide
actccaccatggcacagcgtggg

SEQ ID NO: 579 - DNA, 22 bp, synthetic construct
  source 1..22: mol_type = other DNA; note = Description of Artificial Sequence: Synthetic oligonucleotide
accacacctggcccagaggagg

SEQ ID NO: 580 - DNA, 23 bp, synthetic construct
  source 1..23: mol_type = other DNA; note = Description of Artificial Sequence: Synthetic oligonucleotide
gcggcaccttggcccagcgtggg

SEQ ID NO: 581 - DNA, 23 bp, synthetic construct
  source 1..23: mol_type = other DNA; note = Description of Artificial Sequence: Synthetic oligonucleotide
cctgcacctgagcacagaggagg

SEQ ID NO: 582 - DNA, 22 bp, synthetic construct
  source 1..22: mol_type = other DNA; note = Description of Artificial Sequence: Synthetic oligonucleotide
cccgcaccctgtgcagccgagg

SEQ ID NO: 583 - DNA, 22 bp, synthetic construct
  source 1..22: mol_type = other DNA; note = Description of Artificial Sequence: Synthetic oligonucleotide
cccactcttggcacaggggagg

SEQ ID NO: 584 - DNA, 22 bp, synthetic construct
  source 1..22: mol_type = other DNA; note = Description of Artificial Sequence: Synthetic oligonucleotide
cccgcaccaggtgcaggagtgg

SEQ ID NO: 585 - DNA, 22 bp, synthetic construct
  source 1..22: mol_type = other DNA; note = Description of Artificial Sequence: Synthetic oligonucleotide
accgcacctggcccagcaaagg

SEQ ID NO: 586 - DNA, 23 bp, synthetic construct
  source 1..23: mol_type = other DNA; note = Description of Artificial Sequence: Synthetic oligonucleotide
gctgcaccttagcacagtgaagg

SEQ ID NO: 587 - DNA, 23 bp, synthetic construct
  source 1..23: mol_type = other DNA; note = Description of Artificial Sequence: Synthetic oligonucleotide
tcagcaccttggcgaagccttgg

SEQ ID NO: 588 - DNA, 22 bp, synthetic construct
  source 1..22: mol_type = other DNA; note = Description of Artificial Sequence: Synthetic oligonucleotide
accgcacctggcccaaaggggg

SEQ ID NO: 589 - DNA, 23 bp, synthetic construct
  source 1..23: mol_type = other DNA; note = Description of Artificial Sequence: Synthetic oligonucleotide
ccctcaccctggcacagccgggg

SEQ ID NO: 590 - DNA, 23 bp, synthetic construct
  source 1..23: mol_type = other DNA; note = Description of Artificial Sequence: Synthetic oligonucleotide
ttcacaccttggtgcagaggtga

SEQ ID NO: 591 - DNA, 22 bp, synthetic construct
  source 1..22: mol_type = other DNA; note = Description of Artificial Sequence: Synthetic oligonucleotide
ccagcacctagcgcagcggctg

SEQ ID NO: 592 - DNA, 22 bp, synthetic construct
  source 1..22: mol_type = other DNA; note = Description of Artificial Sequence: Synthetic oligonucleotide
accgcacctggcccatcagggg

SEQ ID NO: 593 - DNA, 22 bp, synthetic construct
  source 1..22: mol_type = other DNA; note = Description of Artificial Sequence: Synthetic oligonucleotide
cccgcacctggctcagcgggtc

SEQ ID NO: 594 - DNA, 22 bp, synthetic construct
  source 1..22: mol_type = other DNA; note = Description of Artificial Sequence: Synthetic oligonucleotide
tcagcacctggagcagccgagg

SEQ ID NO: 595 - DNA, 23 bp, synthetic construct
  source 1..23: mol_type = other DNA; note = Description of Artificial Sequence: Synthetic oligonucleotide
ccccacccttggtgcagaggagg

SEQ ID NO: 596 - DNA, 23 bp, synthetic construct
  source 1..23: mol_type = other DNA; note = Description of Artificial Sequence: Synthetic oligonucleotide
catacaccttgccgcagccaggg

SEQ ID NO: 597 - DNA, 23 bp, synthetic construct
  source 1..23: mol_type = other DNA; note = Description of Artificial Sequence: Synthetic oligonucleotide
cacacaccttagcacagccaagg

SEQ ID NO: 598 - DNA, 22 bp, synthetic construct
  source 1..22: mol_type = other DNA; note = Description of Artificial Sequence: Synthetic oligonucleotide
ctagcacctggcacagtggtgg

SEQ ID NO: 599 - DNA, 22 bp, synthetic construct
  source 1..22: mol_type = other DNA; note = Description of Artificial Sequence: Synthetic oligonucleotide
accgtacctggcccagaggagg

SEQ ID NO: 600 - DNA, 23 bp, synthetic construct
  source 1..23: mol_type = other DNA; note = Description of Artificial Sequence: Synthetic oligonucleotide
gccccaccttaatgcagcggggg

SEQ ID NO: 601 - DNA, 23 bp, synthetic construct
  source 1..23: mol_type = other DNA; note = Description of Artificial Sequence: Synthetic oligonucleotide
ccagctacatggcccagaggagg

SEQ ID NO: 602 - DNA, 22 bp, synthetic construct
  source 1..22: mol_type = other DNA; note = Description of Artificial Sequence: Synthetic oligonucleotide
cccacaccatgcgcagagtggg

SEQ ID NO: 603 - DNA, 22 bp, synthetic construct
  source 1..22: mol_type = other DNA; note = Description of Artificial Sequence: Synthetic oligonucleotide
cccgcacccaggccagctgtgg

SEQ ID NO: 604 - DNA, 22 bp, synthetic construct
  source 1..22: mol_type = other DNA; note = Description of Artificial Sequence: Synthetic oligonucleotide
ccagcacctgctgcagcgatgg

SEQ ID NO: 605 - DNA, 23 bp, synthetic construct
  source 1..23: mol_type = other DNA; note = Description of Artificial Sequence: Synthetic oligonucleotide
tccgcaccttggcccagttgaag

SEQ ID NO: 606 - DNA, 24 bp, synthetic construct
  source 1..24: mol_type = other DNA; note = Description of Artificial Sequence: Synthetic oligonucleotide
acagcaccttggcagcagaggtgg

SEQ ID NO: 607 - DNA, 22 bp, synthetic construct
  source 1..22: mol_type = other DNA; note = Description of Artificial Sequence: Synthetic oligonucleotide
cccgcaccaggctcagcagcag

SEQ ID NO: 608 - DNA, 22 bp, synthetic construct
  source 1..22: mol_type = other DNA; note = Description of Artificial Sequence: Synthetic oligonucleotide
ccagcacctggcacagccaggg

SEQ ID NO: 609 - DNA, 23 bp, synthetic construct
  source 1..23: mol_type = other DNA; note = Description of Artificial Sequence: Synthetic oligonucleotide
gctgcaccctgccacagaggagg

SEQ ID NO: 610 - DNA, 23 bp, synthetic construct
  source 1..23: mol_type = other DNA; note = Description of Artificial Sequence: Synthetic oligonucleotide
ccagcaccctagtgcagagtggg

SEQ ID NO: 611 - DNA, 22 bp, synthetic construct
  source 1..22: mol_type = other DNA; note = Description of Artificial Sequence: Synthetic oligonucleotide
cccgcacctggcacagcaccag

SEQ ID NO: 612 - DNA, 22 bp, synthetic construct
  source 1..22: mol_type = other DNA; note = Description of Artificial Sequence: Synthetic oligonucleotide
cccgaccctgacgcagcctggg

SEQ ID NO: 613 - DNA, 23 bp, synthetic construct
  source 1..23: mol_type = other DNA; note = Description of Artificial Sequence: Synthetic oligonucleotide
cccgcaccctatcacagcagagg

SEQ ID NO: 614 - DNA, 22 bp, synthetic construct
  source 1..22: mol_type = other DNA; note = Description of Artificial Sequence: Synthetic oligonucleotide
ctcgcaccaggcgcagccgtgg

SEQ ID NO: 615 - DNA, 23 bp, synthetic construct
  source 1..23: mol_type = other DNA; note = Description of Artificial Sequence: Synthetic oligonucleotide
catgtaccttgccacagcagggg

SEQ ID NO: 616 - DNA, 24 bp, synthetic construct
  source 1..24: mol_type = other DNA; note = Description of Artificial Sequence: Synthetic oligonucleotide
cgagcaccttggcggcagctgagg

SEQ ID NO: 617 - DNA, 23 bp, synthetic construct
  source 1..23: mol_type = other DNA; note = Description of Artificial Sequence: Synthetic oligonucleotide
tccacacctaggcacagcctagg

SEQ ID NO: 618 - DNA, 23 bp, synthetic construct
  source 1..23: mol_type = other DNA; note = Description of Artificial Sequence: Synthetic oligonucleotide
ccagcaccaaggctcagctgagg

SEQ ID NO: 619 - DNA, 22 bp, synthetic construct
  source 1..22: mol_type = other DNA; note = Description of Artificial Sequence: Synthetic oligonucleotide
accgcacctggcacattggagg

SEQ ID NO: 620 - DNA, 23 bp, synthetic construct
  source 1..23: mol_type = other DNA; note = Description of Artificial Sequence: Synthetic oligonucleotide
cccacaccttggcccagccctgg

SEQ ID NO: 621 - DNA, 22 bp, synthetic construct
  source 1..22: mol_type = other DNA; note = Description of Artificial Sequence: Synthetic oligonucleotide
gccgcacctgccgcagccgtgg

SEQ ID NO: 622 - DNA, 22 bp, synthetic construct
  source 1..22: mol_type = other DNA; note = Description of Artificial Sequence: Synthetic oligonucleotide
cccgcactgggtgcagtggtgg

SEQ ID NO: 623 - DNA, 23 bp, synthetic construct
  source 1..23: mol_type = other DNA; note = Description of Artificial Sequence: Synthetic oligonucleotide
cccacacccaggtgcagcggcag

SEQ ID NO: 624 - DNA, 22 bp, synthetic construct
  source 1..22: mol_type = other DNA; note = Description of Artificial Sequence: Synthetic oligonucleotide
ccagcacctggcacagcaggtg

SEQ ID NO: 625 - DNA, 23 bp, synthetic construct
  source 1..23: mol_type = other DNA; note = Description of Artificial Sequence: Synthetic oligonucleotide
cccgcatcttggtgcagctgctt

SEQ ID NO: 626 - DNA, 23 bp, synthetic construct
  source 1..23: mol_type = other DNA; note = Description of Artificial Sequence: Synthetic oligonucleotide
accgcaccatggtgcagctgggc

SEQ ID NO: 627 - DNA, 22 bp, synthetic construct
  source 1..22: mol_type = other DNA; note = Description of Artificial Sequence: Synthetic oligonucleotide
ccaacacctggcgcagagtagg

SEQ ID NO: 628 - DNA, 23 bp, synthetic construct
  source 1..23: mol_type = other DNA; note = Description of Artificial Sequence: Synthetic oligonucleotide
ctcgtaccaaagcgcagaggagg

SEQ ID NO: 629 - DNA, 22 bp, synthetic construct
  source 1..22: mol_type = other DNA; note = Description of Artificial Sequence: Synthetic oligonucleotide
cccgcactcggtgcagcggtat

SEQ ID NO: 630 - DNA, 22 bp, synthetic construct
  source 1..22: mol_type = other DNA; note = Description of Artificial Sequence: Synthetic oligonucleotide
cccgcactgggtgcagcggaag

SEQ ID NO: 631 - DNA, 22 bp, synthetic construct
  source 1..22: mol_type = other DNA; note = Description of Artificial Sequence: Synthetic oligonucleotide
gccgcacttggcgcagctgtgg

SEQ ID NO: 632 - DNA, 23 bp, synthetic construct
  source 1..23: mol_type = other DNA; note = Description of Artificial Sequence: Synthetic oligonucleotide
ctaacaccttggtgcagaggtgg

SEQ ID NO: 633 - DNA, 23 bp, synthetic construct
  source 1..23: mol_type = other DNA; note = Description of Artificial Sequence: Synthetic oligonucleotide
cctacaccatggcgcagcgtcag

SEQ ID NO: 634 - DNA, 22 bp, synthetic construct
  source 1..22: mol_type = other DNA; note = Description of Artificial Sequence: Synthetic oligonucleotide
ccagcacctggcacatcggtgg

SEQ ID NO: 635 - DNA, 22 bp, synthetic construct
  source 1..22: mol_type = other DNA; note = Description of Artificial Sequence: Synthetic oligonucleotide
cccgcacatggtgcagtggctg

SEQ ID NO: 636 - DNA, 22 bp, synthetic construct
  source 1..22: mol_type = other DNA; note = Description of Artificial Sequence: Synthetic oligonucleotide
cccacccctggcccagccgagg

SEQ ID NO: 637 - DNA, 23 bp, synthetic construct
  source 1..23: mol_type = other DNA; note = Description of Artificial Sequence: Synthetic oligonucleotide
tgcacaccttggcgcagtggggg

SEQ ID NO: 638 - DNA, 22 bp, synthetic construct
  source 1..22: mol_type = other DNA; note = Description of Artificial Sequence: Synthetic oligonucleotide
ccagcacctggcacaggggagg

SEQ ID NO: 639 - DNA, 22 bp, synthetic construct
  source 1..22: mol_type = other DNA; note = Description of Artificial Sequence: Synthetic oligonucleotide
cccacaccaggcacagaggagg

SEQ ID NO: 640 - DNA, 23 bp, synthetic construct
  source 1..23: mol_type = other DNA; note = Description of Artificial Sequence: Synthetic oligonucleotide
gtagcacgttgacgcagcagcgg

SEQ ID NO: 641 - DNA, 22 bp, synthetic construct
  source 1..22: mol_type = other DNA; note = Description of Artificial Sequence: Synthetic oligonucleotide
gccgcaccgggcgcagttgggg

SEQ ID NO: 642 - DNA, 22 bp, synthetic construct
  source 1..22: mol_type = other DNA; note = Description of Artificial Sequence: Synthetic oligonucleotide
cccacacctgccccagaggtgg

SEQ ID NO: 643 - DNA, 22 bp, synthetic construct
  source 1..22: mol_type = other DNA; note = Description of Artificial Sequence: Synthetic oligonucleotide
cccacagctggcccagcagggg

SEQ ID NO: 644 - DNA, 23 bp, synthetic construct
  source 1..23: mol_type = other DNA; note = Description of Artificial Sequence: Synthetic oligonucleotide
tcagcaccttggcacagctgaag

SEQ ID NO: 645 - DNA, 23 bp, synthetic construct
  source 1..23: mol_type = other DNA; note = Description of Artificial Sequence: Synthetic oligonucleotide
acagcacctcggtgcagcagaga

SEQ ID NO: 646 - DNA, 22 bp, synthetic construct
  source 1..22: mol_type = other DNA; note = Description of Artificial Sequence: Synthetic oligonucleotide
ccctcccatggcgcagcttcgg

SEQ ID NO: 647 - DNA, 22 bp, synthetic construct
  source 1..22: mol_type = other DNA; note = Description of Artificial Sequence: Synthetic oligonucleotide
cccgcaccgggcgcagcagctg

SEQ ID NO: 648 - DNA, 23 bp, synthetic construct
  source 1..23: mol_type = other DNA; note = Description of Artificial Sequence: Synthetic oligonucleotide
catgctacatggcgcagcggtag

SEQ ID NO: 649 - DNA, 23 bp, synthetic construct
  source 1..23: mol_type = other DNA; note = Description of Artificial Sequence: Synthetic oligonucleotide
ctcgcacccgaacgcagcagagg

SEQ ID NO: 650 - DNA, 23 bp, synthetic construct
  source 1..23: mol_type = other DNA; note = Description of Artificial Sequence: Synthetic oligonucleotide
tccccaccccagcgcagcagagg

SEQ ID NO: 651 - DNA, 23 bp, synthetic construct
  source 1..23: mol_type = other DNA; note = Description of Artificial Sequence: Synthetic oligonucleotide
cgaagaccttggcgcagaagcgg

SEQ ID NO: 652 - DNA, 23 bp, synthetic construct
  source 1..23: mol_type = other DNA; note = Description of Artificial Sequence: Synthetic oligonucleotide
cccgcaccttggcctagcgcggt

SEQ ID NO: 653 - DNA, 23 bp, synthetic construct
  source 1..23: mol_type = other DNA; note = Description of Artificial Sequence: Synthetic oligonucleotide
tctgcaccttggcgcagctggag

SEQ ID NO: 654 - DNA, 23 bp, synthetic construct
  source 1..23: mol_type = other DNA; note = Description of Artificial Sequence: Synthetic oligonucleotide
ctcccaccttaaagcagcggtgg

SEQ ID NO: 655 - DNA, 22 bp, synthetic construct
  source 1..22: mol_type = other DNA; note = Description of Artificial Sequence: Synthetic oligonucleotide
accgcacctggcccagagtggg

SEQ ID NO: 656 - DNA, 23 bp, synthetic construct
  source 1..23: mol_type = other DNA; note = Description of Artificial Sequence: Synthetic oligonucleotide
cccccaccttggcccagcgttgg

SEQ ID NO: 657 - DNA, 22 bp, synthetic construct
  source 1..22: mol_type = other DNA; note = Description of Artificial Sequence: Synthetic oligonucleotide
gccacacctcgcacagcggtgg

SEQ ID NO: 658 - DNA, 23 bp, synthetic construct
  source 1..23: mol_type = other DNA; note = Description of Artificial Sequence: Synthetic oligonucleotide
accacaccttgctgcagaggagg

SEQ ID NO: 659 - DNA, 22 bp, synthetic construct
  source 1..22: mol_type = other DNA; note = Description of Artificial Sequence: Synthetic oligonucleotide
cccgcagagggcgcagcggctg

SEQ ID NO: 660 - DNA, 21 bp, synthetic construct
  source 1..21: mol_type = other DNA; note = Description of Artificial Sequence: Synthetic oligonucleotide
ccagcactggctcagcagagg

SEQ ID NO: 661 - DNA, 22 bp, synthetic construct
  source 1..22: mol_type = other DNA; note = Description of Artificial Sequence: Synthetic oligonucleotide
accgcacccggcccagtggagg

SEQ ID NO: 662 - DNA, 23 bp, synthetic construct
  source 1..23: mol_type = other DNA; note = Description of Artificial Sequence: Synthetic oligonucleotide
cctgcactcaggcgcagacgggg

SEQ ID NO: 663 - DNA, 23 bp, synthetic construct
  source 1..23: mol_type = other DNA; note = Description of Artificial Sequence: Synthetic oligonucleotide
gctgcaccttggcacagtggagg

SEQ ID NO: 664 - DNA, 23 bp, synthetic construct
  source 1..23: mol_type = other DNA; note = Description of Artificial Sequence: Synthetic oligonucleotide
cccacacccaggcccagaggagg

SEQ ID NO: 665 - DNA, 21 bp, synthetic construct
  source 1..21: mol_type = other DNA; note = Description of Artificial Sequence: Synthetic oligonucleotide
cctgcacctgcacagcagggg

SEQ ID NO: 666 - DNA, 22 bp, synthetic construct
  source 1..22: mol_type = other DNA; note = Description of Artificial Sequence: Synthetic oligonucleotide
ctcgcacctggtgcagcaccgg

SEQ ID NO: 667 - DNA, 21 bp, synthetic construct
  source 1..21: mol_type = other DNA; note = Description of Artificial Sequence: Synthetic oligonucleotide
gccgcacaggcacagcggcgg

SEQ ID NO: 668 - DNA, 23 bp, synthetic construct
  source 1..23: mol_type = other DNA; note = Description of Artificial Sequence: Synthetic oligonucleotide
tcagcaccttggcacatccaggg

SEQ ID NO: 669 - DNA, 23 bp, synthetic construct
  source 1..23: mol_type = other DNA; note = Description of Artificial Sequence: Synthetic oligonucleotide
cctgcacctttgcacagcactgg

SEQ ID NO: 670 - DNA, 22 bp, synthetic construct
  source 1..22: mol_type = other DNA; note = Description of Artificial Sequence: Synthetic oligonucleotide
cccgcatgtggcgcagcagtgt

SEQ ID NO: 671 - DNA, 23 bp, synthetic construct
  source 1..23: mol_type = other DNA; note = Description of Artificial Sequence: Synthetic oligonucleotide
cccagcacttggtgaagcggagg

SEQ ID NO: 672 - DNA, 21 bp, synthetic construct
  source 1..21: mol_type = other DNA; note = Description of Artificial Sequence: Synthetic oligonucleotide
cccacactggtgcagaggtgg

SEQ ID NO: 673 - DNA, 23 bp, synthetic construct
  source 1..23: mol_type = other DNA; note = Description of Artificial Sequence: Synthetic oligonucleotide
cctgcaccatggtgcaccggcag

SEQ ID NO: 674 - DNA, 21 bp, synthetic construct
  source 1..21: mol_type = other DNA; note = Description of Artificial Sequence: Synthetic oligonucleotide
cccgcacagccgcagaggagg

SEQ ID NO: 675 - DNA, 22 bp, synthetic construct
  source 1..22: mol_type = other DNA; note = Description of Artificial Sequence: Synthetic oligonucleotide
accgcacctggcacagcttggg

SEQ ID NO: 676 - DNA, 23 bp, synthetic construct
  source 1..23: mol_type = other DNA; note = Description of Artificial Sequence: Synthetic oligonucleotide
cccacaccctggcccagcctcgg

SEQ ID NO: 677 - DNA, 23 bp, synthetic construct
  source 1..23: mol_type = other DNA; note = Description of Artificial Sequence: Synthetic oligonucleotide
ccagcactttggtacagcatagg

SEQ ID NO: 678 - DNA, 23 bp, synthetic construct
  source 1..23: mol_type = other DNA; note = Description of Artificial Sequence: Synthetic oligonucleotide
cccgcaccctggctcagtgttgg

SEQ ID NO: 679 - DNA, 21 bp, synthetic construct
  source 1..21: mol_type = other DNA; note = Description of Artificial Sequence: Synthetic oligonucleotide
cccgcacaggcgcagaggtgg

SEQ ID NO: 680 - DNA, 22 bp, synthetic construct
  source 1..22: mol_type = other DNA; note = Description of Artificial Sequence: Synthetic oligonucleotide
ccagcacctggtccagtggagg

SEQ ID NO: 681 - DNA, 22 bp, synthetic construct
  source 1..22: mol_type = other DNA; note = Description of Artificial Sequence: Synthetic oligonucleotide
ccagcacctggcacagagtagg

SEQ ID NO: 682 - DNA, 23 bp, synthetic construct
  source 1..23: mol_type = other DNA; note = Description of Artificial Sequence: Synthetic oligonucleotide
cagataccataaaaatcatctgg

SEQ ID NO: 683 - DNA, 22 bp, synthetic construct
  source 1..22: mol_type = other DNA; note = Description of Artificial Sequence: Synthetic oligonucleotide
aagatactgaaaaaccctgcaa

SEQ ID NO: 684 - DNA, 23 bp, synthetic construct
  source 1..23: mol_type = other DNA; note = Description of Artificial Sequence: Synthetic oligonucleotide
cagagagcagagtaaacctctgg

SEQ ID NO: 685 - DNA, 21 bp, synthetic construct
  source 1..21: mol_type = other DNA; note = Description of Artificial Sequence: Synthetic oligonucleotide
cagaaaactataaccctcagg

SEQ ID NO: 686 - DNA, 23 bp, synthetic construct
  source 1..23: mol_type = other DNA; note = Description of Artificial Sequence: Synthetic oligonucleotide
agaatggctgcataacccttggg

SEQ ID NO: 687 - DNA, 23 bp, synthetic construct
  source 1..23: mol_type = other DNA; note = Description of Artificial Sequence: Synthetic oligonucleotide
aaggttacttaataaacatctgg

SEQ ID NO: 688 - DNA, 24 bp, synthetic construct
  source 1..24: mol_type = other DNA; note = Description of Artificial Sequence: Synthetic oligonucleotide
aagatacctgaattaaatctcaaa

SEQ ID NO: 689 - DNA, 23 bp, synthetic construct
  source 1..23: mol_type = other DNA; note = Description of Artificial Sequence: Synthetic oligonucleotide
aagtatcttgaataaccctcctg

SEQ ID NO: 690 - DNA, 23 bp, synthetic construct
  source 1..23: mol_type = other DNA; note = Description of Artificial Sequence: Synthetic oligonucleotide
caaataactaaatgaccctcttg

SEQ ID NO: 691 - DNA, 22 bp, synthetic construct
  source 1..22: mol_type = other DNA; note = Description of Artificial Sequence: Synthetic oligonucleotide
aagatactgaaaaactctcttc

SEQ ID NO: 692 - DNA, 24 bp, synthetic construct
  source 1..24: mol_type = other DNA; note = Description of Artificial Sequence: Synthetic oligonucleotide
tagataacctgaatagccctatag

SEQ ID NO: 693 - DNA, 23 bp, synthetic construct
  source 1..23: mol_type = other DNA; note = Description of Artificial Sequence: Synthetic oligonucleotide
tagatacttcaatacctctcagt

SEQ ID NO: 694 - DNA, 23 bp, synthetic construct
  source 1..23: mol_type = other DNA; note = Description of Artificial Sequence: Synthetic oligonucleotide
agcaatcctgaaaaatcctctgg

SEQ ID NO: 695 - DNA, 23 bp, synthetic construct
  source 1..23: mol_type = other DNA; note = Description of Artificial Sequence: Synthetic oligonucleotide
acgatacttggataaccctctgg

SEQ ID NO: 696 - DNA, 22 bp, synthetic construct
  source 1..22: mol_type = other DNA; note = Description of Artificial Sequence: Synthetic oligonucleotide
gagatacctaataagcctctat

SEQ ID NO: 697 - DNA, 23 bp, synthetic construct
  source 1..23: mol_type = other DNA; note = Description of Artificial Sequence: Synthetic oligonucleotide
aagatacctgaataaccctctgg

SEQ ID NO: 698 - DNA, 22 bp, synthetic construct
  source 1..22: mol_type = other DNA; note = Description of Artificial Sequence: Synthetic oligonucleotide
aagttactgaatatctctcagc

SEQ ID NO: 699 - DNA, 23 bp, synthetic construct
  source 1..23: mol_type = other DNA; note = Description of Artificial Sequence: Synthetic oligonucleotide
agtatacctcaataaccacctgg

SEQ ID NO: 700 - DNA, 22 bp, synthetic construct
  source 1..22: mol_type = other DNA; note = Description of Artificial Sequence: Synthetic oligonucleotide
aagatccagaagaatcccctgg

SEQ ID NO: 701 - DNA, 23 bp, synthetic construct
  source 1..23: mol_type = other DNA; note = Description of Artificial Sequence: Synthetic oligonucleotide
aggatacctggaaaccctactgg

SEQ ID NO: 702 - DNA, 23 bp, synthetic construct
  source 1..23: mol_type = other DNA; note = Description of Artificial Sequence: Synthetic oligonucleotide
aagataactagctagctctctgg

SEQ ID NO: 703 - DNA, 23 bp, synthetic construct
  source 1..23: mol_type = other DNA; note = Description of Artificial Sequence: Synthetic oligonucleotide
gagatacttgaataaacttctat

SEQ ID NO: 704 - DNA, 23 bp, synthetic construct
  source 1..23: mol_type = other DNA; note = Description of Artificial Sequence: Synthetic oligonucleotide
aagatacctgactaacctgtttt

SEQ ID NO: 705 - DNA, 23 bp, synthetic construct
  source 1..23: mol_type = other DNA; note = Description of Artificial Sequence: Synthetic oligonucleotide
tagatacatgattaaaccactgc

SEQ ID NO: 706 - DNA, 21 bp, synthetic construct
  source 1..21: mol_type = other DNA; note = Description of Artificial Sequence: Synthetic oligonucleotide
tatatacatgaataactccgg

SEQ ID NO: 707 - DNA, 23 bp, synthetic construct
  source 1..23: mol_type = other DNA; note = Description of Artificial Sequence: Synthetic oligonucleotide
attattcttgaataaccccaggg

SEQ ID NO: 708 - DNA, 23 bp, synthetic construct
  source 1..23: mol_type = other DNA; note = Description of Artificial Sequence: Synthetic oligonucleotide
aagatacctgagaaactctgcaa

SEQ ID NO: 709 - DNA, 23 bp, synthetic construct
  source 1..23: mol_type = other DNA; note = Description of Artificial Sequence: Synthetic oligonucleotide
atgactgctgagaaaccctctgg

SEQ ID NO: 710 - DNA, 23 bp, synthetic construct
  source 1..23: mol_type = other DNA; note = Description of Artificial Sequence: Synthetic oligonucleotide
aagaatcctagatatccctcagt

SEQ ID NO: 711 - DNA, 23 bp, synthetic construct
  source 1..23: mol_type = other DNA; note = Description of Artificial Sequence: Synthetic oligonucleotide
aaaataccaaaaaaaccctatag

SEQ ID NO: 712 - DNA, 22 bp, synthetic construct
  source 1..22: mol_type = other DNA; note = Description of Artificial Sequence: Synthetic oligonucleotide
aagaatttgaataaccctcaat

SEQ ID NO: 713 - DNA, 23 bp, synthetic construct
  source 1..23: mol_type = other DNA; note = Description of Artificial Sequence: Synthetic oligonucleotide
aggctaacagaatcaccctcggg

SEQ ID NO: 714 - DNA, 22 bp, synthetic construct
  source 1..22: mol_type = other DNA; note = Description of Artificial Sequence: Synthetic oligonucleotide
gtgatcctgagtaaacctcagg

SEQ ID NO: 715 - DNA, 21 bp, synthetic construct
  source 1..21: mol_type = other DNA; note = Description of Artificial Sequence: Synthetic oligonucleotide
tagatacctataagcctctgg

SEQ ID NO: 716 - DNA, 23 bp, synthetic construct
  source 1..23: mol_type = other DNA; note = Description of Artificial Sequence: Synthetic oligonucleotide
aagatacatgaaaaaaacattgg

SEQ ID NO: 717 - DNA, 23 bp, synthetic construct
  source 1..23: mol_type = other DNA; note = Description of Artificial Sequence: Synthetic oligonucleotide
aagataccttaaaacccttcagc

SEQ ID NO: 718 - DNA, 23 bp, synthetic construct
  source 1..23: mol_type = other DNA; note = Description of Artificial Sequence: Synthetic oligonucleotide
aatttacctgaatagtcattagg

SEQ ID NO: 719 - DNA, 23 bp, synthetic construct
  source 1..23: mol_type = other DNA; note = Description of Artificial Sequence: Synthetic oligonucleotide
aagatacacaaatagccatcaag

SEQ ID NO: 720 - DNA, 23 bp, synthetic construct
  source 1..23: mol_type = other DNA; note = Description of Artificial Sequence: Synthetic oligonucleotide
aacaaacctgaatagtcctactg

SEQ ID NO: 721 - DNA, 23 bp, synthetic construct
  source 1..23: mol_type = other DNA; note = Description of Artificial Sequence: Synthetic oligonucleotide
cagatatctgaatcactcttctg

SEQ ID NO: 722 - DNA, 21 bp, synthetic construct
  source 1..21: mol_type = other DNA; note = Description of Artificial Sequence: Synthetic oligonucleotide
aaaatatgaataaccctttgg

SEQ ID NO: 723 - DNA, 22 bp, synthetic construct
  source 1..22: mol_type = other DNA; note = Description of Artificial Sequence: Synthetic oligonucleotide
cagatactgagtcaccctcagc

SEQ ID NO: 724 - DNA, 22 bp, synthetic construct
  source 1..22: mol_type = other DNA; note = Description of Artificial Sequence: Synthetic oligonucleotide
aagtacctaaatacccttgggg

SEQ ID NO: 725 - DNA, 23 bp, synthetic construct
  source 1..23: mol_type = other DNA; note = Description of Artificial Sequence: Synthetic oligonucleotide
aagataccattctaaccctctga

SEQ ID NO: 726 - DNA, 23 bp, synthetic construct
  source 1..23: mol_type = other DNA; note = Description of Artificial Sequence: Synthetic oligonucleotide
aaggtaactaagaaaccctcaga

SEQ ID NO: 727 - DNA, 23 bp, synthetic construct
  source 1..23: mol_type = other DNA; note = Description of Artificial Sequence: Synthetic oligonucleotide
ctcataccacaataaccctcatg

SEQ ID NO: 728 - DNA, 22 bp, synthetic construct
  source 1..22: mol_type = other DNA; note = Description of Artificial Sequence: Synthetic oligonucleotide
aagataatgaatatcacccagg

SEQ ID NO: 729 - DNA, 22 bp, synthetic construct
  source 1..22: mol_type = other DNA; note = Description of Artificial Sequence: Synthetic oligonucleotide
aagatactaataaacactcagg

SEQ ID NO: 730 - DNA, 23 bp, synthetic construct
  source 1..23: mol_type = other DNA; note = Description of Artificial Sequence: Synthetic oligonucleotide
cagatacctgaataagcagaagc

SEQ ID NO: 731 - DNA, 22 bp, synthetic construct
  source 1..22: mol_type = other DNA; note = Description of Artificial Sequence: Synthetic oligonucleotide
ataatacctgaatactctcaga

SEQ ID NO: 732 - DNA, 23 bp, synthetic construct
  source 1..23: mol_type = other DNA; note = Description of Artificial Sequence: Synthetic oligonucleotide
tctatacctgcataaccctaagg

SEQ ID NO: 733 - DNA, 23 bp, synthetic construct
  source 1..23: mol_type = other DNA; note = Description of Artificial Sequence: Synthetic oligonucleotide
aagttaccaggaggaccctcagg

SEQ ID NO: 734 - DNA, 23 bp, synthetic construct
  source 1..23: mol_type = other DNA; note = Description of Artificial Sequence: Synthetic oligonucleotide
aagagaccggaatgcccccttgg

SEQ ID NO: 735 - DNA, 23 bp, synthetic construct
  source 1..23: mol_type = other DNA; note = Description of Artificial Sequence: Synthetic oligonucleotide
aacaggccataagaaccctctgg

SEQ ID NO: 736 - DNA, 23 bp, synthetic construct
  source 1..23: mol_type = other DNA; note = Description of Artificial Sequence: Synthetic oligonucleotide
taaatgccaggataagcctctgg

SEQ ID NO: 737 - DNA, 23 bp, synthetic construct
  source 1..23: mol_type = other DNA; note = Description of Artificial Sequence: Synthetic oligonucleotide
tacataactgaataactctccaa

SEQ ID NO: 738 - DNA, 22 bp, synthetic construct
  source 1..22: mol_type = other DNA; note = Description of Artificial Sequence: Synthetic oligonucleotide
aagaaagctgagtaagcccggg

SEQ ID NO: 739 - DNA, 23 bp, synthetic construct
  source 1..23: mol_type = other DNA; note = Description of Artificial Sequence: Synthetic oligonucleotide
gggatacccgaataaccccacag

SEQ ID NO: 740 - DNA, 22 bp, synthetic construct
  source 1..22: mol_type = other DNA; note = Description of Artificial Sequence: Synthetic oligonucleotide
gagacacctgggtaaccccagg

SEQ ID NO: 741 - DNA, 23 bp, synthetic construct
  source 1..23: mol_type = other DNA; note = Description of Artificial Sequence: Synthetic oligonucleotide
gttatacctgaataaatctgggg

SEQ ID NO: 742 - DNA, 23 bp, synthetic construct
  source 1..23: mol_type = other DNA; note = Description of Artificial Sequence: Synthetic oligonucleotide
aaaatacctgcataaccctgaga

SEQ ID NO: 743 - DNA, 23 bp, synthetic construct
  source 1..23: mol_type = other DNA; note = Description of Artificial Sequence: Synthetic oligonucleotide
cagttccctgagtcaccctcagt

SEQ ID NO: 744 - DNA, 23 bp, synthetic construct
  source 1..23: mol_type = other DNA; note = Description of Artificial Sequence: Synthetic oligonucleotide
aagatacatgaacttcccacagg

SEQ ID NO: 745 - DNA, 23 bp, synthetic construct
  source 1..23: mol_type = other DNA; note = Description of Artificial Sequence: Synthetic oligonucleotide
aaaataagtgaataacccactaa

SEQ ID NO: 746 - DNA, 23 bp, synthetic construct
  source 1..23: mol_type = other DNA; note = Description of Artificial Sequence: Synthetic oligonucleotide
taggtacctgagtaactctgcgg

SEQ ID NO: 747 - DNA, 22 bp, synthetic construct
  source 1..22: mol_type = other DNA; note = Description of Artificial Sequence: Synthetic oligonucleotide
aagaaaccagataacccacagc

SEQ ID NO: 748 - DNA, 22 bp, synthetic construct
  source 1..22: mol_type = other DNA; note = Description of Artificial Sequence: Synthetic oligonucleotide
aagatacctgcataatctagga

SEQ ID NO: 749 - DNA, 23 bp, synthetic construct
  source 1..23: mol_type = other DNA; note = Description of Artificial Sequence: Synthetic oligonucleotide
aggatacctgcgtaactcgcagc

SEQ ID NO: 750 - DNA, 23 bp, synthetic construct
  source 1..23: mol_type = other DNA; note = Description of Artificial Sequence: Synthetic oligonucleotide
aagatacctggagatgccccttg

SEQ ID NO: 751 - DNA, 23 bp, synthetic construct
  source 1..23: mol_type = other DNA; note = Description of Artificial Sequence: Synthetic oligonucleotide
aagatatcagaataactctggct

SEQ ID NO: 752 - DNA, 23 bp, synthetic construct
  source 1..23: mol_type = other DNA; note = Description of Artificial Sequence: Synthetic oligonucleotide
cctgtacctgcataaccttctgg

SEQ ID NO: 753 - DNA, 23 bp, synthetic construct
  source 1..23: mol_type = other DNA; note = Description of Artificial Sequence: Synthetic oligonucleotide
aagatacctaaaaagcccccagc

SEQ ID NO: 754 - DNA, 24 bp, synthetic construct
  source 1..24: mol_type = other DNA; note = Description of Artificial Sequence: Synthetic oligonucleotide
tagatacccaaatagcccctcagg

SEQ ID NO: 755 - DNA, 23 bp, synthetic construct
  source 1..23: mol_type = other DNA; note = Description of Artificial Sequence: Synthetic oligonucleotide
tctatacctaaatagtcctcagg

SEQ ID NO: 756 - DNA, 23 bp, synthetic construct
  source 1..23: mol_type = other DNA; note = Description of Artificial Sequence: Synthetic oligonucleotide
aaaataccagaataacccattta

SEQ ID NO: 757 - DNA, 23 bp, synthetic construct
  source 1..23: mol_type = other DNA; note = Description of Artificial Sequence: Synthetic oligonucleotide
aagatatctgaataaactccaaa

SEQ ID NO: 758 - DNA, 23 bp, synthetic construct
  source 1..23: mol_type = other DNA; note = Description of Artificial Sequence: Synthetic oligonucleotide
atgattattaaataaccctcaag

SEQ ID NO: 759 - DNA, 23 bp, synthetic construct
  source 1..23: mol_type = other DNA; note = Description of Artificial Sequence: Synthetic oligonucleotide
aagatccctgattaccattccag

SEQ ID NO: 760 - DNA, 23 bp, synthetic construct
  source 1..23: mol_type = other DNA; note = Description of Artificial Sequence: Synthetic oligonucleotide
aagatacctggctcaacctcatc

SEQ ID NO: 761 - DNA, 23 bp, synthetic construct
  source 1..23: mol_type = other DNA; note = Description of Artificial Sequence: Synthetic oligonucleotide
aatgtggctgaaaaagcctctgg

SEQ ID NO: 762 - DNA, 23 bp, synthetic construct
  source 1..23: mol_type = other DNA; note = Description of Artificial Sequence: Synthetic oligonucleotide
aagatacctaaacattccagtgg

SEQ ID NO: 763 - DNA, 23 bp, synthetic construct
  source 1..23: mol_type = other DNA; note = Description of Artificial Sequence: Synthetic oligonucleotide
aagagagctggacaactctaagg

SEQ ID NO: 764 - DNA, 23 bp, synthetic construct
  source 1..23: mol_type = other DNA; note = Description of Artificial Sequence: Synthetic oligonucleotide
aagataggtcaataaccacccgg

SEQ ID NO: 765 - DNA, 24 bp, synthetic construct
  source 1..24: mol_type = other DNA; note = Description of Artificial Sequence: Synthetic oligonucleotide
tagataactgaataaactctatgg

SEQ ID NO: 766 - DNA, 23 bp, synthetic construct
  source 1..23: mol_type = other DNA; note = Description of Artificial Sequence: Synthetic oligonucleotide
aagatgtattattgaccctctgg

SEQ ID NO: 767 - DNA, 23 bp, synthetic construct
  source 1..23: mol_type = other DNA; note = Description of Artificial Sequence: Synthetic oligonucleotide
tagaaaacagaatgactctcagg

SEQ ID NO: 768 - DNA, 22 bp, synthetic construct
  source 1..22: mol_type = other DNA; note = Description of Artificial Sequence: Synthetic oligonucleotide
aataaccaaaataaccctccag

SEQ ID NO: 769 - DNA, 22 bp, synthetic construct
  source 1..22: mol_type = other DNA; note = Description of Artificial Sequence: Synthetic oligonucleotide
tatgtacctaataagcctcagg

SEQ ID NO: 770 - DNA, 23 bp, synthetic construct
  source 1..23: mol_type = other DNA; note = Description of Artificial Sequence: Synthetic oligonucleotide
catatatctgaatagccttctgg

SEQ ID NO: 771 - DNA, 22 bp, synthetic construct
  source 1..22: mol_type = other DNA; note = Description of Artificial Sequence: Synthetic oligonucleotide
aagatacagaattcccctctga

SEQ ID NO: 772 - DNA, 22 bp, synthetic construct
  source 1..22: mol_type = other DNA; note = Description of Artificial Sequence: Synthetic oligonucleotide
aagttacatgaaaaacatctgg

SEQ ID NO: 773 - DNA, 23 bp, synthetic construct
  source 1..23: mol_type = other DNA; note = Description of Artificial Sequence: Synthetic oligonucleotide
aaaatacctgaataatcctcgaa

SEQ ID NO: 774 - DNA, 23 bp, synthetic construct
  source 1..23: mol_type = other DNA; note = Description of Artificial Sequence: Synthetic oligonucleotide
aagataccagagaaagtctcaga

SEQ ID NO: 775 - DNA, 23 bp, synthetic construct
  source 1..23: mol_type = other DNA; note = Description of Artificial Sequence: Synthetic oligonucleotide
caaataccagaataccctacagg

SEQ ID NO: 776 - DNA, 22 bp, synthetic construct
  source 1..22: mol_type = other DNA; note = Description of Artificial Sequence: Synthetic oligonucleotide
atgatcctaaataaccttccag

SEQ ID NO: 777 - DNA, 22 bp, synthetic construct
  source 1..22: mol_type = other DNA; note = Description of Artificial Sequence: Synthetic oligonucleotide
aacaacatgaatgactctctgg

SEQ ID NO: 778 - DNA, 23 bp, synthetic construct
  source 1..23: mol_type = other DNA; note = Description of Artificial Sequence: Synthetic oligonucleotide
aagataaaggtatctccctctgg

SEQ ID NO: 779 - DNA, 23 bp, synthetic construct
  source 1..23: mol_type = other DNA; note = Description of Artificial Sequence: Synthetic oligonucleotide
aagccaactgaataacactgttg

SEQ ID NO: 780 - DNA, 23 bp, synthetic construct
  source 1..23: mol_type = other DNA; note = Description of Artificial Sequence: Synthetic oligonucleotide
atgatacctgaatacctctaatg

SEQ ID NO: 781 - DNA, 23 bp, synthetic construct
  source 1..23: mol_type = other DNA; note = Description of Artificial Sequence: Synthetic oligonucleotide
aagccaactgaagagcccttggg

SEQ ID NO: 782 - DNA, 22 bp, synthetic construct
  source 1..22: mol_type = other DNA; note = Description of Artificial Sequence: Synthetic oligonucleotide
aagaacttgataaaccctcaag

SEQ ID NO: 783 - DNA, 23 bp, synthetic construct
  source 1..23: mol_type = other DNA; note = Description of Artificial Sequence: Synthetic oligonucleotide
ttgacacctaaataaccctttgg

SEQ ID NO: 784 - DNA, 23 bp, synthetic construct
  source 1..23: mol_type = other DNA; note = Description of Artificial Sequence: Synthetic oligonucleotide
aagagaccagaagcaacctctgt

SEQ ID NO: 785 - DNA, 24 bp, synthetic construct
  source 1..24: mol_type = other DNA; note = Description of Artificial Sequence: Synthetic oligonucleotide
aagaaacatgaacagagcctcagg

SEQ ID NO: 786 - DNA, 23 bp, synthetic construct
  source 1..23: mol_type = other DNA; note = Description of Artificial Sequence: Synthetic oligonucleotide
gagatacctgtataagtcactag

SEQ ID NO: 787 - DNA, 23 bp, synthetic construct
  source 1..23: mol_type = other DNA; note = Description of Artificial Sequence: Synthetic oligonucleotide
aaaatgccttaagaaccctgggg

SEQ ID NO: 788 - DNA, 22 bp, synthetic construct
  source 1..22: mol_type = other DNA; note = Description of Artificial Sequence: Synthetic oligonucleotide
tagatactcagtaaccctcttg

SEQ ID NO: 789 - DNA, 23 bp, synthetic construct
  source 1..23: mol_type = other DNA; note = Description of Artificial Sequence: Synthetic oligonucleotide
aagagacaggaataaccctcagc

SEQ ID NO: 790 - DNA, 24 bp, synthetic construct
  source 1..24: mol_type = other DNA; note = Description of Artificial Sequence: Synthetic oligonucleotide
aaaataccatgtaaaacactctgg

SEQ ID NO: 791 - DNA, 22 bp, synthetic construct
  source 1..22: mol_type = other DNA; note = Description of Artificial Sequence: Synthetic oligonucleotide
gagatacagaatagccctgggg

SEQ ID NO: 792 - DNA, 22 bp, synthetic construct
  source 1..22: mol_type = other DNA; note = Description of Artificial Sequence: Synthetic oligonucleotide
aagaacctaaatcaccattggg

SEQ ID NO: 793 - DNA, 23 bp, synthetic construct
  source 1..23: mol_type = other DNA; note = Description of Artificial Sequence: Synthetic oligonucleotide
aagatatctggataatccaccaa

SEQ ID NO: 794 - DNA, 23 bp, synthetic construct
  source 1..23: mol_type = other DNA; note = Description of Artificial Sequence: Synthetic oligonucleotide
aagatactggaataaacataaag

SEQ ID NO: 795 - DNA, 23 bp, synthetic construct
  source 1..23: mol_type = other DNA; note = Description of Artificial Sequence: Synthetic oligonucleotide
aaaatgcctcaatatctctgtgg

SEQ ID NO: 796 - DNA, 23 bp, synthetic construct
  source 1..23: mol_type = other DNA; note = Description of Artificial Sequence: Synthetic oligonucleotide
aaaataccaaaataaccctaaag

SEQ ID NO: 797 - DNA, 23 bp, synthetic construct
  source 1..23: mol_type = other DNA; note = Description of Artificial Sequence: Synthetic oligonucleotide
tagatacctgaaatactctatgc

SEQ ID NO: 798 - DNA, 23 bp, synthetic construct
  source 1..23: mol_type = other DNA; note = Description of Artificial Sequence: Synthetic oligonucleotide
aaaataccataatttccctcaga

SEQ ID NO: 799 - DNA, 22 bp, synthetic construct
  source 1..22: mol_type = other DNA; note = Description of Artificial Sequence: Synthetic oligonucleotide
aagataccaaataaacctctga

SEQ ID NO: 800 - DNA, 23 bp, synthetic construct
  source 1..23: mol_type = other DNA; note = Description of Artificial Sequence: Synthetic oligonucleotide
aagatacctaaaatacctattgg

SEQ ID NO: 801 - DNA, 23 bp, synthetic construct
  source 1..23: mol_type = other DNA; note = Description of Artificial Sequence: Synthetic oligonucleotide
cagatacctgaaaaactctctct

SEQ ID NO: 802 - DNA, 24 bp, synthetic construct
  source 1..24: mol_type = other DNA; note = Description of Artificial Sequence: Synthetic oligonucleotide
aataaacactgaataaccctttgt

SEQ ID NO: 803 - DNA, 22 bp, synthetic construct
  source 1..22: mol_type = other DNA; note = Description of Artificial Sequence: Synthetic oligonucleotide
cagctacctaattaccctctgg

SEQ ID NO: 804 - DNA, 23 bp, synthetic construct
  source 1..23: mol_type = other DNA; note = Description of Artificial Sequence: Synthetic oligonucleotide
taggtacctgatttaccctgatg

SEQ ID NO: 805 - DNA, 23 bp, synthetic construct
  source 1..23: mol_type = other DNA; note = Description of Artificial Sequence: Synthetic oligonucleotide
aagatacctcaggaaccagcagc

SEQ ID NO: 806 - DNA, 23 bp, synthetic construct
  source 1..23: mol_type = other DNA; note = Description of Artificial Sequence: Synthetic oligonucleotide
aaaagacctaaaaagccctctgg

SEQ ID NO: 807 - DNA, 23 bp, synthetic construct
  source 1..23: mol_type = other DNA; note = Description of Artificial Sequence: Synthetic oligonucleotide
tcaattactgaataaccctcttg

SEQ ID NO: 808 - DNA, 23 bp, synthetic construct
  source 1..23: mol_type = other DNA; note = Description of Artificial Sequence: Synthetic oligonucleotide
aatatacatgaataaatctcaca

SEQ ID NO: 809 - DNA, 23 bp, synthetic construct
  source 1..23: mol_type = other DNA; note = Description of Artificial Sequence: Synthetic oligonucleotide
aaaaaacgtgaaaaaccttaggg

SEQ ID NO: 810 - DNA, 22 bp, synthetic construct
  source 1..22: mol_type = other DNA; note = Description of Artificial Sequence: Synthetic oligonucleotide
aagatacctgttagccctcacc

SEQ ID NO: 811 - DNA, 23 bp, synthetic construct
  source 1..23: mol_type = other DNA; note = Description of Artificial Sequence: Synthetic oligonucleotide
aagtttcatgcataaaactctgg

SEQ ID NO: 812 - DNA, 23 bp, synthetic construct
  source 1..23: mol_type = other DNA; note = Description of Artificial Sequence: Synthetic oligonucleotide
aaggtacctgaagaactcaactg

SEQ ID NO: 813 - DNA, 23 bp, synthetic construct
  source 1..23: mol_type = other DNA; note = Description of Artificial Sequence: Synthetic oligonucleotide
aagatgtatgaataactctcggg

SEQ ID NO: 814 - DNA, 23 bp, synthetic construct
  source 1..23: mol_type = other DNA; note = Description of Artificial Sequence: Synthetic oligonucleotide
aagcaacctaaatgtccatcagg

SEQ ID NO: 815 - DNA, 23 bp, synthetic construct
  source 1..23: mol_type = other DNA; note = Description of Artificial Sequence: Synthetic oligonucleotide
gagatacctggataaccacttgg

SEQ ID NO: 816 - DNA, 23 bp, synthetic construct
  source 1..23: mol_type = other DNA; note = Description of Artificial Sequence: Synthetic oligonucleotide
aagacacctggagaactctcggg

SEQ ID NO: 817 - DNA, 22 bp, synthetic construct
  source 1..22: mol_type = other DNA; note = Description of Artificial Sequence: Synthetic oligonucleotide
aagtaacccaataaccctgagg

SEQ ID NO: 818 - DNA, 24 bp, synthetic construct
  source 1..24: mol_type = other DNA; note = Description of Artificial Sequence: Synthetic oligonucleotide
acaatacgtgaatgaatcctctgg

SEQ ID NO: 819 - DNA, 23 bp, synthetic construct
  source 1..23: mol_type = other DNA; note = Description of Artificial Sequence: Synthetic oligonucleotide
aagattccagacatacactctgg

SEQ ID NO: 820 - DNA, 23 bp, synthetic construct
  source 1..23: mol_type = other DNA; note = Description of Artificial Sequence: Synthetic oligonucleotide
taagtagctgtataaccctgggg

SEQ ID NO: 821 - DNA, 23 bp, synthetic construct
  source 1..23: mol_type = other DNA; note = Description of Artificial Sequence: Synthetic oligonucleotide
taaatacttgaaaaacccacaga

SEQ ID NO: 822 - DNA, 23 bp, synthetic construct
  source 1..23: mol_type = other DNA; note = Description of Artificial Sequence: Synthetic oligonucleotide
aagttatctgactaacaatctgt

SEQ ID NO: 823 - DNA, 23 bp, synthetic construct
  source 1..23: mol_type = other DNA; note = Description of Artificial Sequence: Synthetic oligonucleotide
aatatacatgaatttctcttagg

SEQ ID NO: 824 - DNA, 23 bp, synthetic construct
  source 1..23: mol_type = other DNA; note = Description of Artificial Sequence: Synthetic oligonucleotide
aagatgcctccctaacactgggg

SEQ ID NO: 825 - DNA, 21 bp, synthetic construct
  source 1..21: mol_type = other DNA; note = Description of Artificial Sequence: Synthetic oligonucleotide
tacataccaacaaccctctgg

SEQ ID NO: 826 - DNA, 23 bp, synthetic construct
  source 1..23: mol_type = other DNA; note = Description of Artificial Sequence: Synthetic oligonucleotide
aatagagctgaaaaaccctcact

SEQ ID NO: 827 - DNA, 23 bp, synthetic construct
  source 1..23: mol_type = other DNA; note = Description of Artificial Sequence: Synthetic oligonucleotide
aaattagatgaataacccttagt

SEQ ID NO: 828 - DNA, 21 bp, synthetic construct
  source 1..21: mol_type = other DNA; note = Description of Artificial Sequence: Synthetic oligonucleotide
aaaatacctgataccccctgg

SEQ ID NO: 829 - DNA, 21 bp, synthetic construct
  source 1..21: mol_type = other DNA; note = Description of Artificial Sequence: Synthetic oligonucleotide
agagtacctgaatacctctgg

SEQ ID NO: 830 - DNA, 23 bp, synthetic construct
  source 1..23: mol_type = other DNA; note = Description of Artificial Sequence: Synthetic oligonucleotide
agaatatctgaattaccctcaag

SEQ ID NO: 831 - DNA, 22 bp, synthetic construct
  source 1..22: mol_type = other DNA; note = Description of Artificial Sequence: Synthetic oligonucleotide
aagatacatgagtaaacccagc

SEQ ID NO: 832 - DNA, 23 bp, synthetic construct
  source 1..23: mol_type = other DNA; note = Description of Artificial Sequence: Synthetic oligonucleotide
aggagacctgcacaggcctctgg

SEQ ID NO: 833 - DNA, 23 bp, synthetic construct
  source 1..23: mol_type = other DNA; note = Description of Artificial Sequence: Synthetic oligonucleotide
aatttatatgaaaaacccactgg

SEQ ID NO: 834 - DNA, 23 bp, synthetic construct
  source 1..23: mol_type = other DNA; note = Description of Artificial Sequence: Synthetic oligonucleotide
aagatacctgatcaatcctcttc

SEQ ID NO: 835 - DNA, 23 bp, synthetic construct
  source 1..23: mol_type = other DNA; note = Description of Artificial Sequence: Synthetic oligonucleotide
aagataccagaccaaagctcagg

SEQ ID NO: 836 - DNA, 23 bp, synthetic construct
  source 1..23: mol_type = other DNA; note = Description of Artificial Sequence: Synthetic oligonucleotide
tagagacatgaaaaaccctccaa

SEQ ID NO: 837 - DNA, 21 bp, synthetic construct
  source 1..21: mol_type = other DNA; note = Description of Artificial Sequence: Synthetic oligonucleotide
aatattcctgaatccctcggg

SEQ ID NO: 838 - DNA, 23 bp, synthetic construct
  source 1..23: mol_type = other DNA; note = Description of Artificial Sequence: Synthetic oligonucleotide
ctcatacctgaataaccttctca

SEQ ID NO: 839 - DNA, 24 bp, synthetic construct
  source 1..24: mol_type = other DNA; note = Description of Artificial Sequence: Synthetic oligonucleotide
cagataccgagaaaaaccctctgg

SEQ ID NO: 840 - DNA, 23 bp, synthetic construct
  source 1..23: mol_type = other DNA; note = Description of Artificial Sequence: Synthetic oligonucleotide
aagatatatgaaaaagcctatgc

SEQ ID NO: 841 - DNA, 23 bp, synthetic construct
  source 1..23: mol_type = other DNA; note = Description of Artificial Sequence: Synthetic oligonucleotide
cagatacctcaccaacactccag

SEQ ID NO: 842 - DNA, 23 bp, synthetic construct
  source 1..23: mol_type = other DNA; note = Description of Artificial Sequence: Synthetic oligonucleotide
cagagacctgaaaagccctgccg

SEQ ID NO: 843 - DNA, 23 bp, synthetic construct
  source 1..23: mol_type = other DNA; note = Description of Artificial Sequence: Synthetic oligonucleotide
aaaaggcctgcagaaacctctgg

SEQ ID NO: 844 - DNA, 23 bp, synthetic construct
  source 1..23: mol_type = other DNA; note = Description of Artificial Sequence: Synthetic oligonucleotide
caaatccttgaatcacccccagg

SEQ ID NO: 845 - DNA, 23 bp, synthetic construct
  source 1..23: mol_type = other DNA; note = Description of Artificial Sequence: Synthetic oligonucleotide
aagatacctggccacaccccagg

SEQ ID NO: 846 - DNA, 22 bp, synthetic construct
  source 1..22: mol_type = other DNA; note = Description of Artificial Sequence: Synthetic oligonucleotide
gagataatgaatagccctccgg

SEQ ID NO: 847 - DNA, 22 bp, synthetic construct
  source 1..22: mol_type = other DNA; note = Description of Artificial Sequence: Synthetic oligonucleotide
aagatacctgtcatccctccgt

SEQ ID NO: 848 - DNA, 23 bp, synthetic construct
  source 1..23: mol_type = other DNA; note = Description of Artificial Sequence: Synthetic oligonucleotide
gggatacctgcataactctcagg

SEQ ID NO: 849 - DNA, 23 bp, synthetic construct
  source 1..23: mol_type = other DNA; note = Description of Artificial Sequence: Synthetic oligonucleotide
gaaatgcctgaatcacactcgag

SEQ ID NO: 850 - DNA, 22 bp, synthetic construct
  source 1..22: mol_type = other DNA; note = Description of Artificial Sequence: Synthetic oligonucleotide
aagatactgaatcaacttcagt

SEQ ID NO: 851 - DNA, 22 bp, synthetic construct
  source 1..22: mol_type = other DNA; note = Description of Artificial Sequence: Synthetic oligonucleotide
aagataccagtacacccccagg

SEQ ID NO: 852 - DNA, 23 bp, synthetic construct
  source 1..23: mol_type = other DNA; note = Description of Artificial Sequence: Synthetic oligonucleotide
atgatacctcaataaccctattt

SEQ ID NO: 853 - DNA, 23 bp, synthetic construct
  source 1..23: mol_type = other DNA; note = Description of Artificial Sequence: Synthetic oligonucleotide
aaaatacctgaacataccttgag

SEQ ID NO: 854 - DNA, 23 bp, synthetic construct
  source 1..23: mol_type = other DNA; note = Description of Artificial Sequence: Synthetic oligonucleotide
tacatacctaacaacccctcagg

SEQ ID NO: 855 - DNA, 23 bp, synthetic construct
  source 1..23: mol_type = other DNA; note = Description of Artificial Sequence: Synthetic oligonucleotide
aagaaacaagggaaaccctcagg

SEQ ID NO: 856 - DNA, 23 bp, synthetic construct
  source 1..23: mol_type = other DNA; note = Description of Artificial Sequence: Synthetic oligonucleotide
aagataccaggatggctctctgc

SEQ ID NO: 857 - DNA, 23 bp, synthetic construct
  source 1..23: mol_type = other DNA; note = Description of Artificial Sequence: Synthetic oligonucleotide
caacaaccagaataacccacagg

SEQ ID NO: 858 - DNA, 24 bp, synthetic construct
  source 1..24: mol_type = other DNA; note = Description of Artificial Sequence: Synthetic oligonucleotide
aagattaaaagaataaacctcagg

SEQ ID NO: 859 - DNA, 23 bp, synthetic construct
  source 1..23: mol_type = other DNA; note = Description of Artificial Sequence: Synthetic oligonucleotide
aacttacctgcaaaaccatctgg

SEQ ID NO: 860 - DNA, 21 bp, synthetic construct
  source 1..21: mol_type = other DNA; note = Description of Artificial Sequence: Synthetic oligonucleotide
aagatctgaattaccatcagt

SEQ ID NO: 861 - DNA, 22 bp, synthetic construct
  source 1..22: mol_type = other DNA; note = Description of Artificial Sequence: Synthetic oligonucleotide
gagatccttaacaaccctcaag

SEQ ID NO: 862 - DNA, 23 bp, synthetic construct
  source 1..23: mol_type = other DNA; note = Description of Artificial Sequence: Synthetic oligonucleotide
aagatatctgagccacactctcg

SEQ ID NO: 863 - DNA, 22 bp, synthetic construct
  source 1..22: mol_type = other DNA; note = Description of Artificial Sequence: Synthetic oligonucleotide
aagctacctgaaaaccttcagg

SEQ ID NO: 864 - DNA, 23 bp, synthetic construct
  source 1..23: mol_type = other DNA; note = Description of Artificial Sequence: Synthetic oligonucleotide
aagatgactgaagaaaccttggg

SEQ ID NO: 865 - DNA, 23 bp, synthetic construct
  source 1..23: mol_type = other DNA; note = Description of Artificial Sequence: Synthetic oligonucleotide
aagatccctgcaaacccttttgg

SEQ ID NO: 866 - DNA, 23 bp, synthetic construct
  source 1..23: mol_type = other DNA; note = Description of Artificial Sequence: Synthetic oligonucleotide
aagacagctaaatcaccccacgg

SEQ ID NO: 867 - DNA, 23 bp, synthetic construct
  source 1..23: mol_type = other DNA; note = Description of Artificial Sequence: Synthetic oligonucleotide
aagatcacagaatcaccctcctc

SEQ ID NO: 868 - DNA, 23 bp, synthetic construct
  source 1..23: mol_type = other DNA; note = Description of Artificial Sequence: Synthetic oligonucleotide
aatagacatgaataaccctaaga

SEQ ID NO: 869 - DNA, 23 bp, synthetic construct
  source 1..23: mol_type = other DNA; note = Description of Artificial Sequence: Synthetic oligonucleotide
cagacaccttactaactctcctg

SEQ ID NO: 870 - DNA, 23 bp, synthetic construct
  source 1..23: mol_type = other DNA; note = Description of Artificial Sequence: Synthetic oligonucleotide
aagatacacaaataaacttctag

SEQ ID NO: 871 - DNA, 23 bp, synthetic construct
  source 1..23: mol_type = other DNA; note = Description of Artificial Sequence: Synthetic oligonucleotide
aagatatctgaaaaactctcaaa

SEQ ID NO: 872 - DNA, 22 bp, synthetic construct
  source 1..22: mol_type = other DNA; note = Description of Artificial Sequence: Synthetic oligonucleotide
aagacactgaataacccacaga

SEQ ID NO: 873 - DNA, 22 bp, synthetic construct
  source 1..22: mol_type = other DNA; note = Description of Artificial Sequence: Synthetic oligonucleotide
tagatagcaaataaccctaggg

SEQ ID NO: 874 - DNA, 22 bp, synthetic construct
  source 1..22: mol_type = other DNA; note = Description of Artificial Sequence: Synthetic oligonucleotide
aatagacctaaataacctcaag

SEQ ID NO: 875 - DNA, 23 bp, synthetic construct
  source 1..23: mol_type = other DNA; note = Description of Artificial Sequence: Synthetic oligonucleotide
aagttacctgactaaccctgagg

SEQ ID NO: 876 - DNA, 23 bp, synthetic construct
  source 1..23: mol_type = other DNA; note = Description of Artificial Sequence: Synthetic oligonucleotide
aagatatctgaataactacaagg

SEQ ID NO: 877 - DNA, 23 bp, synthetic construct
  source 1..23: mol_type = other DNA; note = Description of Artificial Sequence: Synthetic oligonucleotide
aagatacttggataactctgcta

SEQ ID NO: 878 - DNA, 23 bp, synthetic construct
  source 1..23: mol_type = other DNA; note = Description of Artificial Sequence: Synthetic oligonucleotide
aagaggctggaataagccacggg

SEQ ID NO: 879 - DNA, 23 bp, synthetic construct
  source 1..23: mol_type = other DNA; note = Description of Artificial Sequence: Synthetic oligonucleotide
aagatacataaatatcactgcag

SEQ ID NO: 880 - DNA, 23 bp, synthetic construct
  source 1..23: mol_type = other DNA; note = Description of Artificial Sequence: Synthetic oligonucleotide
cactaacctgaatagccctaagg

SEQ ID NO: 881 - DNA, 23 bp, synthetic construct
  source 1..23: mol_type = other DNA; note = Description of Artificial Sequence: Synthetic oligonucleotide
aatatacctgaaaaaccatcagg

SEQ ID NO: 882 - DNA, 23 bp, synthetic construct
  source 1..23: mol_type = other DNA; note = Description of Artificial Sequence: Synthetic oligonucleotide
aaaatacctaaagaaatttcagg

SEQ ID NO: 883 - DNA, 23 bp, synthetic construct
  source 1..23: mol_type = other DNA; note = Description of Artificial Sequence: Synthetic oligonucleotide
cgtgtacctgaaaaagcctcagg

SEQ ID NO: 884 - DNA, 23 bp, synthetic construct
  source 1..23: mol_type = other DNA; note = Description of Artificial Sequence: Synthetic oligonucleotide
gtgaggcctgaagaacactctgg

SEQ ID NO: 885 - DNA, 22 bp, synthetic construct
  source 1..22: mol_type = other DNA; note = Description of Artificial Sequence: Synthetic oligonucleotide
aagttactgaatatccctccag

SEQ ID NO: 886 - DNA, 23 bp, synthetic construct
  source 1..23: mol_type = other DNA; note = Description of Artificial Sequence: Synthetic oligonucleotide
aagaaaccggaatgagcccccag

SEQ ID NO: 887 - DNA, 23 bp, synthetic construct
  source 1..23: mol_type = other DNA; note = Description of Artificial Sequence: Synthetic oligonucleotide
cagataccagaagcaccctcgag

SEQ ID NO: 888 - DNA, 24 bp, synthetic construct
  source 1..24: mol_type = other DNA; note = Description of Artificial Sequence: Synthetic oligonucleotide
tagataactgaaatatccctctgg

SEQ ID NO: 889 - DNA, 23 bp, synthetic construct
  source 1..23: mol_type = other DNA; note = Description of Artificial Sequence: Synthetic oligonucleotide
gagatacccaaataaacctcaaa

SEQ ID NO: 890 - DNA, 22 bp, synthetic construct
  source 1..22: mol_type = other DNA; note = Description of Artificial Sequence: Synthetic oligonucleotide
aagatactgaataaagctctta

SEQ ID NO: 891 - DNA, 23 bp, synthetic construct
  source 1..23: mol_type = other DNA; note = Description of Artificial Sequence: Synthetic oligonucleotide
aagataactgaagaaactgaagg

SEQ ID NO: 892 - DNA, 23 bp, synthetic construct
  source 1..23: mol_type = other DNA; note = Description of Artificial Sequence: Synthetic oligonucleotide
aagataccagggtaactctatga

SEQ ID NO: 893 - DNA, 23 bp, synthetic construct
  source 1..23: mol_type = other DNA; note = Description of Artificial Sequence: Synthetic oligonucleotide
aagatacctgaatatccaaccta

SEQ ID NO: 894 - DNA, 23 bp, synthetic construct
  source 1..23: mol_type = other DNA; note = Description of Artificial Sequence: Synthetic oligonucleotide
aagctgactgaagagcccttggg

SEQ ID NO: 895 - DNA, 23 bp, synthetic construct
  source 1..23: mol_type = other DNA; note = Description of Artificial Sequence: Synthetic oligonucleotide
agtatttctgacaaaccctcagg

SEQ ID NO: 896 - DNA, 22 bp, synthetic construct
  source 1..22: mol_type = other DNA; note = Description of Artificial Sequence: Synthetic oligonucleotide
gagatagctaataaccccctgg

SEQ ID NO: 897 - DNA, 23 bp, synthetic construct
  source 1..23: mol_type = other DNA; note = Description of Artificial Sequence: Synthetic oligonucleotide
aagacaactgaaaaacgctgtgg

SEQ ID NO: 898 - DNA, 23 bp, synthetic construct
  source 1..23: mol_type = other DNA; note = Description of Artificial Sequence: Synthetic oligonucleotide
aagacacctgaataatctctgga

SEQ ID NO: 899 - DNA, 23 bp, synthetic construct
  source 1..23: mol_type = other DNA; note = Description of Artificial Sequence: Synthetic oligonucleotide
atgataagtgaataagtctcatg

SEQ ID NO: 900 - DNA, 23 bp, synthetic construct
  source 1..23: mol_type = other DNA; note = Description of Artificial Sequence: Synthetic oligonucleotide
aggatatatgaaaaagcctgcgg

SEQ ID NO: 901 - DNA, 22 bp, synthetic construct
  source 1..22: mol_type = other DNA; note = Description of Artificial Sequence: Synthetic oligonucleotide
aagataccctaaaagcctttgg

SEQ ID NO: 902 - DNA, 23 bp, synthetic construct
  source 1..23: mol_type = other DNA; note = Description of Artificial Sequence: Synthetic oligonucleotide
aagatgcatgaataacctctgga

SEQ ID NO: 903 - DNA, 23 bp, synthetic construct
  source 1..23: mol_type = other DNA; note = Description of Artificial Sequence: Synthetic oligonucleotide
atgacaccagaaagaccctaagg

SEQ ID NO: 904 - DNA, 22 bp, synthetic construct
  source 1..22: mol_type = other DNA; note = Description of Artificial Sequence: Synthetic oligonucleotide
aaaatactaaataaccccatgg

SEQ ID NO: 905 - DNA, 23 bp, synthetic construct
  source 1..23: mol_type = other DNA; note = Description of Artificial Sequence: Synthetic oligonucleotide
cagattcctggaagaccctcaag

SEQ ID NO: 906 - DNA, 23 bp, synthetic construct
  source 1..23: mol_type = other DNA; note = Description of Artificial Sequence: Synthetic oligonucleotide
aagagacctcaaggtctctctgg

SEQ ID NO: 907 - DNA, 23 bp, synthetic construct
  source 1..23: mol_type = other DNA; note = Description of Artificial Sequence: Synthetic oligonucleotide
aagactaaagaataaccctctgg

SEQ ID NO: 908 - DNA, 23 bp, synthetic construct
  source 1..23: mol_type = other DNA; note = Description of Artificial Sequence: Synthetic oligonucleotide
aatatgcctacattacactcagg

SEQ ID NO: 909 - DNA, 22 bp, synthetic construct
  source 1..22: mol_type = other DNA; note = Description of Artificial Sequence: Synthetic oligonucleotide
aagacactgaataacccttggc

SEQ ID NO: 910 - DNA, 22 bp, synthetic construct
  source 1..22: mol_type = other DNA; note = Description of Artificial Sequence: Synthetic oligonucleotide
aagatagtgagtaagtctcagg

SEQ ID NO: 911 - DNA, 21 bp, synthetic construct
  source 1..21: mol_type = other DNA; note = Description of Artificial Sequence: Synthetic oligonucleotide
tagataagaatagccctcagg

SEQ ID NO: 912 - DNA, 23 bp, synthetic construct
  source 1..23: mol_type = other DNA; note = Description of Artificial Sequence: Synthetic oligonucleotide
tctatacctcaataacctcctgg

SEQ ID NO: 913 - DNA, 23 bp, synthetic construct
  source 1..23: mol_type = other DNA; note = Description of Artificial Sequence: Synthetic oligonucleotide
aagatacctaagtgctccacagg

SEQ ID NO: 914 - DNA, 24 bp, synthetic construct
  source 1..24: mol_type = other DNA; note = Description of Artificial Sequence: Synthetic oligonucleotide
aagaaacctacaataaccttcatg

SEQ ID NO: 915 - DNA, 23 bp, synthetic construct
  source 1..23: mol_type = other DNA; note = Description of Artificial Sequence: Synthetic oligonucleotide
ccgatatcagaatatcccttagg

SEQ ID NO: 916 - DNA, 23 bp, synthetic construct
  source 1..23: mol_type = other DNA; note = Description of Artificial Sequence: Synthetic oligonucleotide
aagatgcatgaaaaagcttcagt

SEQ ID NO: 917 - DNA, 23 bp, synthetic construct
  source 1..23: mol_type = other DNA; note = Description of Artificial Sequence: Synthetic oligonucleotide
tagatatctgcagaactctccgc

SEQ ID NO: 918 - DNA, 23 bp, synthetic construct
  source 1..23: mol_type = other DNA; note = Description of Artificial Sequence: Synthetic oligonucleotide
aacatacatcaataactttcttg

SEQ ID NO: 919 - DNA, 23 bp, synthetic construct
  source 1..23: mol_type = other DNA; note = Description of Artificial Sequence: Synthetic oligonucleotide
aagatacttgaataccaatcaag

SEQ ID NO: 920 - DNA, 22 bp, synthetic construct
  source 1..22: mol_type = other DNA; note = Description of Artificial Sequence: Synthetic oligonucleotide
taaagacctgaataacctcaag

SEQ ID NO: 921 - DNA, 22 bp, synthetic construct
  source 1..22: mol_type = other DNA; note = Description of Artificial Sequence: Synthetic oligonucleotide
aagatattgaatatacctcagg

SEQ ID NO: 922 - DNA, 23 bp, synthetic construct
  source 1..23: mol_type = other DNA; note = Description of Artificial Sequence: Synthetic oligonucleotide
tagttacctgaatacacctctgg

SEQ ID NO: 923 - DNA, 23 bp, synthetic construct
  source 1..23: mol_type = other DNA; note = Description of Artificial Sequence: Synthetic oligonucleotide
tatatacctggaaaaccctaaag

SEQ ID NO: 924 - DNA, 22 bp, synthetic construct
  source 1..22: mol_type = other DNA; note = Description of Artificial Sequence: Synthetic oligonucleotide
tagatacataataaccaactgg

SEQ ID NO: 925 - DNA, 21 bp, synthetic construct
  source 1..21: mol_type = other DNA; note = Description of Artificial Sequence: Synthetic oligonucleotide
gagatacttgaatccctcagg

SEQ ID NO: 926 - DNA, 23 bp, synthetic construct
  source 1..23: mol_type = other DNA; note = Description of Artificial Sequence: Synthetic oligonucleotide
aagatacctgtatgacactgtgt

SEQ ID NO: 927 - DNA, 23 bp, synthetic construct
  source 1..23: mol_type = other DNA; note = Description of Artificial Sequence: Synthetic oligonucleotide
aagatacctaaataacaagctgg

SEQ ID NO: 928 - DNA, 23 bp, synthetic construct
  source 1..23: mol_type = other DNA; note = Description of Artificial Sequence: Synthetic oligonucleotide
aggatacatgcataacccatgag

SEQ ID NO: 929 - DNA, 22 bp, synthetic construct
  source 1..22: mol_type = other DNA; note = Description of Artificial Sequence: Synthetic oligonucleotide
aagatccagaataattctctgg

SEQ ID NO: 930 - DNA, 23 bp, synthetic construct
  source 1..23: mol_type = other DNA; note = Description of Artificial Sequence: Synthetic oligonucleotide
aagatacatgaaaaattctctca

SEQ ID NO: 931 - DNA, 23 bp, synthetic construct
  source 1..23: mol_type = other DNA; note = Description of Artificial Sequence: Synthetic oligonucleotide
aatataccctaataagccttctg

SEQ ID NO: 932 - DNA, 25 bp, synthetic construct
  source 1..25: mol_type = other DNA; note = Description of Artificial Sequence: Synthetic oligonucleotide
aagatggctgaatagaaccttccag

SEQ ID NO: 933 - DNA, 23 bp, synthetic construct
  source 1..23: mol_type = other DNA; note = Description of Artificial Sequence: Synthetic oligonucleotide
aatataccttattatccttcaga

SEQ ID NO: 934 - DNA, 23 bp, synthetic construct
  source 1..23: mol_type = other DNA; note = Description of Artificial Sequence: Synthetic oligonucleotide
cagatacaagagtactcctcagg

SEQ ID NO: 935 - DNA, 23 bp, synthetic construct
  source 1..23: mol_type = other DNA; note = Description of Artificial Sequence: Synthetic oligonucleotide
tctatacctaaataaacctaagg

SEQ ID NO: 936 - DNA, 23 bp, synthetic construct
  source 1..23: mol_type = other DNA; note = Description of Artificial Sequence: Synthetic oligonucleotide
tagatacctcaataattctctct

SEQ ID NO: 937 - DNA, 23 bp, synthetic construct
  source 1..23: mol_type = other DNA; note = Description of Artificial Sequence: Synthetic oligonucleotide
aaataacataaataaccctcaga

SEQ ID NO: 938 - DNA, 22 bp, synthetic construct
  source 1..22: mol_type = other DNA; note = Description of Artificial Sequence: Synthetic oligonucleotide
cagaagctggatagccctcggg

SEQ ID NO: 939 - DNA, 22 bp, synthetic construct
  source 1..22: mol_type = other DNA; note = Description of Artificial Sequence: Synthetic oligonucleotide
aagaacatgagtaaccctaagg

SEQ ID NO: 940 - DNA, 23 bp, synthetic construct
  source 1..23: mol_type = other DNA; note = Description of Artificial Sequence: Synthetic oligonucleotide
aagatacttgaaaaacaccaggt

SEQ ID NO: 941 - DNA, 22 bp, synthetic construct
  source 1..22: mol_type = other DNA; note = Description of Artificial Sequence: Synthetic oligonucleotide
aagagaactgaaaagcctcaag

SEQ ID NO: 942 - DNA, 22 bp, synthetic construct
  source 1..22: mol_type = other DNA; note = Description of Artificial Sequence: Synthetic oligonucleotide
aagataccaaataactctctgg

SEQ ID NO: 943 - DNA, 21 bp, synthetic construct
  source 1..21: mol_type = other DNA; note = Description of Artificial Sequence: Synthetic oligonucleotide
aatatgcctgtaaccctcaag

SEQ ID NO: 944 - DNA, 23 bp, synthetic construct
  source 1..23: mol_type = other DNA; note = Description of Artificial Sequence: Synthetic oligonucleotide
aagctgactgaagagcccttagg

SEQ ID NO: 945 - DNA, 23 bp, synthetic construct
  source 1..23: mol_type = other DNA; note = Description of Artificial Sequence: Synthetic oligonucleotide
aaaattcatgaagaaccctgggt

SEQ ID NO: 946 - DNA, 23 bp, synthetic construct
  source 1..23: mol_type = other DNA; note = Description of Artificial Sequence: Synthetic oligonucleotide
aagatacgtgaataactcaggat

SEQ ID NO: 947 - DNA, 23 bp, synthetic construct
  source 1..23: mol_type = other DNA; note = Description of Artificial Sequence: Synthetic oligonucleotide
aagatatctgaacaattctaagg

SEQ ID NO: 948 - DNA, 23 bp, synthetic construct
  source 1..23: mol_type = other DNA; note = Description of Artificial Sequence: Synthetic oligonucleotide
aagatacttgaatcactgtcagt

SEQ ID NO: 949 - DNA, 22 bp, synthetic construct
  source 1..22: mol_type = other DNA; note = Description of Artificial Sequence: Synthetic oligonucleotide
aagatcctgaataattctctgg

SEQ ID NO: 950 - DNA, 23 bp, synthetic construct
  source 1..23: mol_type = other DNA; note = Description of Artificial Sequence: Synthetic oligonucleotide
aagaagcctggatagaactctgg

SEQ ID NO: 951 - DNA, 23 bp, synthetic construct
  source 1..23: mol_type = other DNA; note = Description of Artificial Sequence: Synthetic oligonucleotide
ttgatacctgaataacactccag

SEQ ID NO: 952 - DNA, 23 bp, synthetic construct
  source 1..23: mol_type = other DNA; note = Description of Artificial Sequence: Synthetic oligonucleotide
aaaaaaaatgaattaccctcatg

SEQ ID NO: 953 - DNA, 22 bp, synthetic construct
  source 1..22: mol_type = other DNA; note = Description of Artificial Sequence: Synthetic oligonucleotide
gagatccagaattacccttggg

SEQ ID NO: 954 - DNA, 23 bp, synthetic construct
  source 1..23: mol_type = other DNA; note = Description of Artificial Sequence: Synthetic oligonucleotide
aacatacctaaataactcctggc

SEQ ID NO: 955 - DNA, 22 bp, synthetic construct
  source 1..22: mol_type = other DNA; note = Description of Artificial Sequence: Synthetic oligonucleotide
aatctacctgatgaccctcggc

SEQ ID NO: 956 - DNA, 25 bp, synthetic construct
  source 1..25: mol_type = other DNA; note = Description of Artificial Sequence: Synthetic oligonucleotide
aagttaactgtaaaacagcctcagg

SEQ ID NO: 957 - DNA, 22 bp, synthetic construct
  source 1..22: mol_type = other DNA; note = Description of Artificial Sequence: Synthetic oligonucleotide
aagaaatctgaaagccctgggg

SEQ ID NO: 958 - DNA, 23 bp, synthetic construct
  source 1..23: mol_type = other DNA; note = Description of Artificial Sequence: Synthetic oligonucleotide
gagatacctgcataacacttaat

SEQ ID NO: 959 - DNA, 23 bp, synthetic construct
  source 1..23: mol_type = other DNA; note = Description of Artificial Sequence: Synthetic oligonucleotide
cagataactgaacaaccagatgg

SEQ ID NO: 960 - DNA, 23 bp, synthetic construct
  source 1..23: mol_type = other DNA; note = Description of Artificial Sequence: Synthetic oligonucleotide
aacttaggtgattaaccctcacg

SEQ ID NO: 961 - DNA, 22 bp, synthetic construct
  source 1..22: mol_type = other DNA; note = Description of Artificial Sequence: Synthetic oligonucleotide
atgatactgaataagtctcagg

SEQ ID NO: 962 - DNA, 22 bp, synthetic construct
  source 1..22: mol_type = other DNA; note = Description of Artificial Sequence: Synthetic oligonucleotide
agaatacctagtgaccctcagg

SEQ ID NO: 963 - DNA, 23 bp, synthetic construct
  source 1..23: mol_type = other DNA; note = Description of Artificial Sequence: Synthetic oligonucleotide
aacagaccttcatagccctcaga

SEQ ID NO: 964 - DNA, 22 bp, synthetic construct
  source 1..22: mol_type = other DNA; note = Description of Artificial Sequence: Synthetic oligonucleotide
tatatacctaaataacctaggg

SEQ ID NO: 965 - DNA, 23 bp, synthetic construct
  source 1..23: mol_type = other DNA; note = Description of Artificial Sequence: Synthetic oligonucleotide
aagatctctgaaatgccctgagg

SEQ ID NO: 966 - DNA, 23 bp, synthetic construct
  source 1..23: mol_type = other DNA; note = Description of Artificial Sequence: Synthetic oligonucleotide
aacttaacataataaccttcagg

SEQ ID NO: 967 - DNA, 22 bp, synthetic construct
  source 1..22: mol_type = other DNA; note = Description of Artificial Sequence: Synthetic oligonucleotide
atgatagtgaataatcctcatg

SEQ ID NO: 968 - DNA, 23 bp, synthetic construct
  source 1..23: mol_type = other DNA; note = Description of Artificial Sequence: Synthetic oligonucleotide
aagatacgagaataacctcaaga

SEQ ID NO: 969 - DNA, 23 bp, synthetic construct
  source 1..23: mol_type = other DNA; note = Description of Artificial Sequence: Synthetic oligonucleotide
aaactacctggatgaccctctga

SEQ ID NO: 970 - DNA, 22 bp, synthetic construct
  source 1..22: mol_type = other DNA; note = Description of Artificial Sequence: Synthetic oligonucleotide
aagaagatgaattactctctgg

SEQ ID NO: 971 - DNA, 22 bp, synthetic construct
  source 1..22: mol_type = other DNA; note = Description of Artificial Sequence: Synthetic oligonucleotide
aagatacagagtaactcttggg

SEQ ID NO: 972 - DNA, 23 bp, synthetic construct
  source 1..23: mol_type = other DNA; note = Description of Artificial Sequence: Synthetic oligonucleotide
gagatagctgaataatccctcag

SEQ ID NO: 973 - DNA, 23 bp, synthetic construct
  source 1..23: mol_type = other DNA; note = Description of Artificial Sequence: Synthetic oligonucleotide
aagatacatcagtaagccacagt

SEQ ID NO: 974 - DNA, 23 bp, synthetic construct
  source 1..23: mol_type = other DNA; note = Description of Artificial Sequence: Synthetic oligonucleotide
aaaatacattaataaaactaagg

SEQ ID NO: 975 - DNA, 23 bp, synthetic construct
  source 1..23: mol_type = other DNA; note = Description of Artificial Sequence: Synthetic oligonucleotide
agtagaggtgaataaccctcagc

SEQ ID NO: 976 - DNA, 23 bp, synthetic construct
  source 1..23: mol_type = other DNA; note = Description of Artificial Sequence: Synthetic oligonucleotide
cagatacttaaataaccataagg

SEQ ID NO: 977 - DNA, 22 bp, synthetic construct
  source 1..22: mol_type = other DNA; note = Description of Artificial Sequence: Synthetic oligonucleotide
aagaacctgacaagccctcaga

SEQ ID NO: 978 - DNA, 23 bp, synthetic construct
  source 1..23: mol_type = other DNA; note = Description of Artificial Sequence: Synthetic oligonucleotide
aagatccatcaataaaccacgtg

SEQ ID NO: 979 - DNA, 23 bp, synthetic construct
  source 1..23: mol_type = other DNA; note = Description of Artificial Sequence: Synthetic oligonucleotide
aagatacttttaaaacccagtgg

SEQ ID NO: 980 - DNA, 22 bp, synthetic construct
  source 1..22: mol_type = other DNA; note = Description of Artificial Sequence: Synthetic oligonucleotide
aagatcctgaattactctcaag

SEQ ID NO: 981 - DNA, 23 bp, synthetic construct
  source 1..23: mol_type = other DNA; note = Description of Artificial Sequence: Synthetic oligonucleotide
aagatacctgaacaactccacac

SEQ ID NO: 982 - DNA, 23 bp, synthetic construct
  source 1..23: mol_type = other DNA; note = Description of Artificial Sequence: Synthetic oligonucleotide
aagctgactgaagagccctaggg

SEQ ID NO: 983 - DNA, 23 bp, synthetic construct
  source 1..23: mol_type = other DNA; note = Description of Artificial Sequence: Synthetic oligonucleotide
ttgatacctgtattacactcatg

SEQ ID NO: 984 - DNA, 24 bp, synthetic construct
  source 1..24: mol_type = other DNA; note = Description of Artificial Sequence: Synthetic oligonucleotide
aagatacagagaataaccctcaca

SEQ ID NO: 985 - DNA, 23 bp, synthetic construct
  source 1..23: mol_type = other DNA; note = Description of Artificial Sequence: Synthetic oligonucleotide
aaaatacctcactagctctccag

SEQ ID NO: 986 - DNA, 23 bp, synthetic construct
  source 1..23: mol_type = other DNA; note = Description of Artificial Sequence: Synthetic oligonucleotide
aaaataattgaaaaactctctgt

SEQ ID NO: 987 - DNA, 23 bp, synthetic construct
  source 1..23: mol_type = other DNA; note = Description of Artificial Sequence: Synthetic oligonucleotide
ataagaacagaataaccttctgg

SEQ ID NO: 988 - DNA, 23 bp, synthetic construct
  source 1..23: mol_type = other DNA; note = Description of Artificial Sequence: Synthetic oligonucleotide
aagagtcatgcatagccctccag

SEQ ID NO: 989 - DNA, 22 bp, synthetic construct
  source 1..22: mol_type = other DNA; note = Description of Artificial Sequence: Synthetic oligonucleotide
aagatactgaataaactcctgc

SEQ ID NO: 990 - DNA, 23 bp, synthetic construct
  source 1..23: mol_type = other DNA; note = Description of Artificial Sequence: Synthetic oligonucleotide
aagaaacacaaataaccatcaga

SEQ ID NO: 991 - DNA, 22 bp, synthetic construct
  source 1..22: mol_type = other DNA; note = Description of Artificial Sequence: Synthetic oligonucleotide
gagatgctgaataactctctgg

SEQ ID NO: 992 - DNA, 22 bp, synthetic construct
  source 1..22: mol_type = other DNA; note = Description of Artificial Sequence: Synthetic oligonucleotide
aagatactgagtatctcacagg

SEQ ID NO: 993 - DNA, 25 bp, synthetic construct
  source 1..25: mol_type = other DNA; note = Description of Artificial Sequence: Synthetic oligonucleotide
aagacaccaagatagcaccctcggg

SEQ ID NO: 994 - DNA, 22 bp, synthetic construct
  source 1..22: mol_type = other DNA; note = Description of Artificial Sequence: Synthetic oligonucleotide
agtataccttaataccccctgg

SEQ ID NO: 995 - DNA, 22 bp, synthetic construct
  source 1..22: mol_type = other DNA; note = Description of Artificial Sequence: Synthetic oligonucleotide
attatacctaataaccctatgg

SEQ ID NO: 996 - DNA, 23 bp, synthetic construct
  source 1..23: mol_type = other DNA; note = Description of Artificial Sequence: Synthetic oligonucleotide
aatatagcccaatatccctcatg

SEQ ID NO: 997 - DNA, 23 bp, synthetic construct
  source 1..23: mol_type = other DNA; note = Description of Artificial Sequence: Synthetic oligonucleotide
cagatacctgaatgatccttttc

SEQ ID NO: 998 - DNA, 23 bp, synthetic construct
  source 1..23: mol_type = other DNA; note = Description of Artificial Sequence: Synthetic oligonucleotide
aagaaagctgagtagtcctcaga

SEQ ID NO: 999 - DNA, 23 bp, synthetic construct
  source 1..23: mol_type = other DNA; note = Description of Artificial Sequence: Synthetic oligonucleotide
aagggacaggaagaaccctgagg

SEQ ID NO: 1000 - DNA, 23 bp, synthetic construct
  source 1..23: mol_type = other DNA; note = Description of Artificial Sequence: Synthetic oligonucleotide
aagatagctgtataacctttatc

SEQ ID NO: 1001 - DNA, 24 bp, synthetic construct
  source 1..24: mol_type = other DNA; note = Description of Artificial Sequence: Synthetic oligonucleotide
aagttagcggaactcaccctcagg

SEQ ID NO: 1002 - DNA, 23 bp, synthetic construct
  source 1..23: mol_type = other DNA; note = Description of Artificial Sequence: Synthetic oligonucleotide
aagagagctagctagccctctgg

SEQ ID NO: 1003 - DNA, 23 bp, synthetic construct
  source 1..23: mol_type = other DNA; note = Description of Artificial Sequence: Synthetic oligonucleotide
aggatttctggataacactttgg

SEQ ID NO: 1004 - DNA, 23 bp, synthetic construct
  source 1..23: mol_type = other DNA; note = Description of Artificial Sequence: Synthetic oligonucleotide
gaagtacctgaaaaaccctctgc

SEQ ID NO: 1005 - DNA, 23 bp, synthetic construct
  source 1..23: mol_type = other DNA; note = Description of Artificial Sequence: Synthetic oligonucleotide
gaggtacttgaatcaccatcaag

SEQ ID NO: 1006 - DNA, 23 bp, synthetic construct
  source 1..23: mol_type = other DNA; note = Description of Artificial Sequence: Synthetic oligonucleotide
tagcttactgaataaccctaagg

SEQ ID NO: 1007 - DNA, 23 bp, synthetic construct
  source 1..23: mol_type = other DNA; note = Description of Artificial Sequence: Synthetic oligonucleotide
aagaggcatgaataaccctgttc

SEQ ID NO: 1008 - DNA, 21 bp, synthetic construct
  source 1..21: mol_type = other DNA; note = Description of Artificial Sequence: Synthetic oligonucleotide
cagttacgaataaccctcaga

SEQ ID NO: 1009 - DNA, 22 bp, synthetic construct
  source 1..22: mol_type = other DNA; note = Description of Artificial Sequence: Synthetic oligonucleotide
aagatactgaaaaaccctctga

SEQ ID NO: 1010 - DNA, 23 bp, synthetic construct
  source 1..23: mol_type = other DNA; note = Description of Artificial Sequence: Synthetic oligonucleotide
aacagacatgaagaaggctcagg

SEQ ID NO: 1011 - DNA, 23 bp, synthetic construct
  source 1..23: mol_type = other DNA; note = Description of Artificial Sequence: Synthetic oligonucleotide
accatacctgaaggaccatcttg

SEQ ID NO: 1012 - DNA, 22 bp, synthetic construct
  source 1..22: mol_type = other DNA; note = Description of Artificial Sequence: Synthetic oligonucleotide
aagagaccttaaaactctctgt

SEQ ID NO: 1013 - DNA, 23 bp, synthetic construct
  source 1..23: mol_type = other DNA; note = Description of Artificial Sequence: Synthetic oligonucleotide
acaagaccaaaataacccacagg

SEQ ID NO: 1014 - DNA, 23 bp, synthetic construct
  source 1..23: mol_type = other DNA; note = Description of Artificial Sequence: Synthetic oligonucleotide
acgatggcagaacaaacctcagg

SEQ ID NO: 1015 - DNA, 23 bp, synthetic construct
  source 1..23: mol_type = other DNA; note = Description of Artificial Sequence: Synthetic oligonucleotide
aagatacctcaaacaccagccgt

SEQ ID NO: 1016 - DNA, 23 bp, synthetic construct
  source 1..23: mol_type = other DNA; note = Description of Artificial Sequence: Synthetic oligonucleotide
aagacacctaaatatccctggga

SEQ ID NO: 1017 - DNA, 22 bp, synthetic construct
  source 1..22: mol_type = other DNA; note = Description of Artificial Sequence: Synthetic oligonucleotide
aagatactgactaatcatctgc

SEQ ID NO: 1018 - DNA, 23 bp, synthetic construct
  source 1..23: mol_type = other DNA; note = Description of Artificial Sequence: Synthetic oligonucleotide
tagacacctgagtcaccctctta

SEQ ID NO: 1019 - DNA, 22 bp, synthetic construct
  source 1..22: mol_type = other DNA; note = Description of Artificial Sequence: Synthetic oligonucleotide
gtgataccagattaacctctgg

SEQ ID NO: 1020 - DNA, 23 bp, synthetic construct
  source 1..23: mol_type = other DNA; note = Description of Artificial Sequence: Synthetic oligonucleotide
agagtaactgaataaccctacag

SEQ ID NO: 1021 - DNA, 23 bp, synthetic construct
  source 1..23: mol_type = other DNA; note = Description of Artificial Sequence: Synthetic oligonucleotide
tttgtaccagaataaccctcctg

SEQ ID NO: 1022 - DNA, 23 bp, synthetic construct
  source 1..23: mol_type = other DNA; note = Description of Artificial Sequence: Synthetic oligonucleotide
aaattaactgcataaccctgggt

SEQ ID NO: 1023 - DNA, 23 bp, synthetic construct
  source 1..23: mol_type = other DNA; note = Description of Artificial Sequence: Synthetic oligonucleotide
aaaaaacttgaattaccttctag

SEQ ID NO: 1024 - DNA, 23 bp, synthetic construct
  source 1..23: mol_type = other DNA; note = Description of Artificial Sequence: Synthetic oligonucleotide
ctgaaacctaaataatcccccgg

SEQ ID NO: 1025 - DNA, 23 bp, synthetic construct
  source 1..23: mol_type = other DNA; note = Description of Artificial Sequence: Synthetic oligonucleotide
aagacccaggaatcacactctgg

SEQ ID NO: 1026 - DNA, 22 bp, synthetic construct
  source 1..22: mol_type = other DNA; note = Description of Artificial Sequence: Synthetic oligonucleotide
agaagacctgaatacccccagg

SEQ ID NO: 1027 - DNA, 23 bp, synthetic construct
  source 1..23: mol_type = other DNA; note = Description of Artificial Sequence: Synthetic oligonucleotide
caaatacctaaagaactctcctg

SEQ ID NO: 1028 - DNA, 22 bp, synthetic construct
  source 1..22: mol_type = other DNA; note = Description of Artificial Sequence: Synthetic oligonucleotide
cctatacctaataaccttcagg

SEQ ID NO: 1029 - DNA, 23 bp, synthetic construct
  source 1..23: mol_type = other DNA; note = Description of Artificial Sequence: Synthetic oligonucleotide
aagatacctggaaaactcccaaa

SEQ ID NO: 1030 - DNA, 22 bp, synthetic construct
  source 1..22: mol_type = other DNA; note = Description of Artificial Sequence: Synthetic oligonucleotide
tagacacctaataatccccagg

SEQ ID NO: 1031 - DNA, 23 bp, synthetic construct
  source 1..23: mol_type = other DNA; note = Description of Artificial Sequence: Synthetic oligonucleotide
gtgatacctgtcagaccctcggg

SEQ ID NO: 1032 - DNA, 23 bp, synthetic construct
  source 1..23: mol_type = other DNA; note = Description of Artificial Sequence: Synthetic oligonucleotide
aagataccagaattcccctcttc

SEQ ID NO: 1033 - DNA, 23 bp, synthetic construct
  source 1..23: mol_type = other DNA; note = Description of Artificial Sequence: Synthetic oligonucleotide
aagatggctgagaaaaactcagg

SEQ ID NO: 1034 - DNA, 23 bp, synthetic construct
  source 1..23: mol_type = other DNA; note = Description of Artificial Sequence: Synthetic oligonucleotide
cgtgtaccagaatcaccctcagg

SEQ ID NO: 1035 - DNA, 22 bp, synthetic construct
  source 1..22: mol_type = other DNA; note = Description of Artificial Sequence: Synthetic oligonucleotide
aagaacttgtagaaccatcagg

SEQ ID NO: 1036 - DNA, 23 bp, synthetic construct
  source 1..23: mol_type = other DNA; note = Description of Artificial Sequence: Synthetic oligonucleotide
aagataccccatcacccctcccg

SEQ ID NO: 1037 - DNA, 24 bp, synthetic construct
  source 1..24: mol_type = other DNA; note = Description of Artificial Sequence: Synthetic oligonucleotide
aagatcagcagaagaaccttctgg

SEQ ID NO: 1038 - DNA, 23 bp, synthetic construct
  source 1..23: mol_type = other DNA; note = Description of Artificial Sequence: Synthetic oligonucleotide
agtatacctaaacaaacctcaga

SEQ ID NO: 1039 - DNA, 22 bp, synthetic construct
  source 1..22: mol_type = other DNA; note = Description of Artificial Sequence: Synthetic oligonucleotide
aagatcctgcatacccttctgt

SEQ ID NO: 1040 - DNA, 22 bp, synthetic construct
  source 1..22: mol_type = other DNA; note = Description of Artificial Sequence: Synthetic oligonucleotide
aagatccagattaaccctctag

SEQ ID NO: 1041 - DNA, 23 bp, synthetic construct
  source 1..23: mol_type = other DNA; note = Description of Artificial Sequence: Synthetic oligonucleotide
aacatccctgaagacccttgagg

SEQ ID NO: 1042 - DNA, 23 bp, synthetic construct
  source 1..23: mol_type = other DNA; note = Description of Artificial Sequence: Synthetic oligonucleotide
aagatacctgggtccccatttgg

SEQ ID NO: 1043 - DNA, 22 bp, synthetic construct
  source 1..22: mol_type = other DNA; note = Description of Artificial Sequence: Synthetic oligonucleotide
aagatccttaaataccctctgg

SEQ ID NO: 1044 - DNA, 23 bp, synthetic construct
  source 1..23: mol_type = other DNA; note = Description of Artificial Sequence: Synthetic oligonucleotide
aagataactaactcaccttcccg

SEQ ID NO: 1045 - DNA, 23 bp, synthetic construct
  source 1..23: mol_type = other DNA; note = Description of Artificial Sequence: Synthetic oligonucleotide
atgatatatgaacaaccctctgg

SEQ ID NO: 1046 - DNA, 23 bp, synthetic construct
  source 1..23: mol_type = other DNA; note = Description of Artificial Sequence: Synthetic oligonucleotide
aacatactcgaatacccctcaaa

SEQ ID NO: 1047 - DNA, 23 bp, synthetic construct
  source 1..23: mol_type = other DNA; note = Description of Artificial Sequence: Synthetic oligonucleotide
agcttacctgcttaaccctcagg

SEQ ID NO: 1048 - DNA, 23 bp, synthetic construct
  source 1..23: mol_type = other DNA; note = Description of Artificial Sequence: Synthetic oligonucleotide
aagataccaaaattccccaatgg

SEQ ID NO: 1049 - DNA, 23 bp, synthetic construct
  source 1..23: mol_type = other DNA; note = Description of Artificial Sequence: Synthetic oligonucleotide
acgatactggaataagcctttga

SEQ ID NO: 1050 - DNA, 22 bp, synthetic construct
  source 1..22: mol_type = other DNA; note = Description of Artificial Sequence: Synthetic oligonucleotide
cagtacctcaacaaccccctgg

SEQ ID NO: 1051 - DNA, 22 bp, synthetic construct
  source 1..22: mol_type = other DNA; note = Description of Artificial Sequence: Synthetic oligonucleotide
aatatcctgaataaacctctag

SEQ ID NO: 1052 - DNA, 23 bp, synthetic construct
  source 1..23: mol_type = other DNA; note = Description of Artificial Sequence: Synthetic oligonucleotide
aagacacctgataaaaactctgt

SEQ ID NO: 1053 - DNA, 22 bp, synthetic construct
  source 1..22: mol_type = other DNA; note = Description of Artificial Sequence: Synthetic oligonucleotide
aagatacagaataaacctaagg

SEQ ID NO: 1054 - DNA, 23 bp, synthetic construct
  source 1..23: mol_type = other DNA; note = Description of Artificial Sequence: Synthetic oligonucleotide
gagatacttgaacaactcactgg

SEQ ID NO: 1055 - DNA, 23 bp, synthetic construct
  source 1..23: mol_type = other DNA; note = Description of Artificial Sequence: Synthetic oligonucleotide
aagaaaccagagaaaccttcgag

SEQ ID NO: 1056 - DNA, 23 bp, synthetic construct
  source 1..23: mol_type = other DNA; note = Description of Artificial Sequence: Synthetic oligonucleotide
aaagtacctaaataaccaaccag

SEQ ID NO: 1057 - DNA, 22 bp, synthetic construct
  source 1..22: mol_type = other DNA; note = Description of Artificial Sequence: Synthetic oligonucleotide
aagaaggtgaataacacttagg

SEQ ID NO: 1058 - DNA, 23 bp, synthetic construct
  source 1..23: mol_type = other DNA; note = Description of Artificial Sequence: Synthetic oligonucleotide
aagatacctggctagccatatgc

SEQ ID NO: 1059 - DNA, 23 bp, synthetic construct
  source 1..23: mol_type = other DNA; note = Description of Artificial Sequence: Synthetic oligonucleotide
aagctaccagaggaacaatcagg

SEQ ID NO: 1060 - DNA, 22 bp, synthetic construct
  source 1..22: mol_type = other DNA; note = Description of Artificial Sequence: Synthetic oligonucleotide
catttactgaataaccctttgg

SEQ ID NO: 1061 - DNA, 23 bp, synthetic construct
  source 1..23: mol_type = other DNA; note = Description of Artificial Sequence: Synthetic oligonucleotide
gataaacatgaaggaccctcagg

SEQ ID NO: 1062 - DNA, 23 bp, synthetic construct
  source 1..23: mol_type = other DNA; note = Description of Artificial Sequence: Synthetic oligonucleotide
aacgtacctgaacaaccctcagg

SEQ ID NO: 1063 - DNA, 23 bp, synthetic construct
  source 1..23: mol_type = other DNA; note = Description of Artificial Sequence: Synthetic oligonucleotide
acactacctgaatgaccctcaag

SEQ ID NO: 1064 - DNA, 23 bp, synthetic construct
  source 1..23: mol_type = other DNA; note = Description of Artificial Sequence: Synthetic oligonucleotide
aatatacatgaaacacacttagg

SEQ ID NO: 1065 - DNA, 23 bp, synthetic construct
  source 1..23: mol_type = other DNA; note = Description of Artificial Sequence: Synthetic oligonucleotide
aagatacctaaatgtccatcaac

SEQ ID NO: 1066 - DNA, 21 bp, synthetic construct
  source 1..21: mol_type = other DNA; note = Description of Artificial Sequence: Synthetic oligonucleotide
cagatatgaataaacctctag

SEQ ID NO: 1067 - DNA, 23 bp, synthetic construct
  source 1..23: mol_type = other DNA; note = Description of Artificial Sequence: Synthetic oligonucleotide
aatagtactcaataaacctctgg

SEQ ID NO: 1068 - DNA, 23 bp, synthetic construct
  source 1..23: mol_type = other DNA; note = Description of Artificial Sequence: Synthetic oligonucleotide
agtatacatgaatagccctcagg

SEQ ID NO: 1069 - DNA, 23 bp, synthetic construct
  source 1..23: mol_type = other DNA; note = Description of Artificial Sequence: Synthetic oligonucleotide
ttgctacctgaataaccctcttg

SEQ ID NO: 1070 - DNA, 23 bp, synthetic construct
  source 1..23: mol_type = other DNA; note = Description of Artificial Sequence: Synthetic oligonucleotide
aagatatctgaggaagcgtcttg

SEQ ID NO: 1071 - DNA, 21 bp, synthetic construct
  source 1..21: mol_type = other DNA; note = Description of Artificial Sequence: Synthetic oligonucleotide
aagatacctgaaaccctctgg

SEQ ID NO: 1072 - DNA, 22 bp, synthetic construct
  source 1..22: mol_type = other DNA; note = Description of Artificial Sequence: Synthetic oligonucleotide
cagatattgaaaaaccctctgg

SEQ ID NO: 1073 - DNA, 23 bp, synthetic construct
  source 1..23: mol_type = other DNA; note = Description of Artificial Sequence: Synthetic oligonucleotide
aaggtatccaaataaccctttgg

SEQ ID NO: 1074 - DNA, 23 bp, synthetic construct
  source 1..23: mol_type = other DNA; note = Description of Artificial Sequence: Synthetic oligonucleotide
taaatacctgaacaactctaggg

SEQ ID NO: 1075 - DNA, 24 bp, synthetic construct
  source 1..24: mol_type = other DNA; note = Description of Artificial Sequence: Synthetic oligonucleotide
aagattacatgagtacccctcctg

SEQ ID NO: 1076 - DNA, 22 bp, synthetic construct
  source 1..22: mol_type = other DNA; note = Description of Artificial Sequence: Synthetic oligonucleotide
atgatagtgaataactctcttg

SEQ ID NO: 1077 - DNA, 23 bp, synthetic construct
  source 1..23: mol_type = other DNA; note = Description of Artificial Sequence: Synthetic oligonucleotide
aagatatctgaaaaatccacaaa

SEQ ID NO: 1078 - DNA, 22 bp, synthetic construct
  source 1..22: mol_type = other DNA; note = Description of Artificial Sequence: Synthetic oligonucleotide
aagatttcttataaccctctgg

SEQ ID NO: 1079 - DNA, 24 bp, synthetic construct
  source 1..24: mol_type = other DNA; note = Description of Artificial Sequence: Synthetic oligonucleotide
aagatactctgaataactttctgg

SEQ ID NO: 1080 - DNA, 23 bp, synthetic construct
  source 1..23: mol_type = other DNA; note = Description of Artificial Sequence: Synthetic oligonucleotide
aagtcatctgaataaccctcaag

SEQ ID NO: 1081 - DNA, 24 bp, synthetic construct
  source 1..24: mol_type = other DNA; note = Description of Artificial Sequence: Synthetic oligonucleotide
aagatacgtgcaataactatcaag

SEQ ID NO: 1082 - DNA, 23 bp, synthetic construct
  source 1..23: mol_type = other DNA; note = Description of Artificial Sequence: Synthetic oligonucleotide
aagatacattagtaacattttgg

SEQ ID NO: 1083 - DNA, 24 bp, synthetic construct
  source 1..24: mol_type = other DNA; note = Description of Artificial Sequence: Synthetic oligonucleotide
aagaaacacttaaaaaccatctgg

SEQ ID NO: 1084 - DNA, 23 bp, synthetic construct
  source 1..23: mol_type = other DNA; note = Description of Artificial Sequence: Synthetic oligonucleotide
tagatacctgtataaccaccacc

SEQ ID NO: 1085 - DNA, 23 bp, synthetic construct
  source 1..23: mol_type = other DNA; note = Description of Artificial Sequence: Synthetic oligonucleotide
aacttacctgaacatgcccctgg

SEQ ID NO: 1086 - DNA, 23 bp, synthetic construct
  source 1..23: mol_type = other DNA; note = Description of Artificial Sequence: Synthetic oligonucleotide
tagatacatggattaacttctgg

SEQ ID NO: 1087 - DNA, 23 bp, synthetic construct
  source 1..23: mol_type = other DNA; note = Description of Artificial Sequence: Synthetic oligonucleotide
aagacagcagtaaaacactctgg

SEQ ID NO: 1088 - DNA, 22 bp, synthetic construct
  source 1..22: mol_type = other DNA; note = Description of Artificial Sequence: Synthetic oligonucleotide
aagatctggaagaactctctgg

SEQ ID NO: 1089 - DNA, 23 bp, synthetic construct
  source 1..23: mol_type = other DNA; note = Description of Artificial Sequence: Synthetic oligonucleotide
aagaaaggtgagcaacactcggg

SEQ ID NO: 1090 - DNA, 23 bp, synthetic construct
  source 1..23: mol_type = other DNA; note = Description of Artificial Sequence: Synthetic oligonucleotide
aagatactttaaaaaacccctgc

SEQ ID NO: 1091 - DNA, 23 bp, synthetic construct
  source 1..23: mol_type = other DNA; note = Description of Artificial Sequence: Synthetic oligonucleotide
aatatacctagctaagcctcaga

SEQ ID NO: 1092 - DNA, 24 bp, synthetic construct
  source 1..24: mol_type = other DNA; note = Description of Artificial Sequence: Synthetic oligonucleotide
aagatagcctgagtcacactcttg

SEQ ID NO: 1093 - DNA, 23 bp, synthetic construct
  source 1..23: mol_type = other DNA; note = Description of Artificial Sequence: Synthetic oligonucleotide
aagaaaacagcgtaagcctcagg

SEQ ID NO: 1094 - DNA, 23 bp, synthetic construct
  source 1..23: mol_type = other DNA; note = Description of Artificial Sequence: Synthetic oligonucleotide
atgaaacctaaataagtctctgg

SEQ ID NO: 1095 - DNA, 23 bp, synthetic construct
  source 1..23: mol_type = other DNA; note = Description of Artificial Sequence: Synthetic oligonucleotide
tgtttacctgaataaccttcagg

SEQ ID NO: 1096 - DNA, 23 bp, synthetic construct
  source 1..23: mol_type = other DNA; note = Description of Artificial Sequence: Synthetic oligonucleotide
aagatatctgaaaagcccacttt

SEQ ID NO: 1097 - DNA, 23 bp, synthetic construct
  source 1..23: mol_type = other DNA; note = Description of Artificial Sequence: Synthetic oligonucleotide
tgtaaacctggataaccctctag

SEQ ID NO: 1098 - DNA, 22 bp, synthetic construct
  source 1..22: mol_type = other DNA; note = Description of Artificial Sequence: Synthetic oligonucleotide
aagtatcatgaataccctcagg

SEQ ID NO: 1099 - DNA, 22 bp, synthetic construct
  source 1..22: mol_type = other DNA; note = Description of Artificial Sequence: Synthetic oligonucleotide
aagatcctatataaccctctga

SEQ ID NO: 1100 - DNA, 23 bp, synthetic construct
  source 1..23: mol_type = other DNA; note = Description of Artificial Sequence: Synthetic oligonucleotide
aaaatacctgaataacctgggcc

SEQ ID NO: 1101 - DNA, 23 bp, synthetic construct
  source 1..23: mol_type = other DNA; note = Description of Artificial Sequence: Synthetic oligonucleotide
aagttaccagaacaacccttagg

SEQ ID NO: 1102 - DNA, 22 bp, synthetic construct
  source 1..22: mol_type = other DNA; note = Description of Artificial Sequence: Synthetic oligonucleotide
aagaatttgaataactctctag

SEQ ID NO: 1103 - DNA, 21 bp, synthetic construct
  source 1..21: mol_type = other DNA; note = Description of Artificial Sequence: Synthetic oligonucleotide
aggatacctgaatccctccag

SEQ ID NO: 1104 - DNA, 23 bp, synthetic construct
  source 1..23: mol_type = other DNA; note = Description of Artificial Sequence: Synthetic oligonucleotide
gagacacctgaataagtgtctgg

SEQ ID NO: 1105 - DNA, 22 bp, synthetic construct
  source 1..22: mol_type = other DNA; note = Description of Artificial Sequence: Synthetic oligonucleotide
aagctagtgaaaaaccatcagg

SEQ ID NO: 1106 - DNA, 23 bp, synthetic construct
  source 1..23: mol_type = other DNA; note = Description of Artificial Sequence: Synthetic oligonucleotide
aggatacttgaatatccctgcct

SEQ ID NO: 1107 - DNA, 22 bp, synthetic construct
  source 1..22: mol_type = other DNA; note = Description of Artificial Sequence: Synthetic oligonucleotide
cagatactgaaaaacactctgg

SEQ ID NO: 1108 - DNA, 23 bp, synthetic construct
  source 1..23: mol_type = other DNA; note = Description of Artificial Sequence: Synthetic oligonucleotide
aagaaatctggataacccccaat

SEQ ID NO: 1109 - DNA, 23 bp, synthetic construct
  source 1..23: mol_type = other DNA; note = Description of Artificial Sequence: Synthetic oligonucleotide
aacatacccaaaaaaacctctga

SEQ ID NO: 1110 - DNA, 23 bp, synthetic construct
  source 1..23: mol_type = other DNA; note = Description of Artificial Sequence: Synthetic oligonucleotide
aaaatatccaaataaccccctgg

SEQ ID NO: 1111 - DNA, 23 bp, synthetic construct
  source 1..23: mol_type = other DNA; note = Description of Artificial Sequence: Synthetic oligonucleotide
aagatatctgaataatcatcagg

SEQ ID NO: 1112 - DNA, 22 bp, synthetic construct
  source 1..22: mol_type = other DNA; note = Description of Artificial Sequence: Synthetic oligonucleotide
aagatactgagtaacactgaag

SEQ ID NO: 1113 - DNA, 21 bp, synthetic construct
  source 1..21: mol_type = other DNA; note = Description of Artificial Sequence: Synthetic oligonucleotide
aagttacctaaataactttgg

SEQ ID NO: 1114 - DNA, 23 bp, synthetic construct
  source 1..23: mol_type = other DNA; note = Description of Artificial Sequence: Synthetic oligonucleotide
accataattgattaactctctgg

SEQ ID NO: 1115 - DNA, 23 bp, synthetic construct
  source 1..23: mol_type = other DNA; note = Description of Artificial Sequence: Synthetic oligonucleotide
aagaaacctaagtaaacctctaa

SEQ ID NO: 1116 - DNA, 22 bp, synthetic construct
  source 1..22: mol_type = other DNA; note = Description of Artificial Sequence: Synthetic oligonucleotide
aagatacatcatcaccctcctg

SEQ ID NO: 1117 - DNA, 23 bp, synthetic construct
  source 1..23: mol_type = other DNA; note = Description of Artificial Sequence: Synthetic oligonucleotide
aagacacataaggaaccctcatg

SEQ ID NO: 1118 - DNA, 23 bp, synthetic construct
  source 1..23: mol_type = other DNA; note = Description of Artificial Sequence: Synthetic oligonucleotide
gagatacctgagctgccctcagc

SEQ ID NO: 1119 - DNA, 23 bp, synthetic construct
  source 1..23: mol_type = other DNA; note = Description of Artificial Sequence: Synthetic oligonucleotide
gagatacctaaataaccttccag

SEQ ID NO: 1120 - DNA, 21 bp, synthetic construct
  source 1..21: mol_type = other DNA; note = Description of Artificial Sequence: Synthetic oligonucleotide
aagatacgaataatcctccga

SEQ ID NO: 1121 - DNA, 23 bp, synthetic construct
  source 1..23: mol_type = other DNA; note = Description of Artificial Sequence: Synthetic oligonucleotide
attaaaccaaaataaccctcggg

SEQ ID NO: 1122 - DNA, 23 bp, synthetic construct
  source 1..23: mol_type = other DNA; note = Description of Artificial Sequence: Synthetic oligonucleotide
cacaaaccttaataaccctcaag

SEQ ID NO: 1123 - DNA, 23 bp, synthetic construct
  source 1..23: mol_type = other DNA; note = Description of Artificial Sequence: Synthetic oligonucleotide
aagataaaaaaatacccctaggg

SEQ ID NO: 1124 - DNA, 23 bp, synthetic construct
  source 1..23: mol_type = other DNA; note = Description of Artificial Sequence: Synthetic oligonucleotide
aagatatctgaaaaagtcttgag

SEQ ID NO: 1125 - DNA, 23 bp, synthetic construct
  source 1..23: mol_type = other DNA; note = Description of Artificial Sequence: Synthetic oligonucleotide
gagataactgaataaccatttgg

SEQ ID NO: 1126 - DNA, 23 bp, synthetic construct
  source 1..23: mol_type = other DNA; note = Description of Artificial Sequence: Synthetic oligonucleotide
aagatatctgtaaaacccttcag

SEQ ID NO: 1127 - DNA, 23 bp, synthetic construct
  source 1..23: mol_type = other DNA; note = Description of Artificial Sequence: Synthetic oligonucleotide
aacatacatgaaaaatcctcaac

SEQ ID NO: 1128 - DNA, 23 bp, synthetic construct
  source 1..23: mol_type = other DNA; note = Description of Artificial Sequence: Synthetic oligonucleotide
aaggtaactggatagccatctgc

SEQ ID NO: 1129 - DNA, 23 bp, synthetic construct
  source 1..23: mol_type = other DNA; note = Description of Artificial Sequence: Synthetic oligonucleotide
aagagacctgagtcaccctgtct

SEQ ID NO: 1130 - DNA, 23 bp, synthetic construct
  source 1..23: mol_type = other DNA; note = Description of Artificial Sequence: Synthetic oligonucleotide
aagataaatgaatttccttctgt

SEQ ID NO: 1131 - DNA, 23 bp, synthetic construct
  source 1..23: mol_type = other DNA; note = Description of Artificial Sequence: Synthetic oligonucleotide
aagatacgggaaatcccctttgg

SEQ ID NO: 1132 - DNA, 22 bp, synthetic construct
  source 1..22: mol_type = other DNA; note = Description of Artificial Sequence: Synthetic oligonucleotide
cagatatcagataaccctatgg

SEQ ID NO: 1133 - DNA, 23 bp, synthetic construct
  source 1..23: mol_type = other DNA; note = Description of Artificial Sequence: Synthetic oligonucleotide
cagatgcttgtaaaaccatcagg

SEQ ID NO: 1134 - DNA, 23 bp, synthetic construct
  source 1..23: mol_type = other DNA; note = Description of Artificial Sequence: Synthetic oligonucleotide
acagtagttgcataaccctctgg

SEQ ID NO: 1135 - DNA, 23 bp, synthetic construct
  source 1..23: mol_type = other DNA; note = Description of Artificial Sequence: Synthetic oligonucleotide
aagattcagcactaacccacagg

SEQ ID NO: 1136 - DNA, 22 bp, synthetic construct
  source 1..22: mol_type = other DNA; note = Description of Artificial Sequence: Synthetic oligonucleotide
gagatactgaattaccctctgg

SEQ ID NO: 1137 - DNA, 23 bp, synthetic construct
  source 1..23: mol_type = other DNA; note = Description of Artificial Sequence: Synthetic oligonucleotide
aagagacatgcataatcttcagg

SEQ ID NO: 1138 - DNA, 22 bp, synthetic construct
  source 1..22: mol_type = other DNA; note = Description of Artificial Sequence: Synthetic oligonucleotide
aagtaaactgaataccttctgg

SEQ ID NO: 1139 - DNA, 23 bp, synthetic construct
  source 1..23: mol_type = other DNA; note = Description of Artificial Sequence: Synthetic oligonucleotide
aagaaaccactataaccatcagt

SEQ ID NO: 1140 - DNA, 22 bp, synthetic construct
  source 1..22: mol_type = other DNA; note = Description of Artificial Sequence: Synthetic oligonucleotide
cagatactgtataaccctcaga

SEQ ID NO: 1141 - DNA, 23 bp, synthetic construct
  source 1..23: mol_type = other DNA; note = Description of Artificial Sequence: Synthetic oligonucleotide
aatgtaaatgtataaccctctgt

SEQ ID NO: 1142 - DNA, 23 bp, synthetic construct
  source 1..23: mol_type = other DNA; note = Description of Artificial Sequence: Synthetic oligonucleotide
aggataccataataaccagcatg

SEQ ID NO: 1143 - DNA, 23 bp, synthetic construct
  source 1..23: mol_type = other DNA; note = Description of Artificial Sequence: Synthetic oligonucleotide
gcaatacctgaataacccattgt

SEQ ID NO: 1144 - DNA, 23 bp, synthetic construct
  source 1..23: mol_type = other DNA; note = Description of Artificial Sequence: Synthetic oligonucleotide
aagataccagaccatctcccagg

SEQ ID NO: 1145 - DNA, 21 bp, synthetic construct
  source 1..21: mol_type = other DNA; note = Description of Artificial Sequence: Synthetic oligonucleotide
aagatctgaatagcaccctgg

SEQ ID NO: 1146 - DNA, 23 bp, synthetic construct
  source 1..23: mol_type = other DNA; note = Description of Artificial Sequence: Synthetic oligonucleotide
aagatcacaggacaaccctccgc

SEQ ID NO: 1147 - DNA, 22 bp, synthetic construct
  source 1..22: mol_type = other DNA; note = Description of Artificial Sequence: Synthetic oligonucleotide
aagattcatgataaccatcatg

SEQ ID NO: 1148 - DNA, 23 bp, synthetic construct
  source 1..23: mol_type = other DNA; note = Description of Artificial Sequence: Synthetic oligonucleotide
caggtacctggagaaccctagag

SEQ ID NO: 1149 - DNA, 23 bp, synthetic construct
  source 1..23: mol_type = other DNA; note = Description of Artificial Sequence: Synthetic oligonucleotide
aagatacctgaacaccctactgg

SEQ ID NO: 1150 - DNA, 22 bp, synthetic construct
  source 1..22: mol_type = other DNA; note = Description of Artificial Sequence: Synthetic oligonucleotide
tagctagctgataacactctgg

SEQ ID NO: 1151 - DNA, 22 bp, synthetic construct
  source 1..22: mol_type = other DNA; note = Description of Artificial Sequence: Synthetic oligonucleotide
attatactgaataaccttccag

SEQ ID NO: 1152 - DNA, 23 bp, synthetic construct
  source 1..23: mol_type = other DNA; note = Description of Artificial Sequence: Synthetic oligonucleotide
aagttacctgcatcaaactcatg

SEQ ID NO: 1153 - DNA, 22 bp, synthetic construct
  source 1..22: mol_type = other DNA; note = Description of Artificial Sequence: Synthetic oligonucleotide
aagatacagaataaccctctag

SEQ ID NO: 1154 - DNA, 23 bp, synthetic construct
  source 1..23: mol_type = other DNA; note = Description of Artificial Sequence: Synthetic oligonucleotide
gatatactctaataaccctcaag

SEQ ID NO: 1155 - DNA, 23 bp, synthetic construct
  source 1..23: mol_type = other DNA; note = Description of Artificial Sequence: Synthetic oligonucleotide
aagatacataaatcactttccag

SEQ ID NO: 1156 - DNA, 22 bp, synthetic construct
  source 1..22: mol_type = other DNA; note = Description of Artificial Sequence: Synthetic oligonucleotide
aaaatgcctaatagacctctgg

SEQ ID NO: 1157 - DNA, 23 bp, synthetic construct
  source 1..23: mol_type = other DNA; note = Description of Artificial Sequence: Synthetic oligonucleotide
aaaacacctgaaaaatcctccac

SEQ ID NO: 1158 - DNA, 24 bp, synthetic construct
  source 1..24: mol_type = other DNA; note = Description of Artificial Sequence: Synthetic oligonucleotide
aagaaacactgaatgtccctcttg

SEQ ID NO: 1159 - DNA, 23 bp, synthetic construct
  source 1..23: mol_type = other DNA; note = Description of Artificial Sequence: Synthetic oligonucleotide
gtgaaacctaaataaccctcaga

SEQ ID NO: 1160 - DNA, 23 bp, synthetic construct
  source 1..23: mol_type = other DNA; note = Description of Artificial Sequence: Synthetic oligonucleotide
aatataccagaatagttctcagt

SEQ ID NO: 1161 - DNA, 22 bp, synthetic construct
  source 1..22: mol_type = other DNA; note = Description of Artificial Sequence: Synthetic oligonucleotide
aagatactgaatattcctcagg

SEQ ID NO: 1162 - DNA, 23 bp, synthetic construct
  source 1..23: mol_type = other DNA; note = Description of Artificial Sequence: Synthetic oligonucleotide
gagatacttgaataaccatctca

SEQ ID NO: 1163 - DNA, 23 bp, synthetic construct
  source 1..23: mol_type = other DNA; note = Description of Artificial Sequence: Synthetic oligonucleotide
aaagtacattaaaaaccttctgg

SEQ ID NO: 1164 - DNA, 23 bp, synthetic construct
  source 1..23: mol_type = other DNA; note = Description of Artificial Sequence: Synthetic oligonucleotide
aagataattgaatagccatctta

SEQ ID NO: 1165 - DNA, 23 bp, synthetic construct
  source 1..23: mol_type = other DNA; note = Description of Artificial Sequence: Synthetic oligonucleotide
aacaaacccgtaaaaccctcacg

SEQ ID NO: 1166 - DNA, 23 bp, synthetic construct
  source 1..23: mol_type = other DNA; note = Description of Artificial Sequence: Synthetic oligonucleotide
aagatagttaaatatccccctgt

SEQ ID NO: 1167 - DNA, 22 bp, synthetic construct
  source 1..22: mol_type = other DNA; note = Description of Artificial Sequence: Synthetic oligonucleotide
aagataataaataaccctcaag

SEQ ID NO: 1168 - DNA, 22 bp, synthetic construct
  source 1..22: mol_type = other DNA; note = Description of Artificial Sequence: Synthetic oligonucleotide
aagctacttgataaccctatgg

SEQ ID NO: 1169 - DNA, 21 bp, synthetic construct
  source 1..21: mol_type = other DNA; note = Description of Artificial Sequence: Synthetic oligonucleotide
attatacctgaatccctcagg

SEQ ID NO: 1170 - DNA, 23 bp, synthetic construct
  source 1..23: mol_type = other DNA; note = Description of Artificial Sequence: Synthetic oligonucleotide
aagttatcctaataaccctatgg

SEQ ID NO: 1171 - DNA, 23 bp, synthetic construct
  source 1..23: mol_type = other DNA; note = Description of Artificial Sequence: Synthetic oligonucleotide
atgtttactgaatacccctctgg

SEQ ID NO: 1172 - DNA, 23 bp, synthetic construct
  source 1..23: mol_type = other DNA; note = Description of Artificial Sequence: Synthetic oligonucleotide
aagggacctgaaattccctgagg

SEQ ID NO: 1173 - DNA, 23 bp, synthetic construct
  source 1..23: mol_type = other DNA; note = Description of Artificial Sequence: Synthetic oligonucleotide
tagataacagaatgactcacagg

SEQ ID NO: 1174 - DNA, 22 bp, synthetic construct
  source 1..22: mol_type = other DNA; note = Description of Artificial Sequence: Synthetic oligonucleotide
aagattctgaatagaccccagg

SEQ ID NO: 1175 - DNA, 22 bp, synthetic construct
  source 1..22: mol_type = other DNA; note = Description of Artificial Sequence: Synthetic oligonucleotide
aacatacccaaatactctcagg

SEQ ID NO: 1176 - DNA, 23 bp, synthetic construct
  source 1..23: mol_type = other DNA; note = Description of Artificial Sequence: Synthetic oligonucleotide
aagatacctcaataagactcggg

SEQ ID NO: 1177 - DNA, 22 bp, synthetic construct
  source 1..22: mol_type = other DNA; note = Description of Artificial Sequence: Synthetic oligonucleotide
tagatactgaaaatctctcagg

SEQ ID NO: 1178 - DNA, 23 bp, synthetic construct
  source 1..23: mol_type = other DNA; note = Description of Artificial Sequence: Synthetic oligonucleotide
agaatacaagaataaccctgggg

SEQ ID NO: 1179 - DNA, 23 bp, synthetic construct
  source 1..23: mol_type = other DNA; note = Description of Artificial Sequence: Synthetic oligonucleotide
aagatacctgaaattcctgcaga

SEQ ID NO: 1180 - DNA, 22 bp, synthetic construct
  source 1..22: mol_type = other DNA; note = Description of Artificial Sequence: Synthetic oligonucleotide
ctggtacttaataaccctcagg

SEQ ID NO: 1181 - DNA, 23 bp, synthetic construct
  source 1..23: mol_type = other DNA; note = Description of Artificial Sequence: Synthetic oligonucleotide
gagatacctaacacacactctgg

SEQ ID NO: 1182 - DNA, 23 bp, synthetic construct
  source 1..23: mol_type = other DNA; note = Description of Artificial Sequence: Synthetic oligonucleotide
acaatacctgaaaaactcccttg

SEQ ID NO: 1183 - DNA, 22 bp, synthetic construct
  source 1..22: mol_type = other DNA; note = Description of Artificial Sequence: Synthetic oligonucleotide
cagatacattaaaaccctctgg

SEQ ID NO: 1184 - DNA, 23 bp, synthetic construct
  source 1..23: mol_type = other DNA; note = Description of Artificial Sequence: Synthetic oligonucleotide
cagaacccacaataagcctctgg

SEQ ID NO: 1185 - DNA, 22 bp, synthetic construct
  source 1..22: mol_type = other DNA; note = Description of Artificial Sequence: Synthetic oligonucleotide
aataacatgaataacactcaag

SEQ ID NO: 1186 - DNA, 22 bp, synthetic construct
  source 1..22: mol_type = other DNA; note = Description of Artificial Sequence: Synthetic oligonucleotide
aagtaacccaaataaccccagg

SEQ ID NO: 1187 - DNA, 22 bp, synthetic construct
  source 1..22: mol_type = other DNA; note = Description of Artificial Sequence: Synthetic oligonucleotide
aagatacagaatttccctttgg

SEQ ID NO: 1188 - DNA, 23 bp, synthetic construct
  source 1..23: mol_type = other DNA; note = Description of Artificial Sequence: Synthetic oligonucleotide
aaggtccctgagccaccctccag

SEQ ID NO: 1189 - DNA, 22 bp, synthetic construct
  source 1..22: mol_type = other DNA; note = Description of Artificial Sequence: Synthetic oligonucleotide
aagatctggaacaactctctgg

SEQ ID NO: 1190 - DNA, 23 bp, synthetic construct
  source 1..23: mol_type = other DNA; note = Description of Artificial Sequence: Synthetic oligonucleotide
aacactattgaataaccatctgg

SEQ ID NO: 1191 - DNA, 22 bp, synthetic construct
  source 1..22: mol_type = other DNA; note = Description of Artificial Sequence: Synthetic oligonucleotide
gggatacctgaatattctctgg

SEQ ID NO: 1192 - DNA, 23 bp, synthetic construct
  source 1..23: mol_type = other DNA; note = Description of Artificial Sequence: Synthetic oligonucleotide
aagatgcctgcacatccctcctt

SEQ ID NO: 1193 - DNA, 23 bp, synthetic construct
  source 1..23: mol_type = other DNA; note = Description of Artificial Sequence: Synthetic oligonucleotide
aagatacatgaattaccaaaaag

SEQ ID NO: 1194 - DNA, 23 bp, synthetic construct
  source 1..23: mol_type = other DNA; note = Description of Artificial Sequence: Synthetic oligonucleotide
aagatgcttgaagtagcttcagg

SEQ ID NO: 1195 - DNA, 24 bp, synthetic construct
  source 1..24: mol_type = other DNA; note = Description of Artificial Sequence: Synthetic oligonucleotide
tagatacctcttataaccctccag

SEQ ID NO: 1196 - DNA, 23 bp, synthetic construct
  source 1..23: mol_type = other DNA; note = Description of Artificial Sequence: Synthetic oligonucleotide
aagatacatcaataaacctgatt

SEQ ID NO: 1197 - DNA, 23 bp, synthetic construct
  source 1..23: mol_type = other DNA; note = Description of Artificial Sequence: Synthetic oligonucleotide
aagatagtcctataactctctgg

SEQ ID NO: 1198 - DNA, 23 bp, synthetic construct
  source 1..23: mol_type = other DNA; note = Description of Artificial Sequence: Synthetic oligonucleotide
aaaattagtggataaacctctgg

SEQ ID NO: 1199 - DNA, 22 bp, synthetic construct
  source 1..22: mol_type = other DNA; note = Description of Artificial Sequence: Synthetic oligonucleotide
aagatcctgaagaattctctga

SEQ ID NO: 1200 - DNA, 23 bp, synthetic construct
  source 1..23: mol_type = other DNA; note = Description of Artificial Sequence: Synthetic oligonucleotide
agaatacctgaacaacactctag

SEQ ID NO: 1201 - DNA, 21 bp, synthetic construct
  source 1..21: mol_type = other DNA; note = Description of Artificial Sequence: Synthetic oligonucleotide
attaaacctgaaaccctcagg

SEQ ID NO: 1202 - DNA, 22 bp, synthetic construct
  source 1..22: mol_type = other DNA; note = Description of Artificial Sequence: Synthetic oligonucleotide
aagatagctaaataacctctga

SEQ ID NO: 1203 - DNA, 23 bp, synthetic construct
  source 1..23: mol_type = other DNA; note = Description of Artificial Sequence: Synthetic oligonucleotide
gagacaactgattatccctcaag

SEQ ID NO: 1204 - DNA, 23 bp, synthetic construct
  source 1..23: mol_type = other DNA; note = Description of Artificial Sequence: Synthetic oligonucleotide
aatttaccagaatagccctctga

SEQ ID NO: 1205 - DNA, 23 bp, synthetic construct
  source 1..23: mol_type = other DNA; note = Description of Artificial Sequence: Synthetic oligonucleotide
aagatactgaaatacccctatgg

SEQ ID NO: 1206 - DNA, 23 bp, synthetic construct
  source 1..23: mol_type = other DNA; note = Description of Artificial Sequence: Synthetic oligonucleotide
aaggtaaatgagtaatcctttgg

SEQ ID NO: 1207 - DNA, 24 bp, synthetic construct
  source 1..24: mol_type = other DNA; note = Description of Artificial Sequence: Synthetic oligonucleotide
aagattacttgaagaagcctctga

SEQ ID NO: 1208 - DNA, 23 bp, synthetic construct
  source 1..23: mol_type = other DNA; note = Description of Artificial Sequence: Synthetic oligonucleotide
aaagtagctgaataaacctcaag

SEQ ID NO: 1209 - DNA, 23 bp, synthetic construct
  source 1..23: mol_type = other DNA; note = Description of Artificial Sequence: Synthetic oligonucleotide
aagataactgaaatgccttcgag

SEQ ID NO: 1210 - DNA, 23 bp, synthetic construct
  source 1..23: mol_type = other DNA; note = Description of Artificial Sequence: Synthetic oligonucleotide
actattcctgaataaccctttgg

SEQ ID NO: 1211 - DNA, 22 bp, synthetic construct
  source 1..22: mol_type = other DNA; note = Description of Artificial Sequence: Synthetic oligonucleotide
aacatcctgaatcaacctctgc

SEQ ID NO: 1212 - DNA, 22 bp, synthetic construct
  source 1..22: mol_type = other DNA; note = Description of Artificial Sequence: Synthetic oligonucleotide
gaaatactgagtacccctcagg

SEQ ID NO: 1213 - DNA, 22 bp, synthetic construct
  source 1..22: mol_type = other DNA; note = Description of Artificial Sequence: Synthetic oligonucleotide
tagatctagaataagcctctgg

SEQ ID NO: 1214 - DNA, 23 bp, synthetic construct
  source 1..23: mol_type = other DNA; note = Description of Artificial Sequence: Synthetic oligonucleotide
aagatacccaaataaccatcaga

SEQ ID NO: 1215 - DNA, 23 bp, synthetic construct
  source 1..23: mol_type = other DNA; note = Description of Artificial Sequence: Synthetic oligonucleotide
aagacagctaactaactctcggg

SEQ ID NO: 1216 - DNA, 23 bp, synthetic construct
  source 1..23: mol_type = other DNA; note = Description of Artificial Sequence: Synthetic oligonucleotide
aaagtagctgaacagccctcagg

SEQ ID NO: 1217 - DNA, 23 bp, synthetic construct
  source 1..23: mol_type = other DNA; note = Description of Artificial Sequence: Synthetic oligonucleotide
aagatacctcattaatcatcaca

SEQ ID NO: 1218 - DNA, 22 bp, synthetic construct
  source 1..22: mol_type = other DNA; note = Description of Artificial Sequence: Synthetic oligonucleotide
aagatatggaatcaacctcagg

SEQ ID NO: 1219 - DNA, 22 bp, synthetic construct
  source 1..22: mol_type = other DNA; note = Description of Artificial Sequence: Synthetic oligonucleotide
aagatacctaataaccacaggg

SEQ ID NO: 1220 - DNA, 23 bp, synthetic construct
  source 1..23: mol_type = other DNA; note = Description of Artificial Sequence: Synthetic oligonucleotide
acagcacctgaatcacactctgg

SEQ ID NO: 1221 - DNA, 23 bp, synthetic construct
  source 1..23: mol_type = other DNA; note = Description of Artificial Sequence: Synthetic oligonucleotide
aagatacaaaaacaaccgactgg

SEQ ID NO: 1222 - DNA, 22 bp, synthetic construct
  source 1..22: mol_type = other DNA; note = Description of Artificial Sequence: Synthetic oligonucleotide
aagatactcaataaacctcaag

SEQ ID NO: 1223 - DNA, 22 bp, synthetic construct
  source 1..22: mol_type = other DNA; note = Description of Artificial Sequence: Synthetic oligonucleotide
atgatagtgaataattctcagg

SEQ ID NO: 1224 - DNA, 23 bp, synthetic construct
  source 1..23: mol_type = other DNA; note = Description of Artificial Sequence: Synthetic oligonucleotide
aagacacataaaccactctcagg

SEQ ID NO: 1225 - DNA, 22 bp, synthetic construct
  source 1..22: mol_type = other DNA; note = Description of Artificial Sequence: Synthetic oligonucleotide
aagatactggataaccttccag

SEQ ID NO: 1226 - DNA, 22 bp, synthetic construct
  source 1..22: mol_type = other DNA; note = Description of Artificial Sequence: Synthetic oligonucleotide
atgataatgaataacccttggg

SEQ ID NO: 1227 - DNA, 22 bp, synthetic construct
  source 1..22: mol_type = other DNA; note = Description of Artificial Sequence: Synthetic oligonucleotide
aagacactgaaaaaccctcaag

SEQ ID NO: 1228 - DNA, 23 bp, synthetic construct
  source 1..23: mol_type = other DNA; note = Description of Artificial Sequence: Synthetic oligonucleotide
aagatagcagattagtcctcagt

SEQ ID NO: 1229 - DNA, 23 bp, synthetic construct
  source 1..23: mol_type = other DNA; note = Description of Artificial Sequence: Synthetic oligonucleotide
aagagatcgggataagcctttgg

SEQ ID NO: 1230 - DNA, 23 bp, synthetic construct
  source 1..23: mol_type = other DNA; note = Description of Artificial Sequence: Synthetic oligonucleotide
taagtacccaaataagcctctgg

SEQ ID NO: 1231 - DNA, 23 bp, synthetic construct
  source 1..23: mol_type = other DNA; note = Description of Artificial Sequence: Synthetic oligonucleotide
aagatatctgaatatggaccagg

SEQ ID NO: 1232 - DNA, 23 bp, synthetic construct
  source 1..23: mol_type = other DNA; note = Description of Artificial Sequence: Synthetic oligonucleotide
aagatagctaagaatccctccag

SEQ ID NO: 1233 - DNA, 22 bp, synthetic construct
  source 1..22: mol_type = other DNA; note = Description of Artificial Sequence: Synthetic oligonucleotide
tagttacaagaataaccccagg

SEQ ID NO: 1234 - DNA, 22 bp, synthetic construct
  source 1..22: mol_type = other DNA; note = Description of Artificial Sequence: Synthetic oligonucleotide
tagatacataatagccctttgg

SEQ ID NO: 1235 - DNA, 23 bp, synthetic construct
  source 1..23: mol_type = other DNA; note = Description of Artificial Sequence: Synthetic oligonucleotide
aagagccctgaataagctttagg

SEQ ID NO: 1236 - DNA, 22 bp, synthetic construct
  source 1..22: mol_type = other DNA; note = Description of Artificial Sequence: Synthetic oligonucleotide
aagatactgaataaacccgaag

SEQ ID NO: 1237 - DNA, 23 bp, synthetic construct
  source 1..23: mol_type = other DNA; note = Description of Artificial Sequence: Synthetic oligonucleotide
aagatatctggataatccccaaa

SEQ ID NO: 1238 - DNA, 24 bp, synthetic construct
  source 1..24: mol_type = other DNA; note = Description of Artificial Sequence: Synthetic oligonucleotide
aatataccttgaatacccctccct

SEQ ID NO: 1239 - DNA, 23 bp, synthetic construct
  source 1..23: mol_type = other DNA; note = Description of Artificial Sequence: Synthetic oligonucleotide
gggataccttaacaaccctgtgg

SEQ ID NO: 1240 - DNA, 23 bp, synthetic construct
  source 1..23: mol_type = other DNA; note = Description of Artificial Sequence: Synthetic oligonucleotide
aaaatacctgacagaaccactgg

SEQ ID NO: 1241 - DNA, 23 bp, synthetic construct
  source 1..23: mol_type = other DNA; note = Description of Artificial Sequence: Synthetic oligonucleotide
aaaatacctgagtgaccctagaa

SEQ ID NO: 1242 - DNA, 23 bp, synthetic construct
  source 1..23: mol_type = other DNA; note = Description of Artificial Sequence: Synthetic oligonucleotide
aagatttgtgaatgaccctaatg

SEQ ID NO: 1243 - DNA, 22 bp, synthetic construct
  source 1..22: mol_type = other DNA; note = Description of Artificial Sequence: Synthetic oligonucleotide
aagataccagtatactctctgg

SEQ ID NO: 1244 - DNA, 23 bp, synthetic construct
  source 1..23: mol_type = other DNA; note = Description of Artificial Sequence: Synthetic oligonucleotide
aagatccctgaacaacaccaaag

SEQ ID NO: 1245 - DNA, 23 bp, synthetic construct
  source 1..23: mol_type = other DNA; note = Description of Artificial Sequence: Synthetic oligonucleotide
aagataccagtcccaccctcttg

SEQ ID NO: 1246 - DNA, 24 bp, synthetic construct
  source 1..24: mol_type = other DNA; note = Description of Artificial Sequence: Synthetic oligonucleotide
tagatactctcaatgaccctctga

SEQ ID NO: 1247 - DNA, 23 bp, synthetic construct
  source 1..23: mol_type = other DNA; note = Description of Artificial Sequence: Synthetic oligonucleotide
aagttacttaaatagctctctgc

SEQ ID NO: 1248 - DNA, 23 bp, synthetic construct
  source 1..23: mol_type = other DNA; note = Description of Artificial Sequence: Synthetic oligonucleotide
aagatgcttgaatttccctaatg

SEQ ID NO: 1249 - DNA, 23 bp, synthetic construct
  source 1..23: mol_type = other DNA; note = Description of Artificial Sequence: Synthetic oligonucleotide
aagagatctggatcacccccagc

SEQ ID NO: 1250 - DNA, 23 bp, synthetic construct
  source 1..23: mol_type = other DNA; note = Description of Artificial Sequence: Synthetic oligonucleotide
aagatatttgaatattccctagg

SEQ ID NO: 1251 - DNA, 23 bp, synthetic construct
  source 1..23: mol_type = other DNA; note = Description of Artificial Sequence: Synthetic oligonucleotide
taattaccagaataaccctatga

SEQ ID NO: 1252 - DNA, 22 bp, synthetic construct
  source 1..22: mol_type = other DNA; note = Description of Artificial Sequence: Synthetic oligonucleotide
aagatacctgaaatacctgggt

SEQ ID NO: 1253 - DNA, 23 bp, synthetic construct
  source 1..23: mol_type = other DNA; note = Description of Artificial Sequence: Synthetic oligonucleotide
aaggtacctgagtaaacattctg

SEQ ID NO: 1254 - DNA, 22 bp, synthetic construct
  source 1..22: mol_type = other DNA; note = Description of Artificial Sequence: Synthetic oligonucleotide
aagatacatgaatgaattcagg

SEQ ID NO: 1255 - DNA, 22 bp, synthetic construct
  source 1..22: mol_type = other DNA; note = Description of Artificial Sequence: Synthetic oligonucleotide
cagatacctaagaaccctgacg

SEQ ID NO: 1256 - DNA, 23 bp, synthetic construct
  source 1..23: mol_type = other DNA; note = Description of Artificial Sequence: Synthetic oligonucleotide
agtataacagaataaccctatgt

SEQ ID NO: 1257 - DNA, 23 bp, synthetic construct
  source 1..23: mol_type = other DNA; note = Description of Artificial Sequence: Synthetic oligonucleotide
aacatatctgaatatctctctaa

SEQ ID NO: 1258 - DNA, 22 bp, synthetic construct
  source 1..22: mol_type = other DNA; note = Description of Artificial Sequence: Synthetic oligonucleotide
aagatcctgcctcaacctctgg

SEQ ID NO: 1259 - DNA, 23 bp, synthetic construct
  source 1..23: mol_type = other DNA; note = Description of Artificial Sequence: Synthetic oligonucleotide
aagataccaagctaatcctctgc

SEQ ID NO: 1260 - DNA, 23 bp, synthetic construct
  source 1..23: mol_type = other DNA; note = Description of Artificial Sequence: Synthetic oligonucleotide
gagatttctgaataacccaccct

SEQ ID NO: 1261 - DNA, 23 bp, synthetic construct
  source 1..23: mol_type = other DNA; note = Description of Artificial Sequence: Synthetic oligonucleotide
gagaggcctgagtagcccacggg

SEQ ID NO: 1262 - DNA, 23 bp, synthetic construct
  source 1..23: mol_type = other DNA; note = Description of Artificial Sequence: Synthetic oligonucleotide
aaggaaactggagaactctccgg

SEQ ID NO: 1263 - DNA, 23 bp, synthetic construct
  source 1..23: mol_type = other DNA; note = Description of Artificial Sequence: Synthetic oligonucleotide
aagatacttgaataaccatttca

SEQ ID NO: 1264 - DNA, 23 bp, synthetic construct
  source 1..23: mol_type = other DNA; note = Description of Artificial Sequence: Synthetic oligonucleotide
tgcttacatgaataaccctccag

SEQ ID NO: 1265 - DNA, 23 bp, synthetic construct
  source 1..23: mol_type = other DNA; note = Description of Artificial Sequence: Synthetic oligonucleotide
tctgtacctggataaccccctgg

SEQ ID NO: 1266 - DNA, 23 bp, synthetic construct
  source 1..23: mol_type = other DNA; note = Description of Artificial Sequence: Synthetic oligonucleotide
aaggtaactgacaaaccatctga

SEQ ID NO: 1267 - DNA, 23 bp, synthetic construct
  source 1..23: mol_type = other DNA; note = Description of Artificial Sequence: Synthetic oligonucleotide
aaaataaatgaataaaactgtgg

SEQ ID NO: 1268 - DNA, 23 bp, synthetic construct
  source 1..23: mol_type = other DNA; note = Description of Artificial Sequence: Synthetic oligonucleotide
aagtcaccagtttaacactcagg

SEQ ID NO: 1269 - DNA, 25 bp, synthetic construct
  source 1..25: mol_type = other DNA; note = Description of Artificial Sequence: Synthetic oligonucleotide
aagataccagaataaatcattctag

SEQ ID NO: 1270 - DNA, 23 bp, synthetic construct
  source 1..23: mol_type = other DNA; note = Description of Artificial Sequence: Synthetic oligonucleotide
taaatacatgaataaccattagg

SEQ ID NO: 1271 - DNA, 23 bp, synthetic construct
  source 1..23: mol_type = other DNA; note = Description of Artificial Sequence: Synthetic oligonucleotide
aaaagccctgatcaaacctcagg

SEQ ID NO: 1272 - DNA, 22 bp, synthetic construct
  source 1..22: mol_type = other DNA; note = Description of Artificial Sequence: Synthetic oligonucleotide
cacttacctgtataacctcagg

SEQ ID NO: 1273 - DNA, 23 bp, synthetic construct
  source 1..23: mol_type = other DNA; note = Description of Artificial Sequence: Synthetic oligonucleotide
aagatacttgcagaaccatctga

SEQ ID NO: 1274 - DNA, 21 bp, synthetic construct
  source 1..21: mol_type = other DNA; note = Description of Artificial Sequence: Synthetic oligonucleotide
aagatctgaatttccatcagg

SEQ ID NO: 1275 - DNA, 24 bp, synthetic construct
  source 1..24: mol_type = other DNA; note = Description of Artificial Sequence: Synthetic oligonucleotide
aagatatacatactaaccctctgg

SEQ ID NO: 1276 - DNA, 22 bp, synthetic construct
  source 1..22: mol_type = other DNA; note = Description of Artificial Sequence: Synthetic oligonucleotide
gagtaccataataaacctcagg

SEQ ID NO: 1277 - DNA, 23 bp, synthetic construct
  source 1..23: mol_type = other DNA; note = Description of Artificial Sequence: Synthetic oligonucleotide
aaagaacctaaataagcctcttg

SEQ ID NO: 1278 - DNA, 23 bp, synthetic construct
  source 1..23: mol_type = other DNA; note = Description of Artificial Sequence: Synthetic oligonucleotide
aagacattaaaataacccacagg

SEQ ID NO: 1279 - DNA, 23 bp, synthetic construct
  source 1..23: mol_type = other DNA; note = Description of Artificial Sequence: Synthetic oligonucleotide
aatatacctggaaaacccacacc

SEQ ID NO: 1280 - DNA, 23 bp, synthetic construct
  source 1..23: mol_type = other DNA; note = Description of Artificial Sequence: Synthetic oligonucleotide
aagacacatgaatatcactaatg

SEQ ID NO: 1281 - DNA, 22 bp, synthetic construct
  source 1..22: mol_type = other DNA; note = Description of Artificial Sequence: Synthetic oligonucleotide
aagatattgaataacccacatt

SEQ ID NO: 1282 - DNA, 23 bp, synthetic construct
  source 1..23: mol_type = other DNA; note = Description of Artificial Sequence: Synthetic oligonucleotide
aacatcccagaatgacccacagc

SEQ ID NO: 1283 - DNA, 23 bp, synthetic construct
  source 1..23: mol_type = other DNA; note = Description of Artificial Sequence: Synthetic oligonucleotide
aagaaagctggctagctctctgg

SEQ ID NO: 1284 - DNA, 24 bp, synthetic construct
  source 1..24: mol_type = other DNA; note = Description of Artificial Sequence: Synthetic oligonucleotide
aagataactgacttgaccctgtgg

SEQ ID NO: 1285 - DNA, 21 bp, synthetic construct
  source 1..21: mol_type = other DNA; note = Description of Artificial Sequence: Synthetic oligonucleotide
aagatatgaataaaactctgg

SEQ ID NO: 1286 - DNA, 23 bp, synthetic construct
  source 1..23: mol_type = other DNA; note = Description of Artificial Sequence: Synthetic oligonucleotide
aagctatctgagaaacccttttg

SEQ ID NO: 1287 - DNA, 22 bp, synthetic construct
  source 1..22: mol_type = other DNA; note = Description of Artificial Sequence: Synthetic oligonucleotide
cagatacctaataaccacacgg

SEQ ID NO: 1288 - DNA, 23 bp, synthetic construct
  source 1..23: mol_type = other DNA; note = Description of Artificial Sequence: Synthetic oligonucleotide
aagatacctgaaattatttcagg

SEQ ID NO: 1289 - DNA, 22 bp, synthetic construct
  source 1..22: mol_type = other DNA; note = Description of Artificial Sequence: Synthetic oligonucleotide
ttgatacctaaataccctgtgg

SEQ ID NO: 1290 - DNA, 23 bp, synthetic construct
  source 1..23: mol_type = other DNA; note = Description of Artificial Sequence: Synthetic oligonucleotide
taaatacatgaataatcctcggg

SEQ ID NO: 1291 - DNA, 23 bp, synthetic construct
  source 1..23: mol_type = other DNA; note = Description of Artificial Sequence: Synthetic oligonucleotide
aattaacctacataaccctcagt

SEQ ID NO: 1292 - DNA, 23 bp, synthetic construct
  source 1..23: mol_type = other DNA; note = Description of Artificial Sequence: Synthetic oligonucleotide
aagattcttaaataacccacttt

SEQ ID NO: 1293 - DNA, 23 bp, synthetic construct
  source 1..23: mol_type = other DNA; note = Description of Artificial Sequence: Synthetic oligonucleotide
aagatttaagaatgaacctcagg

SEQ ID NO: 1294 - DNA, 22 bp, synthetic construct
  source 1..22: mol_type = other DNA; note = Description of Artificial Sequence: Synthetic oligonucleotide
tggatacctgtcaaccctctgg

SEQ ID NO: 1295 - DNA, 23 bp, synthetic construct
  source 1..23: mol_type = other DNA; note = Description of Artificial Sequence: Synthetic oligonucleotide
aagatccgtgaataaaccacagc

SEQ ID NO: 1296 - DNA, 23 bp, synthetic construct
  source 1..23: mol_type = other DNA; note = Description of Artificial Sequence: Synthetic oligonucleotide
aacatacacgaatacctcacagg

SEQ ID NO: 1297 - DNA, 22 bp, synthetic construct
  source 1..22: mol_type = other DNA; note = Description of Artificial Sequence: Synthetic oligonucleotide
aagatgataaacaaccctctgg

SEQ ID NO: 1298 - DNA, 22 bp, synthetic construct
  source 1..22: mol_type = other DNA; note = Description of Artificial Sequence: Synthetic oligonucleotide
tagatcctaattaaccctcaga

SEQ ID NO: 1299 - DNA, 23 bp, synthetic construct
  source 1..23: mol_type = other DNA; note = Description of Artificial Sequence: Synthetic oligonucleotide
aagatacaggtgtagccctcctg

SEQ ID NO: 1300 - DNA, 23 bp, synthetic construct
  source 1..23: mol_type = other DNA; note = Description of Artificial Sequence: Synthetic oligonucleotide
ctgatatgtgaaaaaccctaagg

SEQ ID NO: 1301 - DNA, 22 bp, synthetic construct
  source 1..22: mol_type = other DNA; note = Description of Artificial Sequence: Synthetic oligonucleotide
aacatactgaaccagcctctgg

SEQ ID NO: 1302 - DNA, 23 bp, synthetic construct
  source 1..23: mol_type = other DNA; note = Description of Artificial Sequence: Synthetic oligonucleotide
aagacacgagaagaaccttctga

SEQ ID NO: 1303 - DNA, 23 bp, synthetic construct
  source 1..23: mol_type = other DNA; note = Description of Artificial Sequence: Synthetic oligonucleotide
aagacacttgaataccactcttt

SEQ ID NO: 1304 - DNA, 23 bp, synthetic construct
  source 1..23: mol_type = other DNA; note = Description of Artificial Sequence: Synthetic oligonucleotide
tacataccttgataaccttcagg

SEQ ID NO: 1305 - DNA, 23 bp, synthetic construct
  source 1..23: mol_type = other DNA; note = Description of Artificial Sequence: Synthetic oligonucleotide
aagttacctgaacaaacctgcaa

SEQ ID NO: 1306 - DNA, 23 bp, synthetic construct
  source 1..23: mol_type = other DNA; note = Description of Artificial Sequence: Synthetic oligonucleotide
aaaaaactagaagaaccctttgg

SEQ ID NO: 1307 - DNA, 23 bp, synthetic construct
  source 1..23: mol_type = other DNA; note = Description of Artificial Sequence: Synthetic oligonucleotide
aagatccctgaatttccatcaga

SEQ ID NO: 1308 - DNA, 22 bp, synthetic construct
  source 1..22: mol_type = other DNA; note = Description of Artificial Sequence: Synthetic oligonucleotide
aaaatacctgcataccctcagg

SEQ ID NO: 1309 - DNA, 23 bp, synthetic construct
  source 1..23: mol_type = other DNA; note = Description of Artificial Sequence: Synthetic oligonucleotide
aacttacatgaattactcttagg

SEQ ID NO: 1310 - DNA, 23 bp, synthetic construct
  source 1..23: mol_type = other DNA; note = Description of Artificial Sequence: Synthetic oligonucleotide
aacatttctcaatatccctttgg

SEQ ID NO: 1311 - DNA, 23 bp, synthetic construct
  source 1..23: mol_type = other DNA; note = Description of Artificial Sequence: Synthetic oligonucleotide
cagataactgaataaccctctgt

SEQ ID NO: 1312 - DNA, 21 bp, synthetic construct
  source 1..21: mol_type = other DNA; note = Description of Artificial Sequence: Synthetic oligonucleotide
taaatacctataacccactgg

SEQ ID NO: 1313 - DNA, 23 bp, synthetic construct
  source 1..23: mol_type = other DNA; note = Description of Artificial Sequence: Synthetic oligonucleotide
gagatacctgaatattcttccaa

SEQ ID NO: 1314 - DNA, 22 bp, synthetic construct
  source 1..22: mol_type = other DNA; note = Description of Artificial Sequence: Synthetic oligonucleotide
attatatctgaatatcctctgg

SEQ ID NO: 1315 - DNA, 22 bp, synthetic construct
  source 1..22: mol_type = other DNA; note = Description of Artificial Sequence: Synthetic oligonucleotide
atgatacccaatacccctccag

SEQ ID NO: 1316 - DNA, 23 bp, synthetic construct
  source 1..23: mol_type = other DNA; note = Description of Artificial Sequence: Synthetic oligonucleotide
cagatacctgaatctccttcttt

SEQ ID NO: 1317 - DNA, 23 bp, synthetic construct
  source 1..23: mol_type = other DNA; note = Description of Artificial Sequence: Synthetic oligonucleotide
cagttacctggataactccctgg

SEQ ID NO: 1318 - DNA, 23 bp, synthetic construct
  source 1..23: mol_type = other DNA; note = Description of Artificial Sequence: Synthetic oligonucleotide
aaaatactagaataaccagcttg

SEQ ID NO: 1319 - DNA, 23 bp, synthetic construct
  source 1..23: mol_type = other DNA; note = Description of Artificial Sequence: Synthetic oligonucleotide
aagactcaggaatatcactcagg

SEQ ID NO: 1320 - DNA, 22 bp, synthetic construct
  source 1..22: mol_type = other DNA; note = Description of Artificial Sequence: Synthetic oligonucleotide
aagatccagaagaatcatctgg

SEQ ID NO: 1321 - DNA, 23 bp, synthetic construct
  source 1..23: mol_type = other DNA; note = Description of Artificial Sequence: Synthetic oligonucleotide
aaaacacctgaataaatcccatg

SEQ ID NO: 1322 - DNA, 23 bp, synthetic construct
  source 1..23: mol_type = other DNA; note = Description of Artificial Sequence: Synthetic oligonucleotide
aacatcactgaagaaccctgaag

SEQ ID NO: 1323 - DNA, 22 bp, synthetic construct
  source 1..22: mol_type = other DNA; note = Description of Artificial Sequence: Synthetic oligonucleotide
aaaatacctcatagccctctgc

SEQ ID NO: 1324 - DNA, 23 bp, synthetic construct
  source 1..23: mol_type = other DNA; note = Description of Artificial Sequence: Synthetic oligonucleotide
aaaatagcttaataatgctcagt

SEQ ID NO: 1325 - DNA, 23 bp, synthetic construct
  source 1..23: mol_type = other DNA; note = Description of Artificial Sequence: Synthetic oligonucleotide
aagttccctgaacacacctctgg

SEQ ID NO: 1326 - DNA, 22 bp, synthetic construct
  source 1..22: mol_type = other DNA; note = Description of Artificial Sequence: Synthetic oligonucleotide
actatactgactaaccctctag

SEQ ID NO: 1327 - DNA, 23 bp, synthetic construct
  source 1..23: mol_type = other DNA; note = Description of Artificial Sequence: Synthetic oligonucleotide
agaatatcttcataaccttcggg

SEQ ID NO: 1328 - DNA, 22 bp, synthetic construct
  source 1..22: mol_type = other DNA; note = Description of Artificial Sequence: Synthetic oligonucleotide
agaaaacctgaataacctatgg

SEQ ID NO: 1329 - DNA, 23 bp, synthetic construct
  source 1..23: mol_type = other DNA; note = Description of Artificial Sequence: Synthetic oligonucleotide
aagatattcaaataaccctgctg

SEQ ID NO: 1330 - DNA, 22 bp, synthetic construct
  source 1..22: mol_type = other DNA; note = Description of Artificial Sequence: Synthetic oligonucleotide
gagatactgaataacctctggg

SEQ ID NO: 1331 - DNA, 22 bp, synthetic construct
  source 1..22: mol_type = other DNA; note = Description of Artificial Sequence: Synthetic oligonucleotide
aagatagctgctaaccctgagt

SEQ ID NO: 1332 - DNA, 23 bp, synthetic construct
  source 1..23: mol_type = other DNA; note = Description of Artificial Sequence: Synthetic oligonucleotide
aaaataaatgaataaccatcaga

SEQ ID NO: 1333 - DNA, 22 bp, synthetic construct
  source 1..22: mol_type = other DNA; note = Description of Artificial Sequence: Synthetic oligonucleotide
aaggtactagaaaaccctgtgg

SEQ ID NO: 1334 - DNA, 22 bp, synthetic construct
  source 1..22: mol_type = other DNA; note = Description of Artificial Sequence: Synthetic oligonucleotide
aagacactgccaaaccctccgg

SEQ ID NO: 1335 - DNA, 23 bp, synthetic construct
  source 1..23: mol_type = other DNA; note = Description of Artificial Sequence: Synthetic oligonucleotide
aagatacatgaatggccaacgcg

SEQ ID NO: 1336 - DNA, 23 bp, synthetic construct
  source 1..23: mol_type = other DNA; note = Description of Artificial Sequence: Synthetic oligonucleotide
cagagacctgcatagcactgagg

SEQ ID NO: 1337 - DNA, 23 bp, synthetic construct
  source 1..23: mol_type = other DNA; note = Description of Artificial Sequence: Synthetic oligonucleotide
aagatatctgaaaatccctgcgc

SEQ ID NO: 1338 - DNA, 24 bp, synthetic construct
  source 1..24: mol_type = other DNA; note = Description of Artificial Sequence: Synthetic oligonucleotide
aagaacactgagaaaaccctctgg

SEQ ID NO: 1339 - DNA, 23 bp, synthetic construct
  source 1..23: mol_type = other DNA; note = Description of Artificial Sequence: Synthetic oligonucleotide
aagaaacctccatatccatcgtg

SEQ ID NO: 1340 - DNA, 23 bp, synthetic construct
  source 1..23: mol_type = other DNA; note = Description of Artificial Sequence: Synthetic oligonucleotide
aaggtaccttaacaacattttgg

SEQ ID NO: 1341 - DNA, 23 bp, synthetic construct
  source 1..23: mol_type = other DNA; note = Description of Artificial Sequence: Synthetic oligonucleotide
aaggtgactgaaggacccttggg

SEQ ID NO: 1342 - DNA, 23 bp, synthetic construct
  source 1..23: mol_type = other DNA; note = Description of Artificial Sequence: Synthetic oligonucleotide
acgataactgaacagctctcaag

SEQ ID NO: 1343 - DNA, 23 bp, synthetic construct
  source 1..23: mol_type = other DNA; note = Description of Artificial Sequence: Synthetic oligonucleotide
aagagggcttaataaccttcaag

SEQ ID NO: 1344 - DNA, 23 bp, synthetic construct
  source 1..23: mol_type = other DNA; note = Description of Artificial Sequence: Synthetic oligonucleotide
aagataactggatagctctatga

SEQ ID NO: 1345 - DNA, 22 bp, synthetic construct
  source 1..22: mol_type = other DNA; note = Description of Artificial Sequence: Synthetic oligonucleotide
aagattcagcaataccctctgg

SEQ ID NO: 1346 - DNA, 22 bp, synthetic construct
  source 1..22: mol_type = other DNA; note = Description of Artificial Sequence: Synthetic oligonucleotide
caaaaaccagaaaaccctcagg

SEQ ID NO: 1347 - DNA, 23 bp, synthetic construct
  source 1..23: mol_type = other DNA; note = Description of Artificial Sequence: Synthetic oligonucleotide
catataccaaaataacccatggg

SEQ ID NO: 1348 - DNA, 21 bp, synthetic construct
  source 1..21: mol_type = other DNA; note = Description of Artificial Sequence: Synthetic oligonucleotide
aaaatacaaataaccctcaga

SEQ ID NO: 1349 - DNA, 23 bp, synthetic construct
  source 1..23: mol_type = other DNA; note = Description of Artificial Sequence: Synthetic oligonucleotide
aaaatacctgaataaacctgaag

SEQ ID NO: 1350 - DNA, 23 bp, synthetic construct
  source 1..23: mol_type = other DNA; note = Description of Artificial Sequence: Synthetic oligonucleotide
aagataacttaataggcctccac

SEQ ID NO: 1351 - DNA, 23 bp, synthetic construct
  source 1..23: mol_type = other DNA; note = Description of Artificial Sequence: Synthetic oligonucleotide
aagatggctgaaaaagcctttcg

SEQ ID NO: 1352 - DNA, 22 bp, synthetic construct
  source 1..22: mol_type = other DNA; note = Description of Artificial Sequence: Synthetic oligonucleotide
aagttaccagataacccacagg

SEQ ID NO: 1353 - DNA, 23 bp, synthetic construct
  source 1..23: mol_type = other DNA; note = Description of Artificial Sequence: Synthetic oligonucleotide
cagatacctggttaaacatcacg

SEQ ID NO: 1354 - DNA, 23 bp, synthetic construct
  source 1..23: mol_type = other DNA; note = Description of Artificial Sequence: Synthetic oligonucleotide
aagatacatgaatggccaacagg

SEQ ID NO: 1355 - DNA, 23 bp, synthetic construct
  source 1..23: mol_type = other DNA; note = Description of Artificial Sequence: Synthetic oligonucleotide
aagctaccagcatagcccactag

SEQ ID NO: 1356 - DNA, 23 bp, synthetic construct
  source 1..23: mol_type = other DNA; note = Description of Artificial Sequence: Synthetic oligonucleotide
aagaaagctggaaaacactccag

SEQ ID NO: 1357 - DNA, 23 bp, synthetic construct
  source 1..23: mol_type = other DNA; note = Description of Artificial Sequence: Synthetic oligonucleotide
aagatgcctgagtctcccccgtg

SEQ ID NO: 1358 - DNA, 23 bp, synthetic construct
  source 1..23: mol_type = other DNA; note = Description of Artificial Sequence: Synthetic oligonucleotide
aaggaaactgaataaccctcaga

SEQ ID NO: 1359 - DNA, 23 bp, synthetic construct
  source 1..23: mol_type = other DNA; note = Description of Artificial Sequence: Synthetic oligonucleotide
ctgagaactgaataaacctcgag

SEQ ID NO: 1360 - DNA, 23 bp, synthetic construct
  source 1..23: mol_type = other DNA; note = Description of Artificial Sequence: Synthetic oligonucleotide
aaggttacagaataaaactctgg

SEQ ID NO: 1361 - DNA, 23 bp, synthetic construct
  source 1..23: mol_type = other DNA; note = Description of Artificial Sequence: Synthetic oligonucleotide
caggatactgaataaccctcaga

SEQ ID NO: 1362 - DNA, 23 bp, synthetic construct
  source 1..23: mol_type = other DNA; note = Description of Artificial Sequence: Synthetic oligonucleotide
ccattacatgaataaccttcagg

SEQ ID NO: 1363 - DNA, 23 bp, synthetic construct
  source 1..23: mol_type = other DNA; note = Description of Artificial Sequence: Synthetic oligonucleotide
aagacacctggataaccatcagg

SEQ ID NO: 1364 - DNA, 21 bp, synthetic construct
  source 1..21: mol_type = other DNA; note = Description of Artificial Sequence: Synthetic oligonucleotide
aaattatgaaaaaccctcagg

SEQ ID NO: 1365 - DNA, 22 bp, synthetic construct
  source 1..22: mol_type = other DNA; note = Description of Artificial Sequence: Synthetic oligonucleotide
aagatacttgacaactctctga

SEQ ID NO: 1366 - DNA, 23 bp, synthetic construct
  source 1..23: mol_type = other DNA; note = Description of Artificial Sequence: Synthetic oligonucleotide
aagatagatgaatgacccactac

SEQ ID NO: 1367 - DNA, 23 bp, synthetic construct
  source 1..23: mol_type = other DNA; note = Description of Artificial Sequence: Synthetic oligonucleotide
aagatacttaaatgatccttggc

SEQ ID NO: 1368 - DNA, 23 bp, synthetic construct
  source 1..23: mol_type = other DNA; note = Description of Artificial Sequence: Synthetic oligonucleotide
aatatacctaaataacttacagc

SEQ ID NO: 1369 - DNA, 23 bp, synthetic construct
  source 1..23: mol_type = other DNA; note = Description of Artificial Sequence: Synthetic oligonucleotide
aagataactggatagccatatgc

SEQ ID NO: 1370 - DNA, 23 bp, synthetic construct
  source 1..23: mol_type = other DNA; note = Description of Artificial Sequence: Synthetic oligonucleotide
aacaaacatgaaaaacactcagc

SEQ ID NO: 1371 - DNA, 23 bp, synthetic construct
  source 1..23: mol_type = other DNA; note = Description of Artificial Sequence: Synthetic oligonucleotide
aagatacctaaatatatatctga

SEQ ID NO: 1372 - DNA, 23 bp, synthetic construct
  source 1..23: mol_type = other DNA; note = Description of Artificial Sequence: Synthetic oligonucleotide
aggatgactgaaaaatccccagg

SEQ ID NO: 1373 - DNA, 23 bp, synthetic construct
  source 1..23: mol_type = other DNA; note = Description of Artificial Sequence: Synthetic oligonucleotide
aagatgactgcttaacccccagt

SEQ ID NO: 1374 - DNA, 23 bp, synthetic construct
  source 1..23: mol_type = other DNA; note = Description of Artificial Sequence: Synthetic oligonucleotide
aagataccaaaatgtaactcagg

SEQ ID NO: 1375 - DNA, 23 bp, synthetic construct
  source 1..23: mol_type = other DNA; note = Description of Artificial Sequence: Synthetic oligonucleotide
aagataacttaaaaactctaagg

SEQ ID NO: 1376 - DNA, 23 bp, synthetic construct
  source 1..23: mol_type = other DNA; note = Description of Artificial Sequence: Synthetic oligonucleotide
acagaacctgaatagccctaggg

SEQ ID NO: 1377 - DNA, 24 bp, synthetic construct
  source 1..24: mol_type = other DNA; note = Description of Artificial Sequence: Synthetic oligonucleotide
aagatgcctgaactagtccttggg

SEQ ID NO: 1378 - DNA, 22 bp, synthetic construct
  source 1..22: mol_type = other DNA; note = Description of Artificial Sequence: Synthetic oligonucleotide
aaaataactgaaaaccctcaac

SEQ ID NO: 1379 - DNA, 23 bp, synthetic construct
  source 1..23: mol_type = other DNA; note = Description of Artificial Sequence: Synthetic oligonucleotide
aacatacatccacaaccatcagg

SEQ ID NO: 1380 - DNA, 23 bp, synthetic construct
  source 1..23: mol_type = other DNA; note = Description of Artificial Sequence: Synthetic oligonucleotide
aagatacatgaataagcaccatg

SEQ ID NO: 1381 - DNA, 23 bp, synthetic construct
  source 1..23: mol_type = other DNA; note = Description of Artificial Sequence: Synthetic oligonucleotide
catatacttgaataaccaactgg

SEQ ID NO: 1382 - DNA, 21 bp, synthetic construct
  source 1..21: mol_type = other DNA; note = Description of Artificial Sequence: Synthetic oligonucleotide
aagatcttaataatcatctgg

SEQ ID NO: 1383 - DNA, 21 bp, synthetic construct
  source 1..21: mol_type = other DNA; note = Description of Artificial Sequence: Synthetic oligonucleotide
aagaaacccgagtccctctgg

SEQ ID NO: 1384 - DNA, 22 bp, synthetic construct
  source 1..22: mol_type = other DNA; note = Description of Artificial Sequence: Synthetic oligonucleotide
aagatatctcatatcactcagg

SEQ ID NO: 1385 - DNA, 24 bp, synthetic construct
  source 1..24: mol_type = other DNA; note = Description of Artificial Sequence: Synthetic oligonucleotide
acaataccttgaataacccacaag

SEQ ID NO: 1386 - DNA, 23 bp, synthetic construct
  source 1..23: mol_type = other DNA; note = Description of Artificial Sequence: Synthetic oligonucleotide
aagatacataaataacctcacag

SEQ ID NO: 1387 - DNA, 22 bp, synthetic construct
  source 1..22: mol_type = other DNA; note = Description of Artificial Sequence: Synthetic oligonucleotide
aagtaacagaataatcctaagg

SEQ ID NO: 1388 - DNA, 23 bp, synthetic construct
  source 1..23: mol_type = other DNA; note = Description of Artificial Sequence: Synthetic oligonucleotide
gaataacctgaataacccccaga

SEQ ID NO: 1389 - DNA, 23 bp, synthetic construct
  source 1..23: mol_type = other DNA; note = Description of Artificial Sequence: Synthetic oligonucleotide
aaattacctaaataacccaaggc

SEQ ID NO: 1390 - DNA, 23 bp, synthetic construct
  source 1..23: mol_type = other DNA; note = Description of Artificial Sequence: Synthetic oligonucleotide
aaggtacctgaatattgttctgt

SEQ ID NO: 1391 - DNA, 23 bp, synthetic construct
  source 1..23: mol_type = other DNA; note = Description of Artificial Sequence: Synthetic oligonucleotide
aagacagctgggtatctctctgg

SEQ ID NO: 1392 - DNA, 22 bp, synthetic construct
  source 1..22: mol_type = other DNA; note = Description of Artificial Sequence: Synthetic oligonucleotide
ctgatagtgaataagcctcagg

SEQ ID NO: 1393 - DNA, 22 bp, synthetic construct
  source 1..22: mol_type = other DNA; note = Description of Artificial Sequence: Synthetic oligonucleotide
atgatagtgaataagtctcagg

SEQ ID NO: 1394 - DNA, 23 bp, synthetic construct
  source 1..23: mol_type = other DNA; note = Description of Artificial Sequence: Synthetic oligonucleotide
tagatatttgaataaccatttag

SEQ ID NO: 1395 - DNA, 24 bp, synthetic construct
  source 1..24: mol_type = other DNA; note = Description of Artificial Sequence: Synthetic oligonucleotide
aagatgccctgagcaaccctcctg

SEQ ID NO: 1396 - DNA, 23 bp, synthetic construct
  source 1..23: mol_type = other DNA; note = Description of Artificial Sequence: Synthetic oligonucleotide
atgatctctgaatggccttcagg

SEQ ID NO: 1397 - DNA, 23 bp, synthetic construct
  source 1..23: mol_type = other DNA; note = Description of Artificial Sequence: Synthetic oligonucleotide
cgtgtacctgaatgacccacggg

SEQ ID NO: 1398 - DNA, 22 bp, synthetic construct
  source 1..22: mol_type = other DNA; note = Description of Artificial Sequence: Synthetic oligonucleotide
tagatactgagaaagcctctgg

SEQ ID NO: 1399 - DNA, 22 bp, synthetic construct
  source 1..22: mol_type = other DNA; note = Description of Artificial Sequence: Synthetic oligonucleotide
aagttatctaaaaaccctctag

SEQ ID NO: 1400 - DNA, 23 bp, synthetic construct
  source 1..23: mol_type = other DNA; note = Description of Artificial Sequence: Synthetic oligonucleotide
aagatatctgaaaaattctcaaa

SEQ ID NO: 1401 - DNA, 22 bp, synthetic construct
  source 1..22: mol_type = other DNA; note = Description of Artificial Sequence: Synthetic oligonucleotide
aagtaaactgaaaaccttctgg

SEQ ID NO: 1402 - DNA, 23 bp, synthetic construct
  source 1..23: mol_type = other DNA; note = Description of Artificial Sequence: Synthetic oligonucleotide
aatataactgaataaaactcttt

SEQ ID NO: 1403 - DNA, 22 bp, synthetic construct
  source 1..22: mol_type = other DNA; note = Description of Artificial Sequence: Synthetic oligonucleotide
tagctacatgaaaaccctgggg

SEQ ID NO: 1404 - DNA, 22 bp, synthetic construct
  source 1..22: mol_type = other DNA; note = Description of Artificial Sequence: Synthetic oligonucleotide
ataatactgaataaccctttga

SEQ ID NO: 1405 - DNA, 22 bp, synthetic construct
  source 1..22: mol_type = other DNA; note = Description of Artificial Sequence: Synthetic oligonucleotide
cttttacctgaataccctcagg

SEQ ID NO: 1406 - DNA, 23 bp, synthetic construct
  source 1..23: mol_type = other DNA; note = Description of Artificial Sequence: Synthetic oligonucleotide
aagatgactgaagagcccttggg

SEQ ID NO: 1407 - DNA, 23 bp, synthetic construct
  source 1..23: mol_type = other DNA; note = Description of Artificial Sequence: Synthetic oligonucleotide
atgagcccagaagaaccctcttg

SEQ ID NO: 1408 - DNA, 23 bp, synthetic construct
  source 1..23: mol_type = other DNA; note = Description of Artificial Sequence: Synthetic oligonucleotide
gagatacctgaaaaatcctggct

SEQ ID NO: 1409 - DNA, 23 bp, synthetic construct
  source 1..23: mol_type = other DNA; note = Description of Artificial Sequence: Synthetic oligonucleotide
tgtataccagaatcaccctaggg

SEQ ID NO: 1410 - DNA, 22 bp, synthetic construct
  source 1..22: mol_type = other DNA; note = Description of Artificial Sequence: Synthetic oligonucleotide
cagatacctggtaactctcagg

SEQ ID NO: 1411 - DNA, 23 bp, synthetic construct
  source 1..23: mol_type = other DNA; note = Description of Artificial Sequence: Synthetic oligonucleotide
aaattacctggacaaccttcgcg

SEQ ID NO: 1412 - DNA, 23 bp, synthetic construct
  source 1..23: mol_type = other DNA; note = Description of Artificial Sequence: Synthetic oligonucleotide
aagatacatgaataaccttgtca

SEQ ID NO: 1413 - DNA, 22 bp, synthetic construct
  source 1..22: mol_type = other DNA; note = Description of Artificial Sequence: Synthetic oligonucleotide
aagatacattagaaccctctgt

SEQ ID NO: 1414 - DNA, 23 bp, synthetic construct
  source 1..23: mol_type = other DNA; note = Description of Artificial Sequence: Synthetic oligonucleotide
aagatatatgaatggccctgaag

SEQ ID NO: 1415 - DNA, 23 bp, synthetic construct
  source 1..23: mol_type = other DNA; note = Description of Artificial Sequence: Synthetic oligonucleotide
aagatacacaaacagcccacagg

SEQ ID NO: 1416 - DNA, 23 bp, synthetic construct
  source 1..23: mol_type = other DNA; note = Description of Artificial Sequence: Synthetic oligonucleotide
aacatacctgaaaaaacctcagc

SEQ ID NO: 1417 - DNA, 23 bp, synthetic construct
  source 1..23: mol_type = other DNA; note = Description of Artificial Sequence: Synthetic oligonucleotide
aggattccagaagaagcctgtgg

SEQ ID NO: 1418 - DNA, 23 bp, synthetic construct
  source 1..23: mol_type = other DNA; note = Description of Artificial Sequence: Synthetic oligonucleotide
aagaaacctggatttacctctgt

SEQ ID NO: 1419 - DNA, 23 bp, synthetic construct
  source 1..23: mol_type = other DNA; note = Description of Artificial Sequence: Synthetic oligonucleotide
agaatagctgaaggaccctgggg

SEQ ID NO: 1420 - DNA, 23 bp, synthetic construct
  source 1..23: mol_type = other DNA; note = Description of Artificial Sequence: Synthetic oligonucleotide
aggatgccagggtaacccactgg

SEQ ID NO: 1421 - DNA, 22 bp, synthetic construct
  source 1..22: mol_type = other DNA; note = Description of Artificial Sequence: Synthetic oligonucleotide
taggtacctgaatgacctcagg

SEQ ID NO: 1422 - DNA, 23 bp, synthetic construct
  source 1..23: mol_type = other DNA; note = Description of Artificial Sequence: Synthetic oligonucleotide
aagatacctgacataccctcccc

SEQ ID NO: 1423 - DNA, 23 bp, synthetic construct
  source 1..23: mol_type = other DNA; note = Description of Artificial Sequence: Synthetic oligonucleotide
gagatacatgaatgaccctttca

SEQ ID NO: 1424 - DNA, 22 bp, synthetic construct
  source 1..22: mol_type = other DNA; note = Description of Artificial Sequence: Synthetic oligonucleotide
gtgatagtgaataactctcagg

SEQ ID NO: 1425 - DNA, 23 bp, synthetic construct
  source 1..23: mol_type = other DNA; note = Description of Artificial Sequence: Synthetic oligonucleotide
aggaaagctgaataactctctta

SEQ ID NO: 1426 - DNA, 23 bp, synthetic construct
  source 1..23: mol_type = other DNA; note = Description of Artificial Sequence: Synthetic oligonucleotide
aagaaacgctaataaacctcagg

SEQ ID NO: 1427 - DNA, 23 bp, synthetic construct
  source 1..23: mol_type = other DNA; note = Description of Artificial Sequence: Synthetic oligonucleotide
aacattccacactaaccatcagg

SEQ ID NO: 1428 - DNA, 23 bp, synthetic construct
  source 1..23: mol_type = other DNA; note = Description of Artificial Sequence: Synthetic oligonucleotide
aagatacgagagaaacgcccggg

SEQ ID NO: 1429 - DNA, 23 bp, synthetic construct
  source 1..23: mol_type = other DNA; note = Description of Artificial Sequence: Synthetic oligonucleotide
caattaccagaataacccacaga

SEQ ID NO: 1430 - DNA, 22 bp, synthetic construct
  source 1..22: mol_type = other DNA; note = Description of Artificial Sequence: Synthetic oligonucleotide
aagagatttgataaccttctgg

SEQ ID NO: 1431 - DNA, 23 bp, synthetic construct
  source 1..23: mol_type = other DNA; note = Description of Artificial Sequence: Synthetic oligonucleotide
aagattcctgattcagcctctga

SEQ ID NO: 1432 - DNA, 23 bp, synthetic construct
  source 1..23: mol_type = other DNA; note = Description of Artificial Sequence: Synthetic oligonucleotide
aagaagccagactaacactgggg

SEQ ID NO: 1433 - DNA, 23 bp, synthetic construct
  source 1..23: mol_type = other DNA; note = Description of Artificial Sequence: Synthetic oligonucleotide
caaataaatgaataatcatcagg

SEQ ID NO: 1434 - DNA, 23 bp, synthetic construct
  source 1..23: mol_type = other DNA; note = Description of Artificial Sequence: Synthetic oligonucleotide
aagaggcctgactctccctccag

SEQ ID NO: 1435 - DNA, 23 bp, synthetic construct
  source 1..23: mol_type = other DNA; note = Description of Artificial Sequence: Synthetic oligonucleotide
aagatacttgtataacctcaaga

SEQ ID NO: 1436 - DNA, 23 bp, synthetic construct
  source 1..23: mol_type = other DNA; note = Description of Artificial Sequence: Synthetic oligonucleotide
aacatacctgaacaaccctcagg

SEQ ID NO: 1437 - DNA, 23 bp, synthetic construct
  source 1..23: mol_type = other DNA; note = Description of Artificial Sequence: Synthetic oligonucleotide
aagatatttatatacccctccag

SEQ ID NO: 1438 - DNA, 23 bp, synthetic construct
  source 1..23: mol_type = other DNA; note = Description of Artificial Sequence: Synthetic oligonucleotide
tagttacatgaagaaacctctag

SEQ ID NO: 1439 - DNA, 24 bp, synthetic construct
  source 1..24: mol_type = other DNA; note = Description of Artificial Sequence: Synthetic oligonucleotide
aagatacatgcgtgaagcctctgg

SEQ ID NO: 1440 - DNA, 23 bp, synthetic construct
  source 1..23: mol_type = other DNA; note = Description of Artificial Sequence: Synthetic oligonucleotide
atggtacctgtacaaacttcagg

SEQ ID NO: 1441 - DNA, 22 bp, synthetic construct
  source 1..22: mol_type = other DNA; note = Description of Artificial Sequence: Synthetic oligonucleotide
aaggcacctgaaagctctctgg

SEQ ID NO: 1442 - DNA, 23 bp, synthetic construct
  source 1..23: mol_type = other DNA; note = Description of Artificial Sequence: Synthetic oligonucleotide
gagatacctggaaaaccccaggc

SEQ ID NO: 1443 - DNA, 23 bp, synthetic construct
  source 1..23: mol_type = other DNA; note = Description of Artificial Sequence: Synthetic oligonucleotide
atgttaacagaagacccctctgg

SEQ ID NO: 1444 - DNA, 23 bp, synthetic construct
  source 1..23: mol_type = other DNA; note = Description of Artificial Sequence: Synthetic oligonucleotide
tagataactggataccccactgc

SEQ ID NO: 1445 - DNA, 23 bp, synthetic construct
  source 1..23: mol_type = other DNA; note = Description of Artificial Sequence: Synthetic oligonucleotide
aaaattcctgtccagccctctgg

SEQ ID NO: 1446 - DNA, 23 bp, synthetic construct
  source 1..23: mol_type = other DNA; note = Description of Artificial Sequence: Synthetic oligonucleotide
aggatgcctgaaaaaacctcaaa

SEQ ID NO: 1447 - DNA, 22 bp, synthetic construct
  source 1..22: mol_type = other DNA; note = Description of Artificial Sequence: Synthetic oligonucleotide
aagatacatgagaaccctttgc

SEQ ID NO: 1448 - DNA, 23 bp, synthetic construct
  source 1..23: mol_type = other DNA; note = Description of Artificial Sequence: Synthetic oligonucleotide
aagatacatgaatagccctccac

SEQ ID NO: 1449 - DNA, 23 bp, synthetic construct
  source 1..23: mol_type = other DNA; note = Description of Artificial Sequence: Synthetic oligonucleotide
taaatacctgaataacccatagt

SEQ ID NO: 1450 - DNA, 23 bp, synthetic construct
  source 1..23: mol_type = other DNA; note = Description of Artificial Sequence: Synthetic oligonucleotide
tatatacatgtataacccacagg

SEQ ID NO: 1451 - DNA, 23 bp, synthetic construct
  source 1..23: mol_type = other DNA; note = Description of Artificial Sequence: Synthetic oligonucleotide
aagatacattcttagccctcaag

SEQ ID NO: 1452 - DNA, 23 bp, synthetic construct
  source 1..23: mol_type = other DNA; note = Description of Artificial Sequence: Synthetic oligonucleotide
aagaaaccttgtgaaccctcagt

SEQ ID NO: 1453 - DNA, 21 bp, synthetic construct
  source 1..21: mol_type = other DNA; note = Description of Artificial Sequence: Synthetic oligonucleotide
aagaaatggatagccctctgg

SEQ ID NO: 1454 - DNA, 23 bp, synthetic construct
  source 1..23: mol_type = other DNA; note = Description of Artificial Sequence: Synthetic oligonucleotide
aaaatagcttaaaaagcctgtgg

SEQ ID NO: 1455 - DNA, 23 bp, synthetic construct
  source 1..23: mol_type = other DNA; note = Description of Artificial Sequence: Synthetic oligonucleotide
agggtgccccaacaaccctcggg

SEQ ID NO: 1456 - DNA, 23 bp, synthetic construct
  source 1..23: mol_type = other DNA; note = Description of Artificial Sequence: Synthetic oligonucleotide
aagaaatgtgggtaagcctcagg

SEQ ID NO: 1457 - DNA, 23 bp, synthetic construct
  source 1..23: mol_type = other DNA; note = Description of Artificial Sequence: Synthetic oligonucleotide
atcatatctgaataactctcaac

SEQ ID NO: 1458 - DNA, 23 bp, synthetic construct
  source 1..23: mol_type = other DNA; note = Description of Artificial Sequence: Synthetic oligonucleotide
aacaagcctgtataaccctcatg

SEQ ID NO: 1459 - DNA, 22 bp, synthetic construct
  source 1..22: mol_type = other DNA; note = Description of Artificial Sequence: Synthetic oligonucleotide
gtgatactgaataagtctcagg

SEQ ID NO: 1460 - DNA, 23 bp, synthetic construct
  source 1..23: mol_type = other DNA; note = Description of Artificial Sequence: Synthetic oligonucleotide
aacatacatgaataatcttcaaa

SEQ ID NO: 1461 - DNA, 23 bp, synthetic construct
  source 1..23: mol_type = other DNA; note = Description of Artificial Sequence: Synthetic oligonucleotide
attatacctcaatatccctctgg

SEQ ID NO: 1462 - DNA, 23 bp, synthetic construct
  source 1..23: mol_type = other DNA; note = Description of Artificial Sequence: Synthetic oligonucleotide
aagatacatgaaaaacactggct

SEQ ID NO: 1463 - DNA, 23 bp, synthetic construct
  source 1..23: mol_type = other DNA; note = Description of Artificial Sequence: Synthetic oligonucleotide
aagatacctgtacaacactatac

SEQ ID NO: 1464 - DNA, 23 bp, synthetic construct
  source 1..23: mol_type = other DNA; note = Description of Artificial Sequence: Synthetic oligonucleotide
cagatacctcatttaccctgatg

SEQ ID NO: 1465 - DNA, 21 bp, synthetic construct
  source 1..21: mol_type = other DNA; note = Description of Artificial Sequence: Synthetic oligonucleotide
cagatacttataaccctctgg

SEQ ID NO: 1466 - DNA, 24 bp, synthetic construct
  source 1..24: mol_type = other DNA; note = Description of Artificial Sequence: Synthetic oligonucleotide
aaaatacttgaaaaatccctcagt

SEQ ID NO: 1467 - DNA, 22 bp, synthetic construct
  source 1..22: mol_type = other DNA; note = Description of Artificial Sequence: Synthetic oligonucleotide
aagatcaagaataactgtcagg

SEQ ID NO: 1468 - DNA, 23 bp, synthetic construct
  source 1..23: mol_type = other DNA; note = Description of Artificial Sequence: Synthetic oligonucleotide
aagacacttgtctagtcctctgg

SEQ ID NO: 1469 - DNA, 23 bp, synthetic construct
  source 1..23: mol_type = other DNA; note = Description of Artificial Sequence: Synthetic oligonucleotide
aagaatccggaaaaaccctatgc

SEQ ID NO: 1470 - DNA, 23 bp, synthetic construct
  source 1..23: mol_type = other DNA; note = Description of Artificial Sequence: Synthetic oligonucleotide
aagacagctggagaactctcagg

SEQ ID NO: 1471 - DNA, 23 bp, synthetic construct
  source 1..23: mol_type = other DNA; note = Description of Artificial Sequence: Synthetic oligonucleotide
aagaaaaatgaacaaacctcaga

SEQ ID NO: 1472 - DNA, 23 bp, synthetic construct
  source 1..23: mol_type = other DNA; note = Description of Artificial Sequence: Synthetic oligonucleotide
aagttacgtgaataggactcagt

SEQ ID NO: 1473 - DNA, 22 bp, synthetic construct
  source 1..22: mol_type = other DNA; note = Description of Artificial Sequence: Synthetic oligonucleotide
aagataaagaacaactctctgg

SEQ ID NO: 1474 - DNA, 23 bp, synthetic construct
  source 1..23: mol_type = other DNA; note = Description of Artificial Sequence: Synthetic oligonucleotide
cagatacacagataacccccagg

SEQ ID NO: 1475 - DNA, 22 bp, synthetic construct
  source 1..22: mol_type = other DNA; note = Description of Artificial Sequence: Synthetic oligonucleotide
aagaaacttgaaaaatcccagg

SEQ ID NO: 1476 - DNA, 23 bp, synthetic construct
  source 1..23: mol_type = other DNA; note = Description of Artificial Sequence: Synthetic oligonucleotide
cagataacagaaaaaccctgttg

SEQ ID NO: 1477 - DNA, 23 bp, synthetic construct
  source 1..23: mol_type = other DNA; note = Description of Artificial Sequence: Synthetic oligonucleotide
aagatacccagatccccctccag

SEQ ID NO: 1478 - DNA, 24 bp, synthetic construct
  source 1..24: mol_type = other DNA; note = Description of Artificial Sequence: Synthetic oligonucleotide
tagatattctgaatatacctctgg

SEQ ID NO: 1479 - DNA, 24 bp, synthetic construct
  source 1..24: mol_type = other DNA; note = Description of Artificial Sequence: Synthetic oligonucleotide
cagatacatgaaataatcctccag

SEQ ID NO: 1480 - DNA, 23 bp, synthetic construct
  source 1..23: mol_type = other DNA; note = Description of Artificial Sequence: Synthetic oligonucleotide
agtcatcctgaataaccctcatg

SEQ ID NO: 1481 - DNA, 22 bp, synthetic construct
  source 1..22: mol_type = other DNA; note = Description of Artificial Sequence: Synthetic oligonucleotide
gccataccaaataaccctctgg

SEQ ID NO: 1482 - DNA, 23 bp, synthetic construct
  source 1..23: mol_type = other DNA; note = Description of Artificial Sequence: Synthetic oligonucleotide
aagatacctggataagcaactgc

SEQ ID NO: 1483 - DNA, 23 bp, synthetic construct
  source 1..23: mol_type = other DNA; note = Description of Artificial Sequence: Synthetic oligonucleotide
aagaaacctatagaaccctgagt

SEQ ID NO: 1484 - DNA, 23 bp, synthetic construct
  source 1..23: mol_type = other DNA; note = Description of Artificial Sequence: Synthetic oligonucleotide
aagaaaacagaataaacctctaa

SEQ ID NO: 1485 - DNA, 23 bp, synthetic construct
  source 1..23: mol_type = other DNA; note = Description of Artificial Sequence: Synthetic oligonucleotide
aagataccttatcaaccctaaag

SEQ ID NO: 1486 - DNA, 23 bp, synthetic construct
  source 1..23: mol_type = other DNA; note = Description of Artificial Sequence: Synthetic oligonucleotide
cagaaatataaaaaaccctcagg

SEQ ID NO: 1487 - DNA, 23 bp, synthetic construct
  source 1..23: mol_type = other DNA; note = Description of Artificial Sequence: Synthetic oligonucleotide
aagattcaagaaagaccctctgc

SEQ ID NO: 1488 - DNA, 22 bp, synthetic construct
  source 1..22: mol_type = other DNA; note = Description of Artificial Sequence: Synthetic oligonucleotide
taaatactgaataaccctgtga

SEQ ID NO: 1489 - DNA, 23 bp, synthetic construct
  source 1..23: mol_type = other DNA; note = Description of Artificial Sequence: Synthetic oligonucleotide
gagatctcagcataactctctgg

SEQ ID NO: 1490 - DNA, 22 bp, synthetic construct
  source 1..22: mol_type = other DNA; note = Description of Artificial Sequence: Synthetic oligonucleotide
aagataccttatttacctatgg

SEQ ID NO: 1491 - DNA, 23 bp, synthetic construct
  source 1..23: mol_type = other DNA; note = Description of Artificial Sequence: Synthetic oligonucleotide
ttcatacctaaataacccttaga

SEQ ID NO: 1492 - DNA, 23 bp, synthetic construct
  source 1..23: mol_type = other DNA; note = Description of Artificial Sequence: Synthetic oligonucleotide
aagatacctgaataacctaagac

SEQ ID NO: 1493 - DNA, 22 bp, synthetic construct
  source 1..22: mol_type = other DNA; note = Description of Artificial Sequence: Synthetic oligonucleotide
aagatacataataatcatctgt

SEQ ID NO: 1494 - DNA, 23 bp, synthetic construct
  source 1..23: mol_type = other DNA; note = Description of Artificial Sequence: Synthetic oligonucleotide
aagagcccttgctaaccatctgg

SEQ ID NO: 1495 - DNA, 23 bp, synthetic construct
  source 1..23: mol_type = other DNA; note = Description of Artificial Sequence: Synthetic oligonucleotide
aaagtatctgaataacacttctg

SEQ ID NO: 1496 - DNA, 23 bp, synthetic construct
  source 1..23: mol_type = other DNA; note = Description of Artificial Sequence: Synthetic oligonucleotide
agcctacctaaatagccctaggg

SEQ ID NO: 1497 - DNA, 23 bp, synthetic construct
  source 1..23: mol_type = other DNA; note = Description of Artificial Sequence: Synthetic oligonucleotide
cagacacctgaatgaccccaggc

SEQ ID NO: 1498 - DNA, 23 bp, synthetic construct
  source 1..23: mol_type = other DNA; note = Description of Artificial Sequence: Synthetic oligonucleotide
cactgacctgaatcacccccagg

SEQ ID NO: 1499 - DNA, 22 bp, synthetic construct
  source 1..22: mol_type = other DNA; note = Description of Artificial Sequence: Synthetic oligonucleotide
gaaatactgaataatcctcagg

SEQ ID NO: 1500 - DNA, 23 bp, synthetic construct
  source 1..23: mol_type = other DNA; note = Description of Artificial Sequence: Synthetic oligonucleotide
aagacacagaaagatccctctgg

SEQ ID NO: 1501 - DNA, 23 bp, synthetic construct
  source 1..23: mol_type = other DNA; note = Description of Artificial Sequence: Synthetic oligonucleotide
aaggtaccagatgagcccttggg

SEQ ID NO: 1502 - DNA, 23 bp, synthetic construct
  source 1..23: mol_type = other DNA; note = Description of Artificial Sequence: Synthetic oligonucleotide
aggatacctcccaaatcctctgg

SEQ ID NO: 1503 - DNA, 23 bp, synthetic construct
  source 1..23: mol_type = other DNA; note = Description of Artificial Sequence: Synthetic oligonucleotide
caaatacttgaaaagccctcgag

SEQ ID NO: 1504 - DNA, 21 bp, synthetic construct
  source 1..21: mol_type = other DNA; note = Description of Artificial Sequence: Synthetic oligonucleotide
taaatatgaatgaccctcagg

SEQ ID NO: 1505 - DNA, 23 bp, synthetic construct
  source 1..23: mol_type = other DNA; note = Description of Artificial Sequence: Synthetic oligonucleotide
cagatatctgaagatccctccag

SEQ ID NO: 1506 - DNA, 23 bp, synthetic construct
  source 1..23: mol_type = other DNA; note = Description of Artificial Sequence: Synthetic oligonucleotide
acagaacctgtataaccctccag

SEQ ID NO: 1507 - DNA, 24 bp, synthetic construct
  source 1..24: mol_type = other DNA; note = Description of Artificial Sequence: Synthetic oligonucleotide
aagaaatctagaatacccctaggg

SEQ ID NO: 1508 - DNA, 25 bp, synthetic construct
  source 1..25: mol_type = other DNA; note = Description of Artificial Sequence: Synthetic oligonucleotide
aagttaaatgaatgaccctgaccgg

SEQ ID NO: 1509 - DNA, 23 bp, synthetic construct
  source 1..23: mol_type = other DNA; note = Description of Artificial Sequence: Synthetic oligonucleotide
aagatatttgatcaacccttgga

SEQ ID NO: 1510 - DNA, 23 bp, synthetic construct
  source 1..23: mol_type = other DNA; note = Description of Artificial Sequence: Synthetic oligonucleotide
aggtaacatcaatatccctccgg

SEQ ID NO: 1511 - DNA, 23 bp, synthetic construct
  source 1..23: mol_type = other DNA; note = Description of Artificial Sequence: Synthetic oligonucleotide
aacgtacctgaataactcataag

SEQ ID NO: 1512 - DNA, 23 bp, synthetic construct
  source 1..23: mol_type = other DNA; note = Description of Artificial Sequence: Synthetic oligonucleotide
aagataccagcatagtcctcctg

SEQ ID NO: 1513 - DNA, 23 bp, synthetic construct
  source 1..23: mol_type = other DNA; note = Description of Artificial Sequence: Synthetic oligonucleotide
aagatatctgaagagccttccca

SEQ ID NO: 1514 - DNA, 23 bp, synthetic construct
  source 1..23: mol_type = other DNA; note = Description of Artificial Sequence: Synthetic oligonucleotide
aagatacctgaatttaccatgag

SEQ ID NO: 1515 - DNA, 23 bp, synthetic construct
  source 1..23: mol_type = other DNA; note = Description of Artificial Sequence: Synthetic oligonucleotide
aagatactttattaactctcaag

SEQ ID NO: 1516 - DNA, 23 bp, synthetic construct
  source 1..23: mol_type = other DNA; note = Description of Artificial Sequence: Synthetic oligonucleotide
tagatatgtgaattaacttctgg

SEQ ID NO: 1517 - DNA, 23 bp, synthetic construct
  source 1..23: mol_type = other DNA; note = Description of Artificial Sequence: Synthetic oligonucleotide
aagatacctgatcacacatcaga

SEQ ID NO: 1518 - DNA, 23 bp, synthetic construct
  source 1..23: mol_type = other DNA; note = Description of Artificial Sequence: Synthetic oligonucleotide
cagatacctcaataaccctgatg

SEQ ID NO: 1519 - DNA, 23 bp, synthetic construct
  source 1..23: mol_type = other DNA; note = Description of Artificial Sequence: Synthetic oligonucleotide
aagatacttggataatgcttggt

SEQ ID NO: 1520 - DNA, 23 bp, synthetic construct
  source 1..23: mol_type = other DNA; note = Description of Artificial Sequence: Synthetic oligonucleotide
aaggtatctgaattaccctcaag

SEQ ID NO: 1521 - DNA, 23 bp, synthetic construct
  source 1..23: mol_type = other DNA; note = Description of Artificial Sequence: Synthetic oligonucleotide
ctgagacctgagtaactctcatg

SEQ ID NO: 1522 - DNA, 22 bp, synthetic construct
  source 1..22: mol_type = other DNA; note = Description of Artificial Sequence: Synthetic oligonucleotide
aagaaaatgaataaccctacag

SEQ ID NO: 1523 - DNA, 23 bp, synthetic construct
  source 1..23: mol_type = other DNA; note = Description of Artificial Sequence: Synthetic oligonucleotide
tagatacatgaaaaacccttcag

SEQ ID NO: 1524 - DNA, 23 bp, synthetic construct
  source 1..23: mol_type = other DNA; note = Description of Artificial Sequence: Synthetic oligonucleotide
tagatgcttaaatgaccctctgc

SEQ ID NO: 1525 - DNA, 23 bp, synthetic construct
  source 1..23: mol_type = other DNA; note = Description of Artificial Sequence: Synthetic oligonucleotide
taggatcctggataaccctccag

SEQ ID NO: 1526 - DNA, 23 bp, synthetic construct
  source 1..23: mol_type = other DNA; note = Description of Artificial Sequence: Synthetic oligonucleotide
ttgatacttgaataaccatctga

SEQ ID NO: 1527 - DNA, 21 bp, synthetic construct
  source 1..21: mol_type = other DNA; note = Description of Artificial Sequence: Synthetic oligonucleotide
aagaaaccaataaccctcagg

SEQ ID NO: 1528 - DNA, 23 bp, synthetic construct
  source 1..23: mol_type = other DNA; note = Description of Artificial Sequence: Synthetic oligonucleotide
aaggaaccagaattactctcagt

SEQ ID NO: 1529 - DNA, 23 bp, synthetic construct
  source 1..23: mol_type = other DNA; note = Description of Artificial Sequence: Synthetic oligonucleotide
cagaaaccagaataaccttcagg

SEQ ID NO: 1530 - DNA, 23 bp, synthetic construct
  source 1..23: mol_type = other DNA; note = Description of Artificial Sequence: Synthetic oligonucleotide
aaaattcctgaatagctctctgg

SEQ ID NO: 1531 - DNA, 22 bp, synthetic construct
  source 1..22: mol_type = other DNA; note = Description of Artificial Sequence: Synthetic oligonucleotide
atgatagtgaataacactcatg

SEQ ID NO: 1532 - DNA, 22 bp, synthetic construct
  source 1..22: mol_type = other DNA; note = Description of Artificial Sequence: Synthetic oligonucleotide
aggatacagaatatccatctgg

SEQ ID NO: 1533 - DNA, 23 bp, synthetic construct
  source 1..23: mol_type = other DNA; note = Description of Artificial Sequence: Synthetic oligonucleotide
aatctacctgaaaagccctctgg

SEQ ID NO: 1534 - DNA, 22 bp, synthetic construct
  source 1..22: mol_type = other DNA; note = Description of Artificial Sequence: Synthetic oligonucleotide
ctgataccagataaccctgagg

SEQ ID NO: 1535 - DNA, 23 bp, synthetic construct
  source 1..23: mol_type = other DNA; note = Description of Artificial Sequence: Synthetic oligonucleotide
cagatatctgaataacccaccag

SEQ ID NO: 1536 - DNA, 23 bp, synthetic construct
  source 1..23: mol_type = other DNA; note = Description of Artificial Sequence: Synthetic oligonucleotide
aagatacatggataatgttcagg

SEQ ID NO: 1537 - DNA, 23 bp, synthetic construct
  source 1..23: mol_type = other DNA; note = Description of Artificial Sequence: Synthetic oligonucleotide
aagaaacatgaagaaaactcagc

SEQ ID NO: 1538 - DNA, 23 bp, synthetic construct
  source 1..23: mol_type = other DNA; note = Description of Artificial Sequence: Synthetic oligonucleotide
aaaatacatggaaaatcctcatg

SEQ ID NO: 1539 - DNA, 23 bp, synthetic construct
  source 1..23: mol_type = other DNA; note = Description of Artificial Sequence: Synthetic oligonucleotide
attatacctgaataaacctgact

SEQ ID NO: 1540 - DNA, 23 bp, synthetic construct
  source 1..23: mol_type = other DNA; note = Description of Artificial Sequence: Synthetic oligonucleotide
gatttaccagaaaaaccctctgg

SEQ ID NO: 1541 - DNA, 23 bp, synthetic construct
  source 1..23: mol_type = other DNA; note = Description of Artificial Sequence: Synthetic oligonucleotide
gattgaccagaataaccctctgg

SEQ ID NO: 1542 - DNA, 24 bp, synthetic construct
  source 1..24: mol_type = other DNA; note = Description of Artificial Sequence: Synthetic oligonucleotide
aagatacatcgaataacccttcta

SEQ ID NO: 1543 - DNA, 23 bp, synthetic construct
  source 1..23: mol_type = other DNA; note = Description of Artificial Sequence: Synthetic oligonucleotide
aaggcaactgaagatccttcagg

SEQ ID NO: 1544 - DNA, 23 bp, synthetic construct
  source 1..23: mol_type = other DNA; note = Description of Artificial Sequence: Synthetic oligonucleotide
aagatatctgaattcagctcttg

SEQ ID NO: 1545 - DNA, 23 bp, synthetic construct
  source 1..23: mol_type = other DNA; note = Description of Artificial Sequence: Synthetic oligonucleotide
aagaaaacagaataaacctctca

SEQ ID NO: 1546 - DNA, 23 bp, synthetic construct
  source 1..23: mol_type = other DNA; note = Description of Artificial Sequence: Synthetic oligonucleotide
aagatagctgatgaaatatcagg

SEQ ID NO: 1547 - DNA, 22 bp, synthetic construct
  source 1..22: mol_type = other DNA; note = Description of Artificial Sequence: Synthetic oligonucleotide
atgatagtgaataagcctcagg

SEQ ID NO: 1548 - DNA, 23 bp, synthetic construct
  source 1..23: mol_type = other DNA; note = Description of Artificial Sequence: Synthetic oligonucleotide
aagattcatgtacaaacctcatg

SEQ ID NO: 1549 - DNA, 23 bp, synthetic construct
  source 1..23: mol_type = other DNA; note = Description of Artificial Sequence: Synthetic oligonucleotide
aagacacatgaagaaaactgagg

SEQ ID NO: 1550 - DNA, 21 bp, synthetic construct
  source 1..21: mol_type = other DNA; note = Description of Artificial Sequence: Synthetic oligonucleotide
aagttgactgaaaccctctgg

SEQ ID NO: 1551 - DNA, 24 bp, synthetic construct
  source 1..24: mol_type = other DNA; note = Description of Artificial Sequence: Synthetic oligonucleotide
gagataccctagataaccctcaga

SEQ ID NO: 1552 - DNA, 23 bp, synthetic construct
  source 1..23: mol_type = other DNA; note = Description of Artificial Sequence: Synthetic oligonucleotide
gtgataactgaataaccctgctc

SEQ ID NO: 1553 - DNA, 23 bp, synthetic construct
  source 1..23: mol_type = other DNA; note = Description of Artificial Sequence: Synthetic oligonucleotide
gagataactgcatagccctaggt

SEQ ID NO: 1554 - DNA, 22 bp, synthetic construct
  source 1..22: mol_type = other DNA; note = Description of Artificial Sequence: Synthetic oligonucleotide
gagacacctgaacgacctcagg

SEQ ID NO: 1555 - DNA, 23 bp, synthetic construct
  source 1..23: mol_type = other DNA; note = Description of Artificial Sequence: Synthetic oligonucleotide
aagacacctgactaaccccaggc

SEQ ID NO: 1556 - DNA, 23 bp, synthetic construct
  source 1..23: mol_type = other DNA; note = Description of Artificial Sequence: Synthetic oligonucleotide
tagacacctgaacaaccccaggc

SEQ ID NO: 1557 - DNA, 22 bp, synthetic construct
  source 1..22: mol_type = other DNA; note = Description of Artificial Sequence: Synthetic oligonucleotide
aagacacctggctgaccccagg

SEQ ID NO: 1558 - DNA, 22 bp, synthetic construct
  source 1..22: mol_type = other DNA; note = Description of Artificial Sequence: Synthetic oligonucleotide
aagacacctgagcaacctcagg

SEQ ID NO: 1559 - DNA, 23 bp, synthetic construct
  source 1..23: mol_type = other DNA; note = Description of Artificial Sequence: Synthetic oligonucleotide
aagatatctgagcaacactctgt

SEQ ID NO: 1560 - DNA, 23 bp, synthetic construct
  source 1..23: mol_type = other DNA; note = Description of Artificial Sequence: Synthetic oligonucleotide
gagatatgtgaataaaactctga

SEQ ID NO: 1561 - DNA, 22 bp, synthetic construct
  source 1..22: mol_type = other DNA; note = Description of Artificial Sequence: Synthetic oligonucleotide
cagaagctgaatgaccctttgg

SEQ ID NO: 1562 - DNA, 23 bp, synthetic construct
  source 1..23: mol_type = other DNA; note = Description of Artificial Sequence: Synthetic oligonucleotide
aaaataactgataaatcctctga

SEQ ID NO: 1563 - DNA, 22 bp, synthetic construct
  source 1..22: mol_type = other DNA; note = Description of Artificial Sequence: Synthetic oligonucleotide
aagctcctgcatagcccacagg

SEQ ID NO: 1564 - DNA, 22 bp, synthetic construct
  source 1..22: mol_type = other DNA; note = Description of Artificial Sequence: Synthetic oligonucleotide
aacatacctaaatataccctgg

SEQ ID NO: 1565 - DNA, 23 bp, synthetic construct
  source 1..23: mol_type = other DNA; note = Description of Artificial Sequence: Synthetic oligonucleotide
tagatacctgactttcccacttg

SEQ ID NO: 1566 - DNA, 23 bp, synthetic construct
  source 1..23: mol_type = other DNA; note = Description of Artificial Sequence: Synthetic oligonucleotide
aagattcctgaagcctcctcaga

SEQ ID NO: 1567 - DNA, 22 bp, synthetic construct
  source 1..22: mol_type = other DNA; note = Description of Artificial Sequence: Synthetic oligonucleotide
catatactgaataaccatctgg

SEQ ID NO: 1568 - DNA, 23 bp, synthetic construct
  source 1..23: mol_type = other DNA; note = Description of Artificial Sequence: Synthetic oligonucleotide
aagatatctgaaatgccctagag

SEQ ID NO: 1569 - DNA, 23 bp, synthetic construct
  source 1..23: mol_type = other DNA; note = Description of Artificial Sequence: Synthetic oligonucleotide
aaatagcctgaataaccctagtg

SEQ ID NO: 1570 - DNA, 23 bp, synthetic construct
  source 1..23: mol_type = other DNA; note = Description of Artificial Sequence: Synthetic oligonucleotide
aacaaacatgaataacactaagc

SEQ ID NO: 1571 - DNA, 23 bp, synthetic construct
  source 1..23: mol_type = other DNA; note = Description of Artificial Sequence: Synthetic oligonucleotide
aagaaatctgacaaacctttagg

SEQ ID NO: 1572 - DNA, 22 bp, synthetic construct
  source 1..22: mol_type = other DNA; note = Description of Artificial Sequence: Synthetic oligonucleotide
aagatccagaagaactctctga

SEQ ID NO: 1573 - DNA, 23 bp, synthetic construct
  source 1..23: mol_type = other DNA; note = Description of Artificial Sequence: Synthetic oligonucleotide
tagatacctaaatagcccatggg

SEQ ID NO: 1574 - DNA, 23 bp, synthetic construct
  source 1..23: mol_type = other DNA; note = Description of Artificial Sequence: Synthetic oligonucleotide
aagaaacctctataagcctctta

SEQ ID NO: 1575 - DNA, 22 bp, synthetic construct
  source 1..22: mol_type = other DNA; note = Description of Artificial Sequence: Synthetic oligonucleotide
aatctactgaataactctcagg

SEQ ID NO: 1576 - DNA, 23 bp, synthetic construct
  source 1..23: mol_type = other DNA; note = Description of Artificial Sequence: Synthetic oligonucleotide
atgaatactgaataacattcagg

SEQ ID NO: 1577 - DNA, 21 bp, synthetic construct
  source 1..21: mol_type = other DNA; note = Description of Artificial Sequence: Synthetic oligonucleotide
aagataccaataaccctcaaa

SEQ ID NO: 1578 - DNA, 23 bp, synthetic construct
  source 1..23: mol_type = other DNA; note = Description of Artificial Sequence: Synthetic oligonucleotide
aatgtacccgaacaaccctcagg

SEQ ID NO: 1579 - DNA, 24 bp, synthetic construct
  source 1..24: mol_type = other DNA; note = Description of Artificial Sequence: Synthetic oligonucleotide
cagatagctgaaagaacactcagg

SEQ ID NO: 1580 - DNA, 23 bp, synthetic construct
  source 1..23: mol_type = other DNA; note = Description of Artificial Sequence: Synthetic oligonucleotide
aacataactgaataaccataagg

SEQ ID NO: 1581 - DNA, 23 bp, synthetic construct
  source 1..23: mol_type = other DNA; note = Description of Artificial Sequence: Synthetic oligonucleotide
aatcaacctgaatatccatcagt

SEQ ID NO: 1582 - DNA, 22 bp, synthetic construct
  source 1..22: mol_type = other DNA; note = Description of Artificial Sequence: Synthetic oligonucleotide
aagatacccattcaccctctgg

SEQ ID NO: 1583 - DNA, 23 bp, synthetic construct
  source 1..23: mol_type = other DNA; note = Description of Artificial Sequence: Synthetic oligonucleotide
aaagaacctaaaaaaccctcttg

SEQ ID NO: 1584 - DNA, 22 bp, synthetic construct
  source 1..22: mol_type = other DNA; note = Description of Artificial Sequence: Synthetic oligonucleotide
aagataggggaaagccctctgg

SEQ ID NO: 1585 - DNA, 23 bp, synthetic construct
  source 1..23: mol_type = other DNA; note = Description of Artificial Sequence: Synthetic oligonucleotide
aaggcaaatgaataacccacagc

SEQ ID NO: 1586 - DNA, 21 bp, synthetic construct
  source 1..21: mol_type = other DNA; note = Description of Artificial Sequence: Synthetic oligonucleotide
aaaatacaaataaccctcagt

SEQ ID NO: 1587 - DNA, 22 bp, synthetic construct
  source 1..22: mol_type = other DNA; note = Description of Artificial Sequence: Synthetic oligonucleotide
aagatccagaagaattctctgg

SEQ ID NO: 1588 - DNA, 22 bp, synthetic construct
  source 1..22: mol_type = other DNA; note = Description of Artificial Sequence: Synthetic oligonucleotide
agaatacctgaatacccccaga

SEQ ID NO: 1589 - DNA, 23 bp, synthetic construct
  source 1..23: mol_type = other DNA; note = Description of Artificial Sequence: Synthetic oligonucleotide
caaataccttaatcaccatgagg

SEQ ID NO: 1590 - DNA, 23 bp, synthetic construct
  source 1..23: mol_type = other DNA; note = Description of Artificial Sequence: Synthetic oligonucleotide
aagatgccaacataaagctcagg

SEQ ID NO: 1591 - DNA, 21 bp, synthetic construct
  source 1..21: mol_type = other DNA; note = Description of Artificial Sequence: Synthetic oligonucleotide
taaatacctataaccctgagg

SEQ ID NO: 1592 - DNA, 23 bp, synthetic construct
  source 1..23: mol_type = other DNA; note = Description of Artificial Sequence: Synthetic oligonucleotide
agcacacatgaataaccctaagg

SEQ ID NO: 1593 - DNA, 22 bp, synthetic construct
  source 1..22: mol_type = other DNA; note = Description of Artificial Sequence: Synthetic oligonucleotide
aagatcccagaataactactgg

SEQ ID NO: 1594 - DNA, 19 bp, synthetic construct
  source 1..19: mol_type = other DNA; note = Description of Artificial Sequence: Synthetic oligonucleotide
ccaatggcctccttcagtt

SEQ ID NO: 1595 - DNA, 18 bp, synthetic construct
  source 1..18: mol_type = other DNA; note = Description of Artificial Sequence: Synthetic oligonucleotide
caatggcctccttcagtt

SEQ ID NO: 1596 - DNA, 17 bp, synthetic construct
  source 1..17: mol_type = other DNA; note = Description of Artificial Sequence: Synthetic oligonucleotide
aatggcctccttcagtt

SEQ ID NO: 1597 - DNA, 20 bp, synthetic construct
  source 1..20: mol_type = other DNA; note = Description of Artificial Sequence: Synthetic oligonucleotide
tccaatggcctccttcagtt

SEQ ID NO: 1598 - DNA, 20 bp, synthetic construct
  source 1..20: mol_type = other DNA; note = Description of Artificial Sequence: Synthetic oligonucleotide
gcgaatggcctcctgcagct

SEQ ID NO: 1599 - DNA, 20 bp, synthetic construct
  source 1..20: mol_type = other DNA; note = Description of Artificial Sequence: Synthetic oligonucleotide
agcccttcaacacaaggtca

SEQ ID NO: 1600 - DNA, 20 bp, synthetic construct
  source 1..20: mol_type = other DNA; note = Description of Artificial Sequence: Synthetic oligonucleotide
taagaccatgtcccaactga

SEQ ID NO: 1601 - DNA, 20 bp, synthetic construct
  source 1..20: mol_type = other DNA; note = Description of Artificial Sequence: Synthetic oligonucleotide
caatgtccccaatgcaatcc

SEQ ID NO: 1602 - DNA, 20 bp, synthetic construct
  source 1..20: mol_type = other DNA; note = Description of Artificial Sequence: Synthetic oligonucleotide
ttgttttccgggattgcatt

SEQ ID NO: 1603 - DNA, 20 bp, synthetic construct
  source 1..20: mol_type = other DNA; note = Description of Artificial Sequence: Synthetic oligonucleotide
tttgttttccgggattgcat

SEQ ID NO: 1604 - DNA, 20 bp, synthetic construct
  source 1..20: mol_type = other DNA; note = Description of Artificial Sequence: Synthetic oligonucleotide
aatcccggaaaacaaagatt

SEQ ID NO: 1605 - DNA, 20 bp, synthetic construct
  source 1..20: mol_type = other DNA; note = Description of Artificial Sequence: Synthetic oligonucleotide
tgttttccgggattgcattg

SEQ ID NO: 1606 - DNA, 18 bp, synthetic construct
  source 1..18: mol_type = other DNA; note = Description of Artificial Sequence: Synthetic oligonucleotide
gatacctgaataactctc

SEQ ID NO: 1607 - DNA, 17 bp, synthetic construct
  source 1..17: mol_type = other DNA; note = Description of Artificial Sequence: Synthetic oligonucleotide
atacctgaataactctc

SEQ ID NO: 1608 - DNA, 20 bp, synthetic construct
  source 1..20: mol_type = other DNA; note = Description of Artificial Sequence: Synthetic oligonucleotide
gcaaatcttgattttggctc

SEQ ID NO: 1609 - DNA, 20 bp, synthetic construct
  source 1..20: mol_type = other DNA; note = Description of Artificial Sequence: Synthetic oligonucleotide
gatgtaaaaattttagccaa

SEQ ID NO: 1610 - DNA, 20 bp, synthetic construct
  source 1..20: mol_type = other DNA; note = Description of Artificial Sequence: Synthetic oligonucleotide
atgaaaaacttgagagttgc

SEQ ID NO: 1611 - DNA, 20 bp, synthetic construct
  source 1..20: mol_type = other DNA; note = Description of Artificial Sequence: Synthetic oligonucleotide
acttgggatcacaaagcaaa

SEQ ID NO: 1612 - DNA, 20 bp, synthetic construct
  source 1..20: mol_type = other DNA; note = Description of Artificial Sequence: Synthetic oligonucleotide
aagatttggtgttttctact

SEQ ID NO: 1613 - DNA, 20 bp, synthetic construct
  source 1..20: mol_type = other DNA; note = Description of Artificial Sequence: Synthetic oligonucleotide
aaggagtacccggggctgca

SEQ ID NO: 1614 - DNA, 20 bp, synthetic construct
  source 1..20: mol_type = other DNA; note = Description of Artificial Sequence: Synthetic oligonucleotide
cagaggccaggagcgccagg

SEQ ID NO: 1615 - DNA, 20 bp, synthetic construct
  source 1..20: mol_type = other DNA; note = Description of Artificial Sequence: Synthetic oligonucleotide
agaggccaggagcgccagga

SEQ ID NO: 1616 - DNA, 20 bp, synthetic construct
  source 1..20: mol_type = other DNA; note = Description of Artificial Sequence: Synthetic oligonucleotide
ctcggcctctgaagctcctg

SEQ ID NO: 1617 - DNA, 19 bp, synthetic construct
  source 1..19: mol_type = other DNA; note = Description of Artificial Sequence: Synthetic oligonucleotide
cagctccaggcggtcctgg

SEQ ID NO: 1618 - RNA, 100 nt, synthetic construct; identical to SEQ ID NO: 253
  source 1..100: mol_type = other RNA; note = Description of Artificial Sequence: Synthetic polynucleotide
  modified_base 1: mod_base = OTHER; note = 2'-O-Methyl-guanosine phosphorothioate
  modified_base 2: mod_base = OTHER; note = 2'-O-Methyl-guanosine phosphorothioate
  modified_base 3: mod_base = OTHER; note = 2'-O-Methyl-uridine phosphorothioate
  modified_base 21: mod_base = OTHER; note = 2'-O-Methyl-guanosine
  modified_base 28: mod_base = OTHER; note = 2'-O-Methyl-adenosine
  modified_base 29: mod_base = OTHER; note = 2'-O-Methyl-guanosine
  modified_base 30: mod_base = OTHER; note = 2'-O-Methyl-cytidine
  modified_base 31: mod_base = OTHER; note = 2'-O-Methyl-uridine
  modified_base 32: mod_base = OTHER; note = 2'-O-Methyl-adenosine
  modified_base 33: mod_base = OTHER; note = 2'-O-Methyl-guanosine
  modified_base 34: mod_base = OTHER; note = 2'-O-Methyl-adenosine
  modified_base 35: mod_base = OTHER; note = 2'-O-Methyl-adenosine
  modified_base 36: mod_base = OTHER; note = 2'-O-Methyl-adenosine
  modified_base 37: mod_base = OTHER; note = 2'-O-Methyl-uridine
  modified_base 38: mod_base = OTHER; note = 2'-O-Methyl-adenosine
  modified_base 39: mod_base = OTHER; note = 2'-O-Methyl-guanosine
  modified_base 40: mod_base = OTHER; note = 2'-O-Methyl-cytidine
  modified_base 41: mod_base = OTHER; note = 2'-O-Methyl-adenosine
  modified_base 42: mod_base = OTHER; note = 2'-O-Methyl-adenosine
  modified_base 46: mod_base = OTHER; note = 2'-O-Methyl-adenosine
  modified_base 48: mod_base = OTHER; note = 2'-O-Methyl-adenosine
  modified_base 50: mod_base = OTHER; note = 2'-O-Methyl-uridine
  modified_base 52: mod_base = OTHER; note = 2'-O-Methyl-adenosine
  modified_base 53: mod_base = OTHER; note = 2'-O-Methyl-guanosine
  modified_base 54: mod_base = OTHER; note = 2'-O-Methyl-guanosine
  modified_base 55: mod_base = OTHER; note = 2'-O-Methyl-cytidine
  modified_base 56: mod_base = OTHER; note = 2'-O-Methyl-uridine
  modified_base 57: mod_base = OTHER; note = 2'-O-Methyl-adenosine
  modified_base 60: mod_base = OTHER; note = 2'-O-Methyl-cytidine
  modified_base 61: mod_base = OTHER; note = 2'-O-Methyl-cytidine
  modified_base 66: mod_base = OTHER; note = 2'-O-Methyl-uridine
  modified_base 67: mod_base = OTHER; note = 2'-O-Methyl-cytidine
  modified_base 70: mod_base = OTHER; note = 2'-O-Methyl-cytidine
  modified_base 71: mod_base = OTHER; note = 2'-O-Methyl-uridine
  modified_base 72: mod_base = OTHER; note = 2'-O-Methyl-uridine
  modified_base 73: mod_base = OTHER; note = 2'-O-Methyl-guanosine
  modified_base 74: mod_base = OTHER; note = 2'-O-Methyl-adenosine
  modified_base 75: mod_base = OTHER; note = 2'-O-Methyl-adenosine
  modified_base 76: mod_base = OTHER; note = 2'-O-Methyl-adenosine
  modified_base 77: mod_base = OTHER; note = 2'-O-Methyl-adenosine
  modified_base 78: mod_base = OTHER; note = 2'-O-Methyl-adenosine
  modified_base 79: mod_base = OTHER; note = 2'-O-Methyl-guanosine
  modified_base 80: mod_base = OTHER; note = 2'-O-Methyl-uridine
  modified_base 81: mod_base = OTHER; note = 2'-O-Methyl-guanosine
  modified_base 83: mod_base = OTHER; note = 2'-O-Methyl-cytidine
  modified_base 84: mod_base = OTHER; note = 2'-O-Methyl-adenosine
  modified_base 85: mod_base = OTHER; note = 2'-O-Methyl-cytidine
  modified_base 86: mod_base = OTHER; note = 2'-O-Methyl-cytidine
  modified_base 87: mod_base = OTHER; note = 2'-O-Methyl-guanosine
  modified_base 88: mod_base = OTHER; note = 2'-O-Methyl-adenosine
  modified_base 89: mod_base = OTHER; note = 2'-O-Methyl-guanosine
  modified_base 90: mod_base = OTHER; note = 2'-O-Methyl-uridine
  modified_base 91: mod_base = OTHER; note = 2'-O-Methyl-cytidine
  modified_base 92: mod_base = OTHER; note = 2'-O-Methyl-guanosine
  modified_base 93: mod_base = OTHER; note = 2'-O-Methyl-guanosine
  modified_base 94: mod_base = OTHER; note = 2'-O-Methyl-uridine
  modified_base 95: mod_base = OTHER; note = 2'-O-Methyl-guanosine
  modified_base 96: mod_base = OTHER; note = 2'-O-Methyl-cytidine
  modified_base 97: mod_base = OTHER; note = 2'-O-Methyl-uridine
  modified_base 98: mod_base = OTHER; note = 2'-O-Methyl-uridine phosphorothioate
  modified_base 99: mod_base = OTHER; note = 2'-O-Methyl-uridine phosphorothioate
  modified_base 100: mod_base = OTHER; note = 2'-O-Methyl-uridine

SEQ ID NO: 1619 - RNA, 100 nt, synthetic construct; identical to SEQ ID NO: 253
  source 1..100: mol_type = other RNA; note = Description of Artificial Sequence: Synthetic polynucleotide
  modified_base 1: mod_base = OTHER; note = 2'-O-Methyl-guanosine phosphorothioate
  modified_base 2: mod_base = OTHER; note = 2'-O-Methyl-guanosine phosphorothioate
  modified_base 3: mod_base = OTHER; note = 2'-O-Methyl-uridine
  modified_base 21: mod_base = OTHER; note = 2'-O-Methyl-guanosine
  modified_base 28: mod_base = OTHER; note = 2'-O-Methyl-adenosine
  modified_base 29: mod_base = OTHER; note = 2'-O-Methyl-guanosine
  modified_base 30: mod_base = OTHER; note = 2'-O-Methyl-cytidine
  modified_base 31: mod_base = OTHER; note = 2'-O-Methyl-uridine
  modified_base 32: mod_base = OTHER; note = 2'-O-Methyl-adenosine
  modified_base 33: mod_base = OTHER; note = 2'-O-Methyl-guanosine
  modified_base 34: mod_base = OTHER; note = 2'-O-Methyl-adenosine
  modified_base 35: mod_base = OTHER; note = 2'-O-Methyl-adenosine
  modified_base 36: mod_base = OTHER; note = 2'-O-Methyl-adenosine
  modified_base 37: mod_base = OTHER; note = 2'-O-Methyl-uridine
  modified_base 38: mod_base = OTHER; note = 2'-O-Methyl-adenosine
  modified_base 39: mod_base = OTHER; note = 2'-O-Methyl-guanosine
  modified_base 40: mod_base = OTHER; note = 2'-O-Methyl-cytidine
  modified_base 41: mod_base = OTHER; note = 2'-O-Methyl-adenosine
  modified_base 42: mod_base = OTHER; note = 2'-O-Methyl-adenosine
  modified_base 46: mod_base = OTHER; note = 2'-O-Methyl-adenosine
  modified_base 48: mod_base = OTHER; note = 2'-O-Methyl-adenosine
  modified_base 50: mod_base = OTHER; note = 2'-O-Methyl-uridine
  modified_base 52: mod_base = OTHER; note = 2'-O-Methyl-adenosine
  modified_base 53: mod_base = OTHER; note = 2'-O-Methyl-guanosine
  modified_base 54: mod_base = OTHER; note = 2'-O-Methyl-guanosine
  modified_base 55: mod_base = OTHER; note = 2'-O-Methyl-cytidine
  modified_base 56: mod_base = OTHER; note = 2'-O-Methyl-uridine
  modified_base 57: mod_base = OTHER; note = 2'-O-Methyl-adenosine
  modified_base 60: mod_base = OTHER; note = 2'-O-Methyl-cytidine
  modified_base 61: mod_base = OTHER; note = 2'-O-Methyl-cytidine
  modified_base 66: mod_base = OTHER; note = 2'-O-Methyl-uridine
  modified_base 67: mod_base = OTHER; note = 2'-O-Methyl-cytidine
  modified_base 70: mod_base = OTHER; note = 2'-O-Methyl-cytidine
  modified_base 71: mod_base = OTHER; note = 2'-O-Methyl-uridine
  modified_base 72: mod_base = OTHER; note = 2'-O-Methyl-uridine
  modified_base 73: mod_base = OTHER; note = 2'-O-Methyl-guanosine
  modified_base 74: mod_base = OTHER; note = 2'-O-Methyl-adenosine
  modified_base 75: mod_base = OTHER; note = 2'-O-Methyl-adenosine
  modified_base 76: mod_base = OTHER; note = 2'-O-Methyl-adenosine
  modified_base 77: mod_base = OTHER; note = 2'-O-Methyl-adenosine
  modified_base 78: mod_base = OTHER; note = 2'-O-Methyl-adenosine
  modified_base 79: mod_base = OTHER; note = 2'-O-Methyl-guanosine
  modified_base 80: mod_base = OTHER; note = 2'-O-Methyl-uridine
  modified_base 81: mod_base = OTHER; note = 2'-O-Methyl-guanosine
  modified_base 83: mod_base = OTHER; note = 2'-O-Methyl-cytidine
  modified_base 84: mod_base = OTHER; note = 2'-O-Methyl-adenosine
  modified_base 85: mod_base = OTHER; note = 2'-O-Methyl-cytidine
  modified_base 86: mod_base = OTHER; note = 2'-O-Methyl-cytidine
  modified_base 87: mod_base = OTHER; note = 2'-O-Methyl-guanosine
  modified_base 88: mod_base = OTHER; note = 2'-O-Methyl-adenosine
  modified_base 89: mod_base = OTHER; note = 2'-O-Methyl-guanosine
  modified_base 90: mod_base = OTHER; note = 2'-O-Methyl-uridine
  modified_base 91: mod_base = OTHER; note = 2'-O-Methyl-cytidine
  modified_base 92: mod_base = OTHER; note = 2'-O-Methyl-guanosine
  modified_base 93: mod_base = OTHER; note = 2'-O-Methyl-guanosine
  modified_base 94: mod_base = OTHER; note = 2'-O-Methyl-uridine
  modified_base 95: mod_base = OTHER; note = 2'-O-Methyl-guanosine
  modified_base 96: mod_base = OTHER; note = 2'-O-Methyl-cytidine
  modified_base 97: mod_base = OTHER; note = 2'-O-Methyl-uridine phosphorothioate
  modified_base 98: mod_base = OTHER; note = 2'-O-Methyl-uridine phosphorothioate
  modified_base 99: mod_base = OTHER; note = 2'-O-Methyl-uridine phosphorothioate
  modified_base 100: mod_base = OTHER; note = 2'-O-Methyl-uridine

SEQ ID NO: 1620 - RNA, 100 nt, synthetic construct; identical to SEQ ID NO: 253
  source 1..100: mol_type = other RNA; note = Description of Artificial Sequence: Synthetic polynucleotide
  modified_base 1: mod_base = OTHER; note = 2'-O-Methyl-guanosine phosphorothioate
  modified_base 2: mod_base = OTHER; note = 2'-O-Methyl-guanosine phosphorothioate
  modified_base 3: mod_base = OTHER; note = 2'-O-Methyl-uridine
  modified_base 21: mod_base = OTHER; note = 2'-O-Methyl-guanosine
  modified_base 28: mod_base = OTHER; note = 2'-O-Methyl-adenosine
  modified_base 29: mod_base = OTHER; note = 2'-O-Methyl-guanosine
  modified_base 30: mod_base = OTHER; note = 2'-O-Methyl-cytidine
  modified_base 31: mod_base = OTHER; note = 2'-O-Methyl-uridine
  modified_base 32: mod_base = OTHER; note = 2'-O-Methyl-adenosine
  modified_base 33: mod_base = OTHER; note = 2'-O-Methyl-guanosine
  modified_base 34: mod_base = OTHER; note = 2'-O-Methyl-adenosine
  modified_base 35: mod_base = OTHER; note = 2'-O-Methyl-adenosine
  modified_base 36: mod_base = OTHER; note = 2'-O-Methyl-adenosine
  modified_base 37: mod_base = OTHER; note = 2'-O-Methyl-uridine
  modified_base 38: mod_base = OTHER; note = 2'-O-Methyl-adenosine
  modified_base 39: mod_base = OTHER; note = 2'-O-Methyl-guanosine
  modified_base 40: mod_base = OTHER; note = 2'-O-Methyl-cytidine
  modified_base 41: mod_base = OTHER; note = 2'-O-Methyl-adenosine
  modified_base 42: mod_base = OTHER; note = 2'-O-Methyl-adenosine
  modified_base 46: mod_base = OTHER; note = 2'-O-Methyl-adenosine
  modified_base 48: mod_base = OTHER; note = 2'-O-Methyl-adenosine
  modified_base 50: mod_base = OTHER; note = 2'-O-Methyl-uridine
  modified_base 52: mod_base = OTHER; note = 2'-O-Methyl-adenosine
  modified_base 53: mod_base = OTHER; note = 2'-O-Methyl-guanosine
  modified_base 54: mod_base = OTHER; note = 2'-O-Methyl-guanosine
  modified_base 55: mod_base = OTHER; note = 2'-O-Methyl-cytidine
  modified_base 56: mod_base = OTHER; note = 2'-O-Methyl-uridine
  modified_base 57: mod_base = OTHER; note = 2'-O-Methyl-adenosine
  modified_base 60: mod_base = OTHER; note = 2'-O-Methyl-cytidine
  modified_base 61: mod_base = OTHER; note = 2'-O-Methyl-cytidine
  modified_base 66: mod_base = OTHER; note = 2'-O-Methyl-uridine
  modified_base 67: mod_base = OTHER; note = 2'-O-Methyl-cytidine
  modified_base 70: mod_base = OTHER; note = 2'-O-Methyl-cytidine
  modified_base 71: mod_base = OTHER; note = 2'-O-Methyl-uridine
  modified_base 72: mod_base = OTHER; note = 2'-O-Methyl-uridine
  modified_base 73: mod_base = OTHER; note = 2'-O-Methyl-guanosine
  modified_base 74: mod_base = OTHER; note = 2'-O-Methyl-adenosine
  modified_base 75: mod_base = OTHER; note = 2'-O-Methyl-adenosine
  modified_base 76: mod_base = OTHER; note = 2'-O-Methyl-adenosine
  modified_base 77: mod_base = OTHER; note = 2'-O-Methyl-adenosine
  modified_base 78: mod_base = OTHER; note = 2'-O-Methyl-adenosine
  modified_base 79: mod_base = OTHER; note = 2'-O-Methyl-guanosine
  modified_base 80: mod_base = OTHER; note = 2'-O-Methyl-uridine
  modified_base 81: mod_base = OTHER; note = 2'-O-Methyl-guanosine
  modified_base 83: mod_base = OTHER; note = 2'-O-Methyl-cytidine
  modified_base 84: mod_base = OTHER; note = 2'-O-Methyl-adenosine
  modified_base 85: mod_base = OTHER; note = 2'-O-Methyl-cytidine
  modified_base 86: mod_base = OTHER; note = 2'-O-Methyl-cytidine
  modified_base 87: mod_base = OTHER; note = 2'-O-Methyl-guanosine
  modified_base 88: mod_base = OTHER; note = 2'-O-Methyl-adenosine
  modified_base 89: mod_base = OTHER; note = 2'-O-Methyl-guanosine
  modified_base 90: mod_base = OTHER; note = 2'-O-Methyl-uridine
  modified_base 91: mod_base = OTHER; note = 2'-O-Methyl-cytidine
  modified_base 92: mod_base = OTHER; note = 2'-O-Methyl-guanosine
  modified_base 93: mod_base = OTHER; note = 2'-O-Methyl-guanosine
  modified_base 94: mod_base = OTHER; note = 2'-O-Methyl-uridine
  modified_base 95: mod_base = OTHER; note = 2'-O-Methyl-guanosine
  modified_base 96: mod_base = OTHER; note = 2'-O-Methyl-cytidine
  modified_base 97: mod_base = OTHER; note = 2'-O-Methyl-uridine
  modified_base 98: mod_base = OTHER; note = 2'-O-Methyl-uridine phosphorothioate
  modified_base 99: mod_base = OTHER; note = 2'-O-Methyl-uridine phosphorothioate
  modified_base 100: mod_base = OTHER; note = 2'-O-Methyl-uridine

SEQ ID NO: 1621 - RNA, 100 nt, synthetic construct; identical to SEQ ID NO: 253
  source 1..100: mol_type = other RNA; note = Description of Artificial Sequence: Synthetic polynucleotide
  modified_base 1: mod_base = OTHER; note = 2'-O-Methyl-guanosine phosphorothioate
  modified_base 2: mod_base = OTHER; note = 2'-O-Methyl-guanosine phosphorothioate
  modified_base 3: mod_base = OTHER; note = 2'-O-Methyl-uridine
  modified_base 21: mod_base = OTHER; note = 2'-O-Methyl-guanosine
  modified_base 28: mod_base = OTHER; note = 2'-O-Methyl-adenosine
  modified_base 29: mod_base = OTHER; note = 2'-O-Methyl-guanosine
  modified_base 30: mod_base = OTHER; note = 2'-O-Methyl-cytidine
  modified_base 31: mod_base = OTHER; note = 2'-O-Methyl-uridine
  modified_base 32: mod_base = OTHER; note = 2'-O-Methyl-adenosine
  modified_base 33: mod_base = OTHER; note = 2'-O-Methyl-guanosine
  modified_base 34: mod_base = OTHER; note = 2'-O-Methyl-adenosine
  modified_base 35: mod_base = OTHER; note = 2'-O-Methyl-adenosine
  modified_base 36: mod_base = OTHER; note = 2'-O-Methyl-adenosine
  modified_base 37: mod_base = OTHER; note = 2'-O-Methyl-uridine
  modified_base 38: mod_base = OTHER; note = 2'-O-Methyl-adenosine
  modified_base 39: mod_base = OTHER; note = 2'-O-Methyl-guanosine
  modified_base 40: mod_base = OTHER; note = 2'-O-Methyl-cytidine
  modified_base 41: mod_base = OTHER; note = 2'-O-Methyl-adenosine
  modified_base 42: mod_base = OTHER; note = 2'-O-Methyl-adenosine
  modified_base 46: mod_base = OTHER; note = 2'-O-Methyl-adenosine
  modified_base 48: mod_base = OTHER; note = 2'-O-Methyl-adenosine
  modified_base 50: mod_base = OTHER; note = 2'-O-Methyl-uridine
  modified_base 52: mod_base = OTHER; note = 2'-O-Methyl-adenosine
  modified_base 53: mod_base = OTHER; note = 2'-O-Methyl-guanosine
  modified_base 54: mod_base = OTHER; note = 2'-O-Methyl-guanosine
  modified_base 55: mod_base = OTHER; note = 2'-O-Methyl-cytidine
  modified_base 56: mod_base = OTHER; note = 2'-O-Methyl-uridine
  modified_base 57: mod_base = OTHER; note = 2'-O-Methyl-adenosine
  modified_base 60: mod_base = OTHER; note = 2'-O-Methyl-cytidine
  modified_base 61: mod_base = OTHER; note = 2'-O-Methyl-cytidine
  modified_base 66: mod_base = OTHER; note = 2'-O-Methyl-uridine
  modified_base 67: mod_base = OTHER; note = 2'-O-Methyl-cytidine
  modified_base 70: mod_base = OTHER; note = 2'-O-Methyl-cytidine
  modified_base 71: mod_base = OTHER; note = 2'-O-Methyl-uridine
  modified_base 72: mod_base = OTHER; note = 2'-O-Methyl-uridine
  modified_base 73: mod_base = OTHER; note = 2'-O-Methyl-guanosine
  modified_base 74: mod_base = OTHER; note = 2'-O-Methyl-adenosine
  modified_base 75: mod_base = OTHER; note = 2'-O-Methyl-adenosine
  modified_base 76: mod_base = OTHER; note = 2'-O-Methyl-adenosine
  modified_base 77: mod_base = OTHER; note = 2'-O-Methyl-adenosine
  modified_base 78: mod_base = OTHER; note = 2'-O-Methyl-adenosine
  modified_base 79: mod_base = OTHER; note = 2'-O-Methyl-guanosine
  modified_base 80: mod_base = OTHER; note = 2'-O-Methyl-uridine
  modified_base 81: mod_base = OTHER; note = 2'-O-Methyl-guanosine
  modified_base 83: mod_base = OTHER; note = 2'-O-Methyl-cytidine
  modified_base 84: mod_base = OTHER; note = 2'-O-Methyl-adenosine
  modified_base 85: mod_base = OTHER; note = 2'-O-Methyl-cytidine
  modified_base 86: mod_base = OTHER; note = 2'-O-Methyl-cytidine
  modified_base 87: mod_base = OTHER; note = 2'-O-Methyl-guanosine
  modified_base 88: mod_base = OTHER; note = 2'-O-Methyl-adenosine
  modified_base 89: mod_base = OTHER; note = 2'-O-Methyl-guanosine
  modified_base 90: mod_base = OTHER; note = 2'-O-Methyl-uridine
  modified_base 91: mod_base = OTHER; note = 2'-O-Methyl-cytidine
  modified_base 92: mod_base = OTHER; note = 2'-O-Methyl-guanosine
  modified_base 93: mod_base = OTHER; note = 2'-O-Methyl-guanosine
  modified_base 94: mod_base = OTHER; note = 2'-O-Methyl-uridine
  modified_base 95: mod_base = OTHER; note = 2'-O-Methyl-guanosine
  modified_base 96: mod_base = OTHER; note = 2'-O-Methyl-cytidine
  modified_base 97: mod_base = OTHER; note = 2'-O-Methyl-uridine
  modified_base 98: mod_base = OTHER; note = 2'-O-Methyl-uridine
  modified_base 99: mod_base = OTHER; note = 2'-O-Methyl-uridine phosphorothioate
  modified_base 100: mod_base = OTHER; note = 2'-O-Methyl-uridine

SEQ ID NO: 1622 - RNA, 100 nt, synthetic construct
  source 1..100: mol_type = other RNA; note = Description of Artificial Sequence: Synthetic polynucleotide
  modified_base 1: mod_base = OTHER; note = 2'-O-Methyl-inosine phosphorothioate
  modified_base 2: mod_base = OTHER; note = 2'-O-Methyl-cytidine phosphorothioate
  modified_base 3: mod_base = OTHER; note = 2'-O-Methyl-cytidine phosphorothioate
  modified_base 29: mod_base = OTHER; note = 2'-O-Methyl-guanosine
  modified_base 30: mod_base = OTHER; note = 2'-O-Methyl-cytidine
  modified_base 31: mod_base = OTHER; note = 2'-O-Methyl-uridine
  modified_base 32: mod_base = OTHER; note = 2'-O-Methyl-adenosine
  modified_base 33: mod_base = OTHER; note = 2'-O-Methyl-guanosine
  modified_base 34: mod_base = OTHER; note = 2'-O-Methyl-adenosine
  modified_base 35: mod_base = OTHER; note = 2'-O-Methyl-adenosine
  modified_base 36: mod_base = OTHER; note = 2'-O-Methyl-adenosine
  modified_base 37: mod_base = OTHER; note = 2'-O-Methyl-uridine
  modified_base 38: mod_base = OTHER; note = 2'-O-Methyl-adenosine
  modified_base 39: mod_base = OTHER; note = 2'-O-Methyl-guanosine
  modified_base 40: mod_base = OTHER; note = 2'-O-Methyl-cytidine
  modified_base 69: mod_base = OTHER; note = 2'-O-Methyl-adenosine
  modified_base 70: mod_base = OTHER; note = 2'-O-Methyl-cytidine
  modified_base 71: mod_base = OTHER; note = 2'-O-Methyl-uridine
  modified_base 72: mod_base = OTHER; note = 2'-O-Methyl-uridine
  modified_base 73: mod_base = OTHER; note = 2'-O-Methyl-guanosine
  modified_base 74: mod_base = OTHER; note = 2'-O-Methyl-adenosine
  modified_base 75: mod_base = OTHER; note = 2'-O-Methyl-adenosine
  modified_base 76: mod_base = OTHER; note = 2'-O-Methyl-adenosine
  modified_base 77: mod_base = OTHER; note = 2'-O-Methyl-adenosine
  modified_base 78: mod_base = OTHER; note = 2'-O-Methyl-adenosine
  modified_base 79: mod_base = OTHER; note = 2'-O-Methyl-guanosine
  modified_base 80: mod_base = OTHER; note = 2'-O-Methyl-uridine
  modified_base 81: mod_base = OTHER; note = 2'-O-Methyl-guanosine
  modified_base 82: mod_base = OTHER; note = 2'-O-Methyl-guanosine
  modified_base 83: mod_base = OTHER; note = 2'-O-Methyl-cytidine
  modified_base 84: mod_base = OTHER; note = 2'-O-Methyl-adenosine
  modified_base 85: mod_base = OTHER; note = 2'-O-Methyl-cytidine
  modified_base 86: mod_base = OTHER; note = 2'-O-Methyl-cytidine
  modified_base 87: mod_base = OTHER; note = 2'-O-Methyl-guanosine
  modified_base 88: mod_base = OTHER; note = 2'-O-Methyl-adenosine
  modified_base 89: mod_base = OTHER; note = 2'-O-Methyl-guanosine
  modified_base 90: mod_base = OTHER; note = 2'-O-Methyl-uridine
  modified_base 91: mod_base = OTHER; note = 2'-O-Methyl-cytidine
  modified_base 92: mod_base = OTHER; note = 2'-O-Methyl-guanosine
  modified_base 93: mod_base = OTHER; note = 2'-O-Methyl-guanosine
  modified_base 94: mod_base = OTHER; note = 2'-O-Methyl-uridine
  modified_base 95: mod_base = OTHER; note = 2'-O-Methyl-guanosine
  modified_base 96: mod_base = OTHER; note = 2'-O-Methyl-cytidine
  modified_base 97: mod_base = OTHER; note = 2'-O-Methyl-uridine phosphorothioate
  modified_base 98: mod_base = OTHER; note = 2'-O-Methyl-uridine phosphorothioate
  modified_base 99: mod_base = OTHER; note = 2'-O-Methyl-uridine phosphorothioate
  modified_base 100: mod_base = OTHER; note = 2'-O-Methyl-uridine
nccaatggcctccttcagttgttttagagctagaaatagcaagttaaaataaggctagtccgttatcaacttgaaaaagtggcaccgagtcggtgctttt

SEQ ID NO: 1623 - RNA, 99 nt, synthetic construct
  source 1..99: mol_type = other RNA; note = Description of Artificial Sequence: Synthetic oligonucleotide
  modified_base 1: mod_base = OTHER; note = 2'-O-Methyl-cytidine phosphorothioate
  modified_base 2: mod_base = OTHER; note = 2'-O-Methyl-cytidine phosphorothioate
  modified_base 28: mod_base = OTHER; note = 2'-O-Methyl-guanosine
  modified_base 29: mod_base = OTHER; note = 2'-O-Methyl-cytidine
  modified_base 30: mod_base = OTHER; note = 2'-O-Methyl-uridine
  modified_base 31: mod_base = OTHER; note = 2'-O-Methyl-adenosine
  modified_base 32: mod_base = OTHER; note = 2'-O-Methyl-guanosine
  modified_base 33: mod_base = OTHER; note = 2'-O-Methyl-adenosine
  modified_base 34: mod_base = OTHER; note = 2'-O-Methyl-adenosine
  modified_base 35: mod_base = OTHER; note = 2'-O-Methyl-adenosine
  modified_base 36: mod_base = OTHER; note = 2'-O-Methyl-uridine
  modified_base 37: mod_base = OTHER; note = 2'-O-Methyl-adenosine
  modified_base 38: mod_base = OTHER; note = 2'-O-Methyl-guanosine
  modified_base 39: mod_base = OTHER; note = 2'-O-Methyl-cytidine
  modified_base 68: mod_base = OTHER; note = 2'-O-Methyl-adenosine
  modified_base 69: mod_base = OTHER; note = 2'-O-Methyl-cytidine
  modified_base 70: mod_base = OTHER; note = 2'-O-Methyl-uridine
  modified_base 71: mod_base = OTHER; note = 2'-O-Methyl-uridine
  modified_base 72: mod_base = OTHER; note = 2'-O-Methyl-guanosine
  modified_base 73: mod_base = OTHER; note = 2'-O-Methyl-adenosine
  modified_base 74: mod_base = OTHER; note = 2'-O-Methyl-adenosine
  modified_base 75: mod_base = OTHER; note = 2'-O-Methyl-adenosine
  modified_base 76: mod_base = OTHER; note = 2'-O-Methyl-adenosine
  modified_base 77: mod_base = OTHER; note = 2'-O-Methyl-adenosine
  modified_base 78: mod_base = OTHER; note = 2'-O-Methyl-guanosine
  modified_base 79: mod_base = OTHER; note = 2'-O-Methyl-uridine
  modified_base 80: mod_base = OTHER; note = 2'-O-Methyl-guanosine
  modified_base 81: mod_base = OTHER; note = 2'-O-Methyl-guanosine
  modified_base 82: mod_base = OTHER; note = 2'-O-Methyl-cytidine
  modified_base 83: mod_base = OTHER; note = 2'-O-Methyl-adenosine
  modified_base 84: mod_base = OTHER; note = 2'-O-Methyl-cytidine
  modified_base 85: mod_base = OTHER; note = 2'-O-Methyl-cytidine
  modified_base 86: mod_base = OTHER; note = 2'-O-Methyl-guanosine
  modified_base 87: mod_base = OTHER; note = 2'-O-Methyl-adenosine
  modified_base 88: mod_base = OTHER; note = 2'-O-Methyl-guanosine
  modified_base 89: mod_base = OTHER; note = 2'-O-Methyl-uridine
  modified_base 90: mod_base = OTHER; note = 2'-O-Methyl-cytidine
  modified_base 91: mod_base = OTHER; note = 2'-O-Methyl-guanosine
  modified_base 92: mod_base = OTHER; note = 2'-O-Methyl-guanosine
  modified_base 93: mod_base = OTHER; note = 2'-O-Methyl-uridine
  modified_base 94: mod_base = OTHER; note = 2'-O-Methyl-guanosine
  modified_base 95: mod_base = OTHER; note = 2'-O-Methyl-cytidine
  modified_base 96: mod_base = OTHER; note = 2'-O-Methyl-uridine phosphorothioate
  modified_base 97: mod_base = OTHER; note = 2'-O-Methyl-uridine phosphorothioate
  modified_base 98: mod_base = OTHER; note = 2'-O-Methyl-uridine phosphorothioate
  modified_base 99: mod_base = OTHER; note = 2'-O-Methyl-uridine
ccaatggcctccttcagttgttttagagctagaaatagcaagttaaaataaggctagtccgttatcaacttgaaaaagtggcaccgagtcggtgctttt

SEQ ID NO: 1624 - RNA, 98 nt, synthetic construct
  source 1..98: mol_type = other RNA; note = Description of Artificial Sequence: Synthetic oligonucleotide
  modified_base 1: mod_base = OTHER; note = 2'-O-Methyl-cytidine phosphorothioate
  modified_base 27: mod_base = OTHER; note = 2'-O-Methyl-guanosine
  modified_base 28: mod_base = OTHER; note = 2'-O-Methyl-cytidine
  modified_base 29: mod_base = OTHER; note = 2'-O-Methyl-uridine
  modified_base 30: mod_base = OTHER; note = 2'-O-Methyl-adenosine
  modified_base 31: mod_base = OTHER; note = 2'-O-Methyl-guanosine
  modified_base 32: mod_base = OTHER; note = 2'-O-Methyl-adenosine
  modified_base 33: mod_base = OTHER; note = 2'-O-Methyl-adenosine
  modified_base 34: mod_base = OTHER; note = 2'-O-Methyl-adenosine
  modified_base 35: mod_base = OTHER; note = 2'-O-Methyl-uridine
  modified_base 36: mod_base = OTHER; note = 2'-O-Methyl-adenosine
  modified_base 37: mod_base = OTHER; note = 2'-O-Methyl-guanosine
  modified_base 38: mod_base = OTHER; note = 2'-O-Methyl-cytidine
  modified_base 67: mod_base = OTHER; note = 2'-O-Methyl-adenosine
  modified_base 68: mod_base = OTHER; note = 2'-O-Methyl-cytidine
  modified_base 69: mod_base = OTHER; note = 2'-O-Methyl-uridine
  modified_base 70: mod_base = OTHER; note = 2'-O-Methyl-uridine
  modified_base 71: mod_base = OTHER; note = 2'-O-Methyl-guanosine
  modified_base 72: mod_base = OTHER; note = 2'-O-Methyl-adenosine
  modified_base 73: mod_base = OTHER; note = 2'-O-Methyl-adenosine
  modified_base 74: mod_base = OTHER; note = 2'-O-Methyl-adenosine
  modified_base 75: mod_base = OTHER; note = 2'-O-Methyl-adenosine
  modified_base 76: mod_base = OTHER; note = 2'-O-Methyl-adenosine
  modified_base 77: mod_base = OTHER; note = 2'-O-Methyl-guanosine
  modified_base 78: mod_base = OTHER; note = 2'-O-Methyl-uridine
  modified_base 79: mod_base = OTHER; note = 2'-O-Methyl-guanosine
  modified_base 80: mod_base = OTHER; note = 2'-O-Methyl-guanosine
  modified_base 81: mod_base = OTHER; note = 2'-O-Methyl-cytidine
  modified_base 82: mod_base = OTHER; note = 2'-O-Methyl-adenosine
  modified_base 83: mod_base = OTHER; note = 2'-O-Methyl-cytidine
  modified_base 84: mod_base = OTHER; note = 2'-O-Methyl-cytidine
  modified_base 85: mod_base = OTHER; note = 2'-O-Methyl-guanosine
  modified_base 86: mod_base = OTHER; note = 2'-O-Methyl-adenosine
  modified_base 87: mod_base = OTHER; note = 2'-O-Methyl-guanosine
  modified_base 88: mod_base = OTHER; note = 2'-O-Methyl-uridine
  modified_base 89: mod_base = OTHER; note = 2'-O-Methyl-cytidine
  modified_base 90: mod_base = OTHER; note = 2'-O-Methyl-guanosine
  modified_base 91: mod_base = OTHER; note = 2'-O-Methyl-guanosine
  modified_base 92: mod_base = OTHER; note = 2'-O-Methyl-uridine
  modified_base 93: mod_base = OTHER; note = 2'-O-Methyl-guanosine
  modified_base 94: mod_base = OTHER; note = 2'-O-Methyl-cytidine
  modified_base 95: mod_base = OTHER; note = 2'-O-Methyl-uridine phosphorothioate
  modified_base 96: mod_base = OTHER; note = 2'-O-Methyl-uridine phosphorothioate
  modified_base 97: mod_base = OTHER; note = 2'-O-Methyl-uridine phosphorothioate
  modified_base 98: mod_base = OTHER; note = 2'-O-Methyl-uridine
caatggcctccttcagttgttttagagctagaaatagcaagttaaaataaggctagtccgttatcaacttgaaaaagtggcaccgagtcggtgctttt

SEQ ID NO: 1625 - RNA, 98 nt, synthetic construct; identical to SEQ ID NO: 1624
  source 1..98: mol_type = other RNA; note = Description of Artificial Sequence: Synthetic oligonucleotide
  modified_base 1: mod_base = OTHER; note = 2'-O-Methyl-cytidine phosphorothioate
  modified_base 2: mod_base = OTHER; note = 2'-O-Methyl-adenosine phosphorothioate
  modified_base 27: mod_base = OTHER; note = 2'-O-Methyl-guanosine
  modified_base 28: mod_base = OTHER; note = 2'-O-Methyl-cytidine
  modified_base 29: mod_base = OTHER; note = 2'-O-Methyl-uridine
  modified_base 30: mod_base = OTHER; note = 2'-O-Methyl-adenosine
  modified_base 31: mod_base = OTHER; note = 2'-O-Methyl-guanosine
  modified_base 32: mod_base = OTHER; note = 2'-O-Methyl-adenosine
  modified_base 33: mod_base = OTHER; note = 2'-O-Methyl-adenosine
  modified_base 34: mod_base = OTHER; note = 2'-O-Methyl-adenosine
  modified_base 35: mod_base = OTHER; note = 2'-O-Methyl-uridine
  modified_base 36: mod_base = OTHER; note = 2'-O-Methyl-adenosine
  modified_base 37: mod_base = OTHER; note = 2'-O-Methyl-guanosine
  modified_base 38: mod_base = OTHER; note = 2'-O-Methyl-cytidine
  modified_base 67: mod_base = OTHER; note = 2'-O-Methyl-adenosine
  modified_base 68: mod_base = OTHER; note = 2'-O-Methyl-cytidine
  modified_base 69: mod_base = OTHER; note = 2'-O-Methyl-uridine
  modified_base 70: mod_base = OTHER; note = 2'-O-Methyl-uridine
  modified_base 71: mod_base = OTHER; note = 2'-O-Methyl-guanosine
  modified_base 72: mod_base = OTHER; note = 2'-O-Methyl-adenosine
  modified_base 73: mod_base = OTHER; note = 2'-O-Methyl-adenosine
  modified_base 74: mod_base = OTHER; note = 2'-O-Methyl-adenosine
  modified_base 75: mod_base = OTHER; note = 2'-O-Methyl-adenosine
  modified_base 76: mod_base = OTHER; note = 2'-O-Methyl-adenosine
  modified_base 77: mod_base = OTHER; note = 2'-O-Methyl-guanosine
  modified_base 78: mod_base = OTHER; note = 2'-O-Methyl-uridine
  modified_base 79: mod_base = OTHER; note = 2'-O-Methyl-guanosine
  modified_base 80: mod_base = OTHER; note = 2'-O-Methyl-guanosine
  modified_base 81: mod_base = OTHER; note = 2'-O-Methyl-cytidine
  modified_base 82: mod_base = OTHER; note = 2'-O-Methyl-adenosine
  modified_base 83: mod_base = OTHER; note = 2'-O-Methyl-cytidine
  modified_base 84: mod_base = OTHER; note = 2'-O-Methyl-cytidine
  modified_base 85: mod_base = OTHER; note = 2'-O-Methyl-guanosine
  modified_base 86: mod_base = OTHER; note = 2'-O-Methyl-adenosine
  modified_base 87: mod_base = OTHER; note = 2'-O-Methyl-guanosine
  modified_base 88: mod_base = OTHER; note = 2'-O-Methyl-uridine
  modified_base 89: mod_base = OTHER; note = 2'-O-Methyl-cytidine
  modified_base 90: mod_base = OTHER; note = 2'-O-Methyl-guanosine
  modified_base 91: mod_base = OTHER; note = 2'-O-Methyl-guanosine
  modified_base 92: mod_base = OTHER; note = 2'-O-Methyl-uridine
  modified_base 93: mod_base = OTHER; note = 2'-O-Methyl-guanosine
  modified_base 94: mod_base = OTHER; note = 2'-O-Methyl-cytidine
  modified_base 95: mod_base = OTHER; note = 2'-O-Methyl-uridine phosphorothioate
  modified_base 96: mod_base = OTHER; note = 2'-O-Methyl-uridine phosphorothioate
  modified_base 97: mod_base = OTHER; note = 2'-O-Methyl-uridine phosphorothioate
  modified_base 98: mod_base = OTHER; note = 2'-O-Methyl-uridine

SEQ ID NO: 1626 - RNA, 97 nt, synthetic construct
  source 1..97: mol_type = other RNA; note = Description of Artificial Sequence: Synthetic oligonucleotide
  modified_base 26: mod_base = OTHER; note = 2'-O-Methyl-guanosine
  modified_base 27: mod_base = OTHER; note = 2'-O-Methyl-cytidine
  modified_base 28: mod_base = OTHER; note = 2'-O-Methyl-uridine
  modified_base 29: mod_base = OTHER; note = 2'-O-Methyl-adenosine
  modified_base 30: mod_base = OTHER; note = 2'-O-Methyl-guanosine
  modified_base 31: mod_base = OTHER; note = 2'-O-Methyl-adenosine
  modified_base 32: mod_base = OTHER; note = 2'-O-Methyl-adenosine
  modified_base 33: mod_base = OTHER; note = 2'-O-Methyl-adenosine
  modified_base 34: mod_base = OTHER; note = 2'-O-Methyl-uridine
  modified_base 35: mod_base = OTHER; note = 2'-O-Methyl-adenosine
  modified_base 36: mod_base = OTHER; note = 2'-O-Methyl-guanosine
  modified_base 37: mod_base = OTHER; note = 2'-O-Methyl-cytidine
  modified_base 66: mod_base = OTHER; note = 2'-O-Methyl-adenosine
  modified_base 67: mod_base = OTHER; note = 2'-O-Methyl-cytidine
  modified_base 68: mod_base = OTHER; note = 2'-O-Methyl-uridine
  modified_base 69: mod_base = OTHER; note = 2'-O-Methyl-uridine
  modified_base 70: mod_base = OTHER; note = 2'-O-Methyl-guanosine
  modified_base 71: mod_base = OTHER; note = 2'-O-Methyl-adenosine
  modified_base 72: mod_base = OTHER; note = 2'-O-Methyl-adenosine
  modified_base 73: mod_base = OTHER; note = 2'-O-Methyl-adenosine
  modified_base 74: mod_base = OTHER; note = 2'-O-Methyl-adenosine
  modified_base 75: mod_base = OTHER; note = 2'-O-Methyl-adenosine
  modified_base 76: mod_base = OTHER; note = 2'-O-Methyl-guanosine
  modified_base 77: mod_base = OTHER; note = 2'-O-Methyl-uridine
  modified_base 78: mod_base = OTHER; note = 2'-O-Methyl-guanosine
  modified_base 79: mod_base = OTHER; note = 2'-O-Methyl-guanosine
  modified_base 80: mod_base = OTHER; note = 2'-O-Methyl-cytidine
  modified_base 81: mod_base = OTHER; note = 2'-O-Methyl-adenosine
  modified_base 82: mod_base = OTHER; note = 2'-O-Methyl-cytidine
  modified_base 83: mod_base = OTHER; note = 2'-O-Methyl-cytidine
  modified_base 84: mod_base = OTHER; note = 2'-O-Methyl-guanosine
  modified_base 85: mod_base = OTHER; note = 2'-O-Methyl-adenosine
  modified_base 86: mod_base = OTHER; note = 2'-O-Methyl-guanosine
  modified_base 87: mod_base = OTHER; note = 2'-O-Methyl-uridine
  modified_base 88: mod_base = OTHER; note = 2'-O-Methyl-cytidine
  modified_base 89: mod_base = OTHER; note = 2'-O-Methyl-guanosine
  modified_base 90: mod_base = OTHER; note = 2'-O-Methyl-guanosine
  modified_base 91: mod_base = OTHER; note = 2'-O-Methyl-uridine
  modified_base 92: mod_base = OTHER; note = 2'-O-Methyl-guanosine
  modified_base 93: mod_base = OTHER; note = 2'-O-Methyl-cytidine
  modified_base 94: mod_base = OTHER; note = 2'-O-Methyl-uridine phosphorothioate
  modified_base 95: mod_base = OTHER; note = 2'-O-Methyl-uridine phosphorothioate
  modified_base 96: mod_base = OTHER; note = 2'-O-Methyl-uridine phosphorothioate
  modified_base 97: mod_base = OTHER; note = 2'-O-Methyl-uridine
aatggcctccttcagttgttttagagctagaaatagcaagttaaaataaggctagtccgttatcaacttgaaaaagtggcaccgagtcggtgctttt

SEQ ID NO: 1627 - RNA, 97 nt, synthetic construct; identical to SEQ ID NO: 1626
  source 1..97: mol_type = other RNA; note = Description of Artificial Sequence: Synthetic oligonucleotide
  modified_base 1: mod_base = OTHER; note = 2'-O-Methyl-adenosine phosphorothioate
  modified_base 2: mod_base = OTHER; note = 2'-O-Methyl-adenosine phosphorothioate
  modified_base 26: mod_base = OTHER; note = 2'-O-Methyl-guanosine
  modified_base 27: mod_base = OTHER; note = 2'-O-Methyl-cytidine
  modified_base 28: mod_base = OTHER; note = 2'-O-Methyl-uridine
  modified_base 29: mod_base = OTHER; note = 2'-O-Methyl-adenosine
  modified_base 30: mod_base = OTHER; note = 2'-O-Methyl-guanosine
  modified_base 31: mod_base = OTHER; note = 2'-O-Methyl-adenosine
  modified_base 32: mod_base = OTHER; note = 2'-O-Methyl-adenosine
  modified_base 33: mod_base = OTHER; note = 2'-O-Methyl-adenosine
  modified_base 34: mod_base = OTHER; note = 2'-O-Methyl-uridine
  modified_base 35: mod_base = OTHER; note = 2'-O-Methyl-adenosine
  modified_base 36: mod_base = OTHER; note = 2'-O-Methyl-guanosine
  modified_base 37: mod_base = OTHER; note = 2'-O-Methyl-cytidine
  modified_base 66: mod_base = OTHER; note = 2'-O-Methyl-adenosine
  modified_base 67: mod_base = OTHER; note = 2'-O-Methyl-cytidine
  modified_base 68: mod_base = OTHER; note = 2'-O-Methyl-uridine
  modified_base 69: mod_base = OTHER; note = 2'-O-Methyl-uridine
  modified_base 70: mod_base = OTHER; note = 2'-O-Methyl-guanosine
  modified_base 71: mod_base = OTHER; note = 2'-O-Methyl-adenosine
  modified_base 72: mod_base = OTHER; note = 2'-O-Methyl-adenosine
  modified_base 73: mod_base = OTHER; note = 2'-O-Methyl-adenosine
  modified_base 74: mod_base = OTHER; note = 2'-O-Methyl-adenosine
  modified_base 75: mod_base = OTHER; note = 2'-O-Methyl-adenosine
  modified_base 76: mod_base = OTHER; note = 2'-O-Methyl-guanosine
  modified_base 77: mod_base = OTHER; note = 2'-O-Methyl-uridine
  modified_base 78: mod_base = OTHER; note = 2'-O-Methyl-guanosine
  modified_base 79: mod_base = OTHER; note = 2'-O-Methyl-guanosine
  modified_base 80: mod_base = OTHER; note = 2'-O-Methyl-cytidine
  modified_base 81: mod_base = OTHER; note = 2'-O-Methyl-adenosine
  modified_base 82: mod_base = OTHER; note = 2'-O-Methyl-cytidine
  modified_base 83: mod_base = OTHER; note = 2'-O-Methyl-cytidine
  modified_base 84: mod_base = OTHER; note = 2'-O-Methyl-guanosine
  modified_base 85: mod_base = OTHER; note = 2'-O-Methyl-adenosine
  modified_base 86: mod_base = OTHER; note = 2'-O-Methyl-guanosine
  modified_base 87: mod_base = OTHER; note = 2'-O-Methyl-uridine
  modified_base 88: mod_base = OTHER; note = 2'-O-Methyl-cytidine
  modified_base 89: mod_base = OTHER; note = 2'-O-Methyl-guanosine
  modified_base 90: mod_base = OTHER; note = 2'-O-Methyl-guanosine
  modified_base 91: mod_base = OTHER; note = 2'-O-Methyl-uridine
  modified_base 92: mod_base = OTHER; note = 2'-O-Methyl-guanosine
  modified_base 93: mod_base = OTHER; note = 2'-O-Methyl-cytidine
  modified_base 94: mod_base = OTHER; note = 2'-O-Methyl-uridine phosphorothioate
  modified_base 95: mod_base = OTHER; note = 2'-O-Methyl-uridine phosphorothioate
  modified_base 96: mod_base = OTHER; note = 2'-O-Methyl-uridine phosphorothioate
  modified_base 97: mod_base = OTHER; note = 2'-O-Methyl-uridine

SEQ ID NO: 1628 - RNA, 100 nt, synthetic construct
  source 1..100: mol_type = other RNA; note = Description of Artificial Sequence: Synthetic polynucleotide
  modified_base 1: mod_base = OTHER; note = 2'-O-Methyl-guanosine phosphorothioate
  modified_base 2: mod_base = OTHER; note = 2'-O-Methyl-cytidine phosphorothioate
  modified_base 3: mod_base = OTHER; note = 2'-O-Methyl-cytidine phosphorothioate
  modified_base 18: mod_base = OTHER; note = inosine
  modified_base 29: mod_base = OTHER; note = 2'-O-Methyl-guanosine
  modified_base 30: mod_base = OTHER; note = 2'-O-Methyl-cytidine
  modified_base 31: mod_base = OTHER; note = 2'-O-Methyl-uridine
  modified_base 32: mod_base = OTHER; note = 2'-O-Methyl-adenosine
  modified_base 33: mod_base = OTHER; note = 2'-O-Methyl-guanosine
  modified_base 34: mod_base = OTHER; note = 2'-O-Methyl-adenosine
  modified_base 35: mod_base = OTHER; note = 2'-O-Methyl-adenosine
  modified_base 36: mod_base = OTHER; note = 2'-O-Methyl-adenosine
  modified_base 37: mod_base = OTHER; note = 2'-O-Methyl-uridine
  modified_base 38: mod_base = OTHER; note = 2'-O-Methyl-adenosine
  modified_base 39: mod_base = OTHER; note = 2'-O-Methyl-guanosine
  modified_base 40: mod_base = OTHER; note = 2'-O-Methyl-cytidine
  modified_base 69: mod_base = OTHER; note = 2'-O-Methyl-adenosine
  modified_base 70: mod_base = OTHER; note = 2'-O-Methyl-cytidine
  modified_base 71: mod_base = OTHER; note = 2'-O-Methyl-uridine
  modified_base 72: mod_base = OTHER; note = 2'-O-Methyl-uridine
  modified_base 73: mod_base = OTHER; note = 2'-O-Methyl-guanosine
  modified_base 74: mod_base = OTHER; note = 2'-O-Methyl-adenosine
  modified_base 75: mod_base = OTHER; note = 2'-O-Methyl-adenosine
  modified_base 76: mod_base = OTHER; note = 2'-O-Methyl-adenosine
  modified_base 77: mod_base = OTHER; note = 2'-O-Methyl-adenosine
  modified_base 78: mod_base = OTHER; note = 2'-O-Methyl-adenosine
  modified_base 79: mod_base = OTHER; note = 2'-O-Methyl-guanosine
  modified_base 80: mod_base = OTHER; note = 2'-O-Methyl-uridine
  modified_base 81: mod_base = OTHER; note = 2'-O-Methyl-guanosine
  modified_base 82: mod_base = OTHER; note = 2'-O-Methyl-guanosine
  modified_base 83: mod_base = OTHER; note = 2'-O-Methyl-cytidine
  modified_base 84: mod_base = OTHER; note = 2'-O-Methyl-adenosine
  modified_base 85: mod_base = OTHER; note = 2'-O-Methyl-cytidine
  modified_base 86: mod_base = OTHER; note = 2'-O-Methyl-cytidine
  modified_base 87: mod_base = OTHER; note = 2'-O-Methyl-guanosine
  modified_base 88: mod_base = OTHER; note = 2'-O-Methyl-adenosine
  modified_base 89: mod_base = OTHER; note = 2'-O-Methyl-guanosine
  modified_base 90: mod_base = OTHER; note = 2'-O-Methyl-uridine
  modified_base 91: mod_base = OTHER; note = 2'-O-Methyl-cytidine
  modified_base 92: mod_base = OTHER; note = 2'-O-Methyl-guanosine
  modified_base 93: mod_base = OTHER; note = 2'-O-Methyl-guanosine
  modified_base 94: mod_base = OTHER; note = 2'-O-Methyl-uridine
  modified_base 95: mod_base = OTHER; note = 2'-O-Methyl-guanosine
  modified_base 96: mod_base = OTHER; note = 2'-O-Methyl-cytidine
  modified_base 97: mod_base = OTHER; note = 2'-O-Methyl-uridine phosphorothioate
  modified_base 98: mod_base = OTHER; note = 2'-O-Methyl-uridine phosphorothioate
  modified_base 99: mod_base = OTHER; note = 2'-O-Methyl-uridine phosphorothioate
  modified_base 100: mod_base = OTHER; note = 2'-O-Methyl-uridine
gccaatggcctccttcanttgttttagagctagaaatagcaagttaaaataaggctagtccgttatcaacttgaaaaagtggcaccgagtcggtgctttt

SEQ ID NO: 1629 - RNA, 100 nt, synthetic construct
  source 1..100: mol_type = other RNA; note = Description of Artificial Sequence: Synthetic polynucleotide
  modified_base 1: mod_base = OTHER; note = 2'-O-Methyl-inosine phosphorothioate
  modified_base 2: mod_base = OTHER; note = 2'-O-Methyl-cytidine phosphorothioate
  modified_base 3: mod_base = OTHER; note = 2'-O-Methyl-cytidine phosphorothioate
  modified_base 18: mod_base = OTHER; note = inosine
  modified_base 29: mod_base = OTHER; note = 2'-O-Methyl-guanosine
  modified_base 30: mod_base = OTHER; note = 2'-O-Methyl-cytidine
  modified_base 31: mod_base = OTHER; note = 2'-O-Methyl-uridine
  modified_base 32: mod_base = OTHER; note = 2'-O-Methyl-adenosine
  modified_base 33: mod_base = OTHER; note = 2'-O-Methyl-guanosine
  modified_base 34: mod_base = OTHER; note = 2'-O-Methyl-adenosine
  modified_base 35: mod_base = OTHER; note = 2'-O-Methyl-adenosine
  modified_base 36: mod_base = OTHER; note = 2'-O-Methyl-adenosine
  modified_base 37: mod_base = OTHER; note = 2'-O-Methyl-uridine
  modified_base 38: mod_base = OTHER; note = 2'-O-Methyl-adenosine
  modified_base 39: mod_base = OTHER; note = 2'-O-Methyl-guanosine
  modified_base 40: mod_base = OTHER; note = 2'-O-Methyl-cytidine
  modified_base 69: mod_base = OTHER; note = 2'-O-Methyl-adenosine
  modified_base 70: mod_base = OTHER; note = 2'-O-Methyl-cytidine
  modified_base 71: mod_base = OTHER; note = 2'-O-Methyl-uridine
  modified_base 72: mod_base = OTHER; note = 2'-O-Methyl-uridine
  modified_base 73: mod_base = OTHER; note = 2'-O-Methyl-guanosine
  modified_base 74: mod_base = OTHER; note = 2'-O-Methyl-adenosine
  modified_base 75: mod_base = OTHER; note = 2'-O-Methyl-adenosine
  modified_base 76: mod_base = OTHER; note = 2'-O-Methyl-adenosine
  modified_base 77: mod_base = OTHER; note = 2'-O-Methyl-adenosine
  modified_base 78: mod_base = OTHER; note = 2'-O-Methyl-adenosine
  modified_base 79: mod_base = OTHER; note = 2'-O-Methyl-guanosine
  modified_base 80: mod_base = OTHER; note = 2'-O-Methyl-uridine
  modified_base 81: mod_base = OTHER; note = 2'-O-Methyl-guanosine
  modified_base 82: mod_base = OTHER; note = 2'-O-Methyl-guanosine
  modified_base 83: mod_base = OTHER; note = 2'-O-Methyl-cytidine
  modified_base 84: mod_base = OTHER; note = 2'-O-Methyl-adenosine
  modified_base 85: mod_base = OTHER; note = 2'-O-Methyl-cytidine
  modified_base 86: mod_base = OTHER; note = 2'-O-Methyl-cytidine
  modified_base 87: mod_base = OTHER; note = 2'-O-Methyl-guanosine
  modified_base 88: mod_base = OTHER; note = 2'-O-Methyl-adenosine
  modified_base 89: mod_base = OTHER; note = 2'-O-Methyl-guanosine
  modified_base 90: mod_base = OTHER; note = 2'-O-Methyl-uridine
  modified_base 91: mod_base = OTHER; note = 2'-O-Methyl-cytidine
  modified_base 92: mod_base = OTHER; note = 2'-O-Methyl-guanosine
  modified_base 93: mod_base = OTHER; note = 2'-O-Methyl-guanosine
  modified_base 94: mod_base = OTHER; note = 2'-O-Methyl-uridine
  modified_base 95: mod_base = OTHER; note = 2'-O-Methyl-guanosine
  modified_base 96: mod_base = OTHER; note = 2'-O-Methyl-cytidine
  modified_base 97: mod_base = OTHER; note = 2'-O-Methyl-uridine phosphorothioate
  modified_base 98: mod_base = OTHER; note = 2'-O-Methyl-uridine phosphorothioate
  modified_base 99: mod_base = OTHER; note = 2'-O-Methyl-uridine phosphorothioate
  modified_base 100: mod_base = OTHER; note = 2'-O-Methyl-uridine
nccaatggcctccttcanttgttttagagctagaaatagcaagttaaaataaggctagtccgttatcaacttgaaaaagtggcaccgagtcggtgctttt

SEQ ID NO: 1630 - RNA, 100 nt, synthetic construct
  source 1..100: mol_type = other RNA; note = Description of Artificial Sequence: Synthetic polynucleotide
  modified_base 1: mod_base = OTHER; note = 2'-O-Methyl-guanosine phosphorothioate
  modified_base 2: mod_base = OTHER; note = 2'-O-Methyl-cytidine phosphorothioate
  modified_base 3: mod_base = OTHER; note = 2'-O-Methyl-cytidine phosphorothioate
  modified_base 7: mod_base = OTHER; note = inosine
  modified_base 8: mod_base = OTHER; note = inosine
  modified_base 18: mod_base = OTHER; note = inosine
  modified_base 29: mod_base = OTHER; note = 2'-O-Methyl-guanosine
  modified_base 30: mod_base = OTHER; note = 2'-O-Methyl-cytidine
  modified_base 31: mod_base = OTHER; note = 2'-O-Methyl-uridine
  modified_base 32: mod_base = OTHER; note = 2'-O-Methyl-adenosine
  modified_base 33: mod_base = OTHER; note = 2'-O-Methyl-guanosine
  modified_base 34: mod_base = OTHER; note = 2'-O-Methyl-adenosine
  modified_base 35: mod_base = OTHER; note = 2'-O-Methyl-adenosine
  modified_base 36: mod_base = OTHER; note = 2'-O-Methyl-adenosine
  modified_base 37: mod_base = OTHER; note = 2'-O-Methyl-uridine
  modified_base 38: mod_base = OTHER; note = 2'-O-Methyl-adenosine
  modified_base 39: mod_base = OTHER; note = 2'-O-Methyl-guanosine
  modified_base 40: mod_base = OTHER; note = 2'-O-Methyl-cytidine
  modified_base 69: mod_base = OTHER; note = 2'-O-Methyl-adenosine
  modified_base 70: mod_base = OTHER; note = 2'-O-Methyl-cytidine
  modified_base 71: mod_base = OTHER; note = 2'-O-Methyl-uridine
  modified_base 72: mod_base = OTHER; note = 2'-O-Methyl-uridine
  modified_base 73: mod_base = OTHER; note = 2'-O-Methyl-guanosine
  modified_base 74: mod_base = OTHER; note = 2'-O-Methyl-adenosine
  modified_base 75: mod_base = OTHER; note = 2'-O-Methyl-adenosine
  modified_base 76: mod_base = OTHER; note = 2'-O-Methyl-adenosine
  modified_base 77: mod_base = OTHER; note = 2'-O-Methyl-adenosine
  modified_base 78: mod_base = OTHER; note = 2'-O-Methyl-adenosine
  modified_base 79: mod_base = OTHER; note = 2'-O-Methyl-guanosine
  modified_base 80: mod_base = OTHER; note = 2'-O-Methyl-uridine
  modified_base 81: mod_base = OTHER; note = 2'-O-Methyl-guanosine
  modified_base 82: mod_base = OTHER; note = 2'-O-Methyl-guanosine
  modified_base 83: mod_base = OTHER; note = 2'-O-Methyl-cytidine
  modified_base 84: mod_base = OTHER; note = 2'-O-Methyl-adenosine
  modified_base 85: mod_base = OTHER; note = 2'-O-Methyl-cytidine
  modified_base 86: mod_base = OTHER; note = 2'-O-Methyl-cytidine
  modified_base 87: mod_base = OTHER; note = 2'-O-Methyl-guanosine
  modified_base 88: mod_base = OTHER; note = 2'-O-Methyl-adenosine
  modified_base 89: mod_base = OTHER; note = 2'-O-Methyl-guanosine
  modified_base 90: mod_base = OTHER; note = 2'-O-Methyl-uridine
  modified_base 91: mod_base = OTHER; note = 2'-O-Methyl-cytidine
  modified_base 92: mod_base = OTHER; note = 2'-O-Methyl-guanosine
  modified_base 93: mod_base = OTHER; note = 2'-O-Methyl-guanosine
  modified_base 94: mod_base = OTHER; note = 2'-O-Methyl-uridine
  modified_base 95: mod_base = OTHER; note = 2'-O-Methyl-guanosine
  modified_base 96: mod_base = OTHER; note = 2'-O-Methyl-cytidine
  modified_base 97: mod_base = OTHER; note = 2'-O-Methyl-uridine phosphorothioate
  modified_base 98: mod_base = OTHER; note = 2'-O-Methyl-uridine phosphorothioate
  modified_base 99: mod_base = OTHER; note = 2'-O-Methyl-uridine phosphorothioate
  modified_base 100: mod_base = OTHER; note = 2'-O-Methyl-uridine
gccaatnncctccttcanttgttttagagctagaaatagcaagttaaaataaggctagtccgttatcaacttgaaaaagtggcaccgagtcggtgctttt

SEQ ID NO: 1631 - RNA, 100 nt, synthetic construct
  source 1..100: mol_type = other RNA; note = Description of Artificial Sequence: Synthetic polynucleotide
  modified_base 1: mod_base = OTHER; note = 2'-O-Methyl-adenosine phosphorothioate
  modified_base 2: mod_base = OTHER; note = 2'-O-Methyl-cytidine phosphorothioate
  modified_base 3: mod_base = OTHER; note = 2'-O-Methyl-cytidine phosphorothioate
  modified_base 29: mod_base = OTHER; note = 2'-O-Methyl-guanosine
  modified_base 30: mod_base = OTHER; note = 2'-O-Methyl-cytidine
  modified_base 31: mod_base = OTHER; note = 2'-O-Methyl-uridine
  modified_base 32: mod_base = OTHER; note = 2'-O-Methyl-adenosine
  modified_base 33: mod_base = OTHER; note = 2'-O-Methyl-guanosine
  modified_base 34: mod_base = OTHER; note = 2'-O-Methyl-adenosine
  modified_base 35: mod_base = OTHER; note = 2'-O-Methyl-adenosine
  modified_base 36: mod_base = OTHER; note = 2'-O-Methyl-adenosine
  modified_base 37: mod_base = OTHER; note = 2'-O-Methyl-uridine
  modified_base 38: mod_base = OTHER; note = 2'-O-Methyl-adenosine
  modified_base 39: mod_base = OTHER; note = 2'-O-Methyl-guanosine
  modified_base 40: mod_base = OTHER; note = 2'-O-Methyl-cytidine
  modified_base 69: mod_base = OTHER; note = 2'-O-Methyl-adenosine
  modified_base 70: mod_base = OTHER; note = 2'-O-Methyl-cytidine
  modified_base 71: mod_base = OTHER; note = 2'-O-Methyl-uridine
  modified_base 72: mod_base = OTHER; note = 2'-O-Methyl-uridine
  modified_base 73: mod_base = OTHER; note = 2'-O-Methyl-guanosine
  modified_base 74: mod_base = OTHER; note = 2'-O-Methyl-adenosine
  modified_base 75: mod_base = OTHER; note = 2'-O-Methyl-adenosine
  modified_base 76: mod_base = OTHER; note = 2'-O-Methyl-adenosine
  modified_base 77: mod_base = OTHER; note = 2'-O-Methyl-adenosine
  modified_base 78: mod_base = OTHER; note = 2'-O-Methyl-adenosine
  modified_base 79: mod_base = OTHER; note = 2'-O-Methyl-guanosine
  modified_base 80: mod_base = OTHER; note = 2'-O-Methyl-uridine
  modified_base 81: mod_base = OTHER; note = 2'-O-Methyl-guanosine
  modified_base 82: mod_base = OTHER; note = 2'-O-Methyl-guanosine
  modified_base 83: mod_base = OTHER; note = 2'-O-Methyl-cytidine
  modified_base 84: mod_base = OTHER; note = 2'-O-Methyl-adenosine
  modified_base 85: mod_base = OTHER; note = 2'-O-Methyl-cytidine
  modified_base 86: mod_base = OTHER; note = 2'-O-Methyl-cytidine
  modified_base 87: mod_base = OTHER; note = 2'-O-Methyl-guanosine
  modified_base 88: mod_base = OTHER; note = 2'-O-Methyl-adenosine
  modified_base 89: mod_base = OTHER; note = 2'-O-Methyl-guanosine
  modified_base 90: mod_base = OTHER; note = 2'-O-Methyl-uridine
  modified_base 91: mod_base = OTHER; note = 2'-O-Methyl-cytidine
  modified_base 92: mod_base = OTHER; note = 2'-O-Methyl-guanosine
  modified_base 93: mod_base = OTHER; note = 2'-O-Methyl-guanosine
  modified_base 94: mod_base = OTHER; note = 2'-O-Methyl-uridine
  modified_base 95: mod_base = OTHER; note = 2'-O-Methyl-guanosine
  modified_base 96: mod_base = OTHER; note = 2'-O-Methyl-cytidine
  modified_base 97: mod_base = OTHER; note = 2'-O-Methyl-uridine phosphorothioate
  modified_base 98: mod_base = OTHER; note = 2'-O-Methyl-uridine phosphorothioate
  modified_base 99: mod_base = OTHER; note = 2'-O-Methyl-uridine phosphorothioate
  modified_base 100: mod_base = OTHER; note = 2'-O-Methyl-uridine
accaatggcctccttcagttgttttagagctagaaatagcaagttaaaataaggctagtccgttatcaacttgaaaaagtggcaccgagtcggtgctttt

SEQ ID NO: 1632 - RNA, 100 nt, synthetic construct
  source 1..100: mol_type = other RNA; note = Description of Artificial Sequence: Synthetic polynucleotide
  modified_base 1: mod_base = OTHER; note = 2'-O-Methyl-inosine phosphorothioate
  modified_base 2: mod_base = OTHER; note = 2'-O-Methyl-cytidine phosphorothioate
  modified_base 3: mod_base = OTHER; note = 2'-O-Methyl-cytidine phosphorothioate
  modified_base 7: mod_base = OTHER; note = 2'-O-Methyl-inosine
  modified_base 29: mod_base = OTHER; note = 2'-O-Methyl-guanosine
  modified_base 30: mod_base = OTHER; note = 2'-O-Methyl-cytidine
  modified_base 31: mod_base = OTHER; note = 2'-O-Methyl-uridine
  modified_base 32: mod_base = OTHER; note = 2'-O-Methyl-adenosine
  modified_base 33: mod_base = OTHER; note = 2'-O-Methyl-guanosine
  modified_base 34: mod_base = OTHER; note = 2'-O-Methyl-adenosine
  modified_base 35: mod_base = OTHER; note = 2'-O-Methyl-adenosine
  modified_base 36: mod_base = OTHER; note = 2'-O-Methyl-adenosine
  modified_base 37: mod_base = OTHER; note = 2'-O-Methyl-uridine
  modified_base 38: mod_base = OTHER; note = 2'-O-Methyl-adenosine
  modified_base 39: mod_base = OTHER; note = 2'-O-Methyl-guanosine
  modified_base 40: mod_base = OTHER; note = 2'-O-Methyl-cytidine
  modified_base 69: mod_base = OTHER; note = 2'-O-Methyl-adenosine
  modified_base 70: mod_base = OTHER; note = 2'-O-Methyl-cytidine
  modified_base 71: mod_base = OTHER; note = 2'-O-Methyl-uridine
  modified_base 72: mod_base = OTHER; note = 2'-O-Methyl-uridine
  modified_base 73: mod_base = OTHER; note = 2'-O-Methyl-guanosine
  modified_base 74: mod_base = OTHER; note = 2'-O-Methyl-adenosine
  modified_base 75: mod_base = OTHER; note = 2'-O-Methyl-adenosine
  modified_base 76: mod_base = OTHER; note = 2'-O-Methyl-adenosine
  modified_base 77: mod_base = OTHER; note = 2'-O-Methyl-adenosine
  modified_base 78: mod_base = OTHER; note = 2'-O-Methyl-adenosine
  modified_base 79: mod_base = OTHER; note = 2'-O-Methyl-guanosine
  modified_base 80: mod_base = OTHER; note = 2'-O-Methyl-uridine
  modified_base 81: mod_base = OTHER; note = 2'-O-Methyl-guanosine
  modified_base 82: mod_base = OTHER; note = 2'-O-Methyl-guanosine
  modified_base 83: mod_base = OTHER; note = 2'-O-Methyl-cytidine
  modified_base 84: mod_base = OTHER; note = 2'-O-Methyl-adenosine
  modified_base 85: mod_base = OTHER; note = 2'-O-Methyl-cytidine
  modified_base 86: mod_base = OTHER; note = 2'-O-Methyl-cytidine
  modified_base 87: mod_base = OTHER; note = 2'-O-Methyl-guanosine
  modified_base 88: mod_base = OTHER; note = 2'-O-Methyl-adenosine
  modified_base 89: mod_base = OTHER; note = 2'-O-Methyl-guanosine
  modified_base 90: mod_base = OTHER; note = 2'-O-Methyl-uridine
  modified_base 91: mod_base = OTHER; note = 2'-O-Methyl-cytidine
  modified_base 92: mod_base = OTHER; note = 2'-O-Methyl-guanosine
  modified_base 93: mod_base = OTHER; note = 2'-O-Methyl-guanosine
  modified_base 94: mod_base = OTHER; note = 2'-O-Methyl-uridine
  modified_base 95: mod_base = OTHER; note = 2'-O-Methyl-guanosine
  modified_base 96: mod_base = OTHER; note = 2'-O-Methyl-cytidine
  modified_base 97: mod_base = OTHER; note = 2'-O-Methyl-uridine phosphorothioate
  modified_base 98: mod_base = OTHER; note = 2'-O-Methyl-uridine phosphorothioate
  modified_base 99: mod_base = OTHER; note = 2'-O-Methyl-uridine phosphorothioate
  modified_base 100: mod_base = OTHER; note = 2'-O-Methyl-uridine
nccaatngcctccttcagttgttttagagctagaaatagcaagttaaaataaggctagtccgttatcaacttgaaaaagtggcaccgagtcggtgctttt

SEQ ID NO: 1633 - RNA, 100 nt, synthetic construct
  source 1..100: mol_type = other RNA; note = Description of Artificial Sequence: Synthetic polynucleotide
  modified_base 1: mod_base = OTHER; note = 2'-O-Methyl-guanosine phosphorothioate
  modified_base 2: mod_base = OTHER; note = 2'-O-Methyl-cytidine phosphorothioate
  modified_base 3: mod_base = OTHER; note = 2'-O-Methyl-cytidine phosphorothioate
  modified_base 7: mod_base = OTHER; note = 2'-O-Methyl-inosine
  modified_base 29: mod_base = OTHER; note = 2'-O-Methyl-guanosine
  modified_base 30: mod_base = OTHER; note = 2'-O-Methyl-cytidine
  modified_base 31: mod_base = OTHER; note = 2'-O-Methyl-uridine
  modified_base 32: mod_base = OTHER; note = 2'-O-Methyl-adenosine
  modified_base 33: mod_base = OTHER; note = 2'-O-Methyl-guanosine
  modified_base 34: mod_base = OTHER; note = 2'-O-Methyl-adenosine
  modified_base 35: mod_base = OTHER; note = 2'-O-Methyl-adenosine
  modified_base 36: mod_base = OTHER; note = 2'-O-Methyl-adenosine
  modified_base 37: mod_base = OTHER; note = 2'-O-Methyl-uridine
  modified_base 38: mod_base = OTHER; note = 2'-O-Methyl-adenosine
  modified_base 39: mod_base = OTHER; note = 2'-O-Methyl-guanosine
  modified_base 40: mod_base = OTHER; note = 2'-O-Methyl-cytidine
  modified_base 69: mod_base = OTHER; note = 2'-O-Methyl-adenosine
  modified_base 70: mod_base = OTHER; note = 2'-O-Methyl-cytidine
  modified_base 71: mod_base = OTHER; note = 2'-O-Methyl-uridine
  modified_base 72: mod_base = OTHER; note = 2'-O-Methyl-uridine
  modified_base 73: mod_base = OTHER; note = 2'-O-Methyl-guanosine
  modified_base 74: mod_base = OTHER; note = 2'-O-Methyl-adenosine
  modified_base 75: mod_base = OTHER; note = 2'-O-Methyl-adenosine
  modified_base 76: mod_base = OTHER; note = 2'-O-Methyl-adenosine
  modified_base 77: mod_base = OTHER; note = 2'-O-Methyl-adenosine
  modified_base 78: mod_base = OTHER; note = 2'-O-Methyl-adenosine
  modified_base 79: mod_base = OTHER; note = 2'-O-Methyl-guanosine
  modified_base 80: mod_base = OTHER; note = 2'-O-Methyl-uridine
  modified_base 81: mod_base = OTHER; note = 2'-O-Methyl-guanosine
  modified_base 82: mod_base = OTHER; note = 2'-O-Methyl-guanosine
  modified_base 83: mod_base = OTHER; note = 2'-O-Methyl-cytidine
  modified_base 84: mod_base = OTHER; note = 2'-O-Methyl-adenosine
  modified_base 85: mod_base = OTHER; note = 2'-O-Methyl-cytidine
  modified_base 86: mod_base = OTHER; note = 2'-O-Methyl-cytidine
  modified_base 87: mod_base = OTHER; note = 2'-O-Methyl-guanosine
  modified_base 88: mod_base = OTHER; note = 2'-O-Methyl-adenosine
  modified_base 89: mod_base = OTHER; note = 2'-O-Methyl-guanosine
  modified_base 90: mod_base = OTHER; note = 2'-O-Methyl-uridine
  modified_base 91: mod_base = OTHER; note = 2'-O-Methyl-cytidine
  modified_base 92: mod_base = OTHER; note = 2'-O-Methyl-guanosine
  modified_base 93: mod_base = OTHER; note = 2'-O-Methyl-guanosine
  modified_base 94: mod_base = OTHER; note = 2'-O-Methyl-uridine
  modified_base 95: mod_base = OTHER; note = 2'-O-Methyl-guanosine
  modified_base 96: mod_base = OTHER; note = 2'-O-Methyl-cytidine
  modified_base 97: mod_base = OTHER; note = 2'-O-Methyl-uridine phosphorothioate
  modified_base 98: mod_base = OTHER; note = 2'-O-Methyl-uridine phosphorothioate
  modified_base 99: mod_base = OTHER; note = 2'-O-Methyl-uridine phosphorothioate
  modified_base 100: mod_base = OTHER; note = 2'-O-Methyl-uridine
gccaatngcctccttcagttgttttagagctagaaatagcaagttaaaataaggctagtccgttatcaacttgaaaaagtggcaccgagtcggtgctttt

SEQ ID NO: 1634 - RNA, 100 nt, synthetic construct
  source 1..100: mol_type = other RNA; note = Description of Artificial Sequence: Synthetic polynucleotide
  modified_base 1: mod_base = OTHER; note = 2'-O-Methyl-guanosine phosphorothioate
  modified_base 2: mod_base = OTHER; note = 2'-O-Methyl-cytidine phosphorothioate
  modified_base 3: mod_base = OTHER; note = 2'-O-Methyl-guanosine phosphorothioate
  modified_base 97: mod_base = OTHER; note = uridine phosphorothioate
  modified_base 98: mod_base = OTHER; note = 2'-O-Methyl-uridine phosphorothioate
  modified_base 99: mod_base = OTHER; note = 2'-O-Methyl-uridine phosphorothioate
  modified_base 100: mod_base = OTHER; note = 2'-O-Methyl-uridine
gcgaatggcctcctgcagctgttttagagctagaaatagcaagttaaaataaggctagtccgttatcaacttgaaaaagtggcaccgagtcggtgctttt

SEQ ID NO: 1635 - RNA, 100 nt, synthetic construct
  source 1..100: mol_type = other RNA; note = Description of Artificial Sequence: Synthetic polynucleotide
  modified_base 1: mod_base = OTHER; note = 2'-O-Methyl-adenosine phosphorothioate
  modified_base 2: mod_base = OTHER; note = 2'-O-Methyl-guanosine phosphorothioate
  modified_base 3: mod_base = OTHER; note = 2'-O-Methyl-cytidine phosphorothioate
  modified_base 97: mod_base = OTHER; note = uridine phosphorothioate
  modified_base 98: mod_base = OTHER; note = 2'-O-Methyl-uridine phosphorothioate
  modified_base 99: mod_base = OTHER; note = 2'-O-Methyl-uridine phosphorothioate
  modified_base 100: mod_base = OTHER; note = 2'-O-Methyl-uridine
agcccttcaacacaaggtcagttttagagctagaaatagcaagttaaaataaggctagtccgttatcaacttgaaaaagtggcaccgagtcggtgctttt

SEQ ID NO: 1636 - RNA, 100 nt, synthetic construct
  source 1..100: mol_type = other RNA; note = Description of Artificial Sequence: Synthetic polynucleotide
taagaccatgtcccaactgagttttagagctagaaatagcaagttaaaataaggctagtccgttatcaacttgaaaaagtggcaccgagtcggtgctttt

SEQ ID NO: 1637 - RNA, 100 nt, synthetic construct
  source 1..100: mol_type = other RNA; note = Description of Artificial Sequence: Synthetic polynucleotide
  modified_base 1: mod_base = OTHER; note = 2'-O-Methyl-cytidine phosphorothioate
  modified_base 2: mod_base = OTHER; note = 2'-O-Methyl-adenosine phosphorothioate
  modified_base 3: mod_base = OTHER; note = 2'-O-Methyl-adenosine phosphorothioate
  modified_base 97: mod_base = OTHER; note = uridine phosphorothioate
  modified_base 98: mod_base = OTHER; note = 2'-O-Methyl-uridine phosphorothioate
  modified_base 99: mod_base = OTHER; note = 2'-O-Methyl-uridine phosphorothioate
  modified_base 100: mod_base = OTHER; note = 2'-O-Methyl-uridine
caatgtccccaatgcaatccgttttagagctagaaatagcaagttaaaataaggctagtccgttatcaacttgaaaaagtggcaccgagtcggtgctttt

SEQ ID NO: 1638 - RNA, 100 nt, synthetic construct
  source 1..100: mol_type = other RNA; note = Description of Artificial Sequence: Synthetic polynucleotide
  modified_base 1: mod_base = OTHER; note = 2'-O-Methyl-uridine phosphorothioate
  modified_base 2: mod_base = OTHER; note = 2'-O-Methyl-uridine phosphorothioate
  modified_base 3: mod_base = OTHER; note = 2'-O-Methyl-guanosine phosphorothioate
  modified_base 97: mod_base = OTHER; note = uridine phosphorothioate
  modified_base 98: mod_base = OTHER; note = 2'-O-Methyl-uridine phosphorothioate
  modified_base 99: mod_base = OTHER; note = 2'-O-Methyl-uridine phosphorothioate
  modified_base 100: mod_base = OTHER; note = 2'-O-Methyl-uridine
ttgttttccgggattgcattgttttagagctagaaatagcaagttaaaataaggctagtccgttatcaacttgaaaaagtggcaccgagtcggtgctttt

SEQ ID NO: 1639 - RNA, 100 nt, synthetic construct
  source 1..100: mol_type = other RNA; note = Description of Artificial Sequence: Synthetic polynucleotide
  modified_base 1: mod_base = OTHER; note = 2'-O-Methyl-uridine phosphorothioate
  modified_base 2: mod_base = OTHER; note = 2'-O-Methyl-uridine phosphorothioate
  modified_base 3: mod_base = OTHER; note = 2'-O-Methyl-uridine phosphorothioate
  modified_base 97: mod_base = OTHER; note = uridine phosphorothioate
  modified_base 98: mod_base = OTHER; note = 2'-O-Methyl-uridine phosphorothioate
  modified_base 99: mod_base = OTHER; note = 2'-O-Methyl-uridine phosphorothioate
  modified_base 100: mod_base = OTHER; note = 2'-O-Methyl-uridine
tttgttttccgggattgcatgttttagagctagaaatagcaagttaaaataaggctagtccgttatcaacttgaaaaagtggcaccgagtcggtgctttt

SEQ ID NO: 1640 - RNA, 100 nt, synthetic construct
  source 1..100: mol_type = other RNA; note = Description of Artificial Sequence: Synthetic polynucleotide
  modified_base 1: mod_base = OTHER; note = 2'-O-Methyl-adenosine phosphorothioate
  modified_base 2: mod_base = OTHER; note = 2'-O-Methyl-adenosine phosphorothioate
  modified_base 3: mod_base = OTHER; note = 2'-O-Methyl-uridine phosphorothioate
  modified_base 97: mod_base = OTHER; note = uridine phosphorothioate
  modified_base 98: mod_base = OTHER; note = 2'-O-Methyl-uridine phosphorothioate
  modified_base 99: mod_base = OTHER; note = 2'-O-Methyl-uridine phosphorothioate
  modified_base 100: mod_base = OTHER; note = 2'-O-Methyl-uridine
aatcccggaaaacaaagattgttttagagctagaaatagcaagttaaaataaggctagtccgttatcaacttgaaaaagtggcaccgagtcggtgctttt

SEQ ID NO: 1641 - RNA, 100 nt, synthetic construct
  source 1..100: mol_type = other RNA; note = Description of Artificial Sequence: Synthetic polynucleotide
  modified_base 1: mod_base = OTHER; note = 2'-O-Methyl-uridine phosphorothioate
  modified_base 2: mod_base = OTHER; note = 2'-O-Methyl-guanosine phosphorothioate
  modified_base 3: mod_base = OTHER; note = 2'-O-Methyl-uridine phosphorothioate
  modified_base 97: mod_base = OTHER; note = uridine phosphorothioate
  modified_base 98: mod_base = OTHER; note = 2'-O-Methyl-uridine phosphorothioate
  modified_base 99: mod_base = OTHER; note = 2'-O-Methyl-uridine phosphorothioate
  modified_base 100: mod_base = OTHER; note = 2'-O-Methyl-uridine
tgttttccgggattgcattggttttagagctagaaatagcaagttaaaataaggctagtccgttatcaacttgaaaaagtggcaccgagtcggtgctttt

SEQ ID NO: 1642 - RNA, 100 nt, synthetic construct; identical to SEQ ID NO: 421
  source 1..100: mol_type = other RNA; note = Description of Artificial Sequence: Synthetic polynucleotide
  modified_base 1: mod_base = OTHER; note = 2'-O-Methyl-cytidine phosphorothioate
  modified_base 2: mod_base = OTHER; note = 2'-O-Methyl-cytidine phosphorothioate
  modified_base 3: mod_base = OTHER; note = 2'-O-Methyl-cytidine phosphorothioate
  modified_base 21: mod_base = OTHER; note = 2'-O-Methyl-guanosine
  modified_base 28: mod_base = OTHER; note = 2'-O-Methyl-adenosine
  modified_base 29: mod_base = OTHER; note = 2'-O-Methyl-guanosine
  modified_base 30: mod_base = OTHER; note = 2'-O-Methyl-cytidine
  modified_base 31: mod_base = OTHER; note = 2'-O-Methyl-uridine
  modified_base 32: mod_base = OTHER; note = 2'-O-Methyl-adenosine
  modified_base 34: mod_base = OTHER; note = 2'-O-Methyl-adenosine
  modified_base 35: mod_base = OTHER; note = 2'-O-Methyl-adenosine
  modified_base 36: mod_base = OTHER; note = 2'-O-Methyl-adenosine
  modified_base 37: mod_base = OTHER; note = 2'-O-Methyl-uridine
  modified_base 38: mod_base = OTHER; note = 2'-O-Methyl-adenosine
  modified_base 39: mod_base = OTHER; note = 2'-O-Methyl-guanosine
  modified_base 40: mod_base = OTHER; note = 2'-O-Methyl-cytidine
  modified_base 41: mod_base = OTHER; note = 2'-O-Methyl-adenosine
  modified_base 42: mod_base = OTHER; note = 2'-O-Methyl-adenosine
  modified_base 46: mod_base = OTHER; note = 2'-O-Methyl-adenosine
  modified_base 48: mod_base = OTHER; note = 2'-O-Methyl-adenosine
  modified_base 50: mod_base = OTHER; note = 2'-O-Methyl-uridine
  modified_base 52: mod_base = OTHER; note = 2'-O-Methyl-adenosine
  modified_base 53: mod_base = OTHER; note = 2'-O-Methyl-guanosine
  modified_base 54: mod_base = OTHER; note = 2'-O-Methyl-guanosine
  modified_base 55: mod_base = OTHER; note = 2'-O-Methyl-cytidine
  modified_base 56: mod_base = OTHER; note = 2'-O-Methyl-uridine
  modified_base 57: mod_base = OTHER; note = 2'-O-Methyl-adenosine
  modified_base 60: mod_base = OTHER; note = 2'-O-Methyl-cytidine
  modified_base 61: mod_base = OTHER; note = 2'-O-Methyl-cytidine
  modified_base 66: mod_base = OTHER; note = 2'-O-Methyl-uridine
  modified_base 67: mod_base = OTHER; note = 2'-O-Methyl-cytidine
  modified_base 70: mod_base = OTHER; note = 2'-O-Methyl-cytidine
  modified_base 71: mod_base = OTHER; note = 2'-O-Methyl-uridine
  modified_base 72: mod_base = OTHER; note = 2'-O-Methyl-uridine
  modified_base 74: mod_base = OTHER; note = 2'-O-Methyl-adenosine
  modified_base 75: mod_base = OTHER; note = 2'-O-Methyl-adenosine
  modified_base 76: mod_base = OTHER; note = 2'-O-Methyl-adenosine
  modified_base 77: mod_base = OTHER; note = 2'-O-Methyl-adenosine
  modified_base 78: mod_base = OTHER; note = 2'-O-Methyl-adenosine
  modified_base 79: mod_base = OTHER; note = 2'-O-Methyl-guanosine
  modified_base 80: mod_base = OTHER; note = 2'-O-Methyl-uridine
  modified_base 81: mod_base = OTHER; note = 2'-O-Methyl-guanosine
  modified_base 83: mod_base = OTHER; note = 2'-O-Methyl-cytidine
  modified_base 84: mod_base = OTHER; note = 2'-O-Methyl-adenosine
  modified_base 85: mod_base = OTHER; note = 2'-O-Methyl-cytidine
  modified_base 86: mod_base = OTHER; note = 2'-O-Methyl-cytidine
  modified_base 87: mod_base = OTHER; note = 2'-O-Methyl-guanosine
  modified_base 88: mod_base = OTHER; note = 2'-O-Methyl-adenosine
  modified_base 89: mod_base = OTHER; note = 2'-O-Methyl-guanosine
  modified_base 90: mod_base = OTHER; note = 2'-O-Methyl-uridine
  modified_base 91: mod_base = OTHER; note = 2'-O-Methyl-cytidine
  modified_base 92: mod_base = OTHER; note = 2'-O-Methyl-guanosine
  modified_base 93: mod_base = OTHER; note = 2'-O-Methyl-guanosine
  modified_base 94: mod_base = OTHER; note = 2'-O-Methyl-uridine
  modified_base 95: mod_base = OTHER; note = 2'-O-Methyl-guanosine
  modified_base 96: mod_base = OTHER; note = 2'-O-Methyl-cytidine
  modified_base 97: mod_base = OTHER; note = 2'-O-Methyl-uridine
  modified_base 98: mod_base = OTHER; note = 2'-O-Methyl-uridine phosphorothioate
  modified_base 99: mod_base = OTHER; note = 2'-O-Methyl-uridine phosphorothioate
  modified_base 100: mod_base = OTHER; note = 2'-O-Methyl-uridine

SEQ ID NO: 1643 - RNA, 103 nt, synthetic construct
  source 1..103: mol_type = other RNA; note = Description of Artificial Sequence: Synthetic polynucleotide
  modified_base 1: mod_base = OTHER; note = 2'-O-Methyl-cytidine phosphorothioate
  modified_base 2: mod_base = OTHER; note = 2'-O-Methyl-cytidine phosphorothioate
  modified_base 3: mod_base = OTHER; note = 2'-O-Methyl-cytidine phosphorothioate
  modified_base 21: mod_base = OTHER; note = 2'-O-Methyl-guanosine
  modified_base 28: mod_base = OTHER; note = 2'-O-Methyl-adenosine
  modified_base 29: mod_base = OTHER; note = 2'-O-Methyl-guanosine
  modified_base 30: mod_base = OTHER; note = 2'-O-Methyl-cytidine
  modified_base 31: mod_base = OTHER; note = 2'-O-Methyl-uridine
  modified_base 32: mod_base = OTHER; note = 2'-O-Methyl-adenosine
  modified_base 34: mod_base = OTHER; note = 2'-O-Methyl-adenosine
  modified_base 35: mod_base = OTHER; note = 2'-O-Methyl-adenosine
  modified_base 36: mod_base = OTHER; note = 2'-O-Methyl-adenosine
  modified_base 37: mod_base = OTHER; note = 2'-O-Methyl-uridine
  modified_base 38: mod_base = OTHER; note = 2'-O-Methyl-adenosine
  modified_base 39: mod_base = OTHER; note = 2'-O-Methyl-guanosine
  modified_base 40: mod_base = OTHER; note = 2'-O-Methyl-cytidine
  modified_base 41: mod_base = OTHER; note = 2'-O-Methyl-adenosine
  modified_base 42: mod_base = OTHER; note = 2'-O-Methyl-adenosine
  modified_base 46: mod_base = OTHER; note = 2'-O-Methyl-adenosine
  modified_base 48: mod_base = OTHER; note = 2'-O-Methyl-adenosine
  modified_base 50: mod_base = OTHER; note = 2'-O-Methyl-uridine
  modified_base 52: mod_base = OTHER; note = 2'-O-Methyl-adenosine
  modified_base 53: mod_base = OTHER; note = 2'-O-Methyl-guanosine
  modified_base 54: mod_base = OTHER; note = 2'-O-Methyl-guanosine
  modified_base 55: mod_base = OTHER; note = 2'-O-Methyl-cytidine
  modified_base 56: mod_base = OTHER; note = 2'-O-Methyl-uridine
  modified_base 57: mod_base = OTHER; note = 2'-O-Methyl-adenosine
  modified_base 60: mod_base = OTHER; note = 2'-O-Methyl-cytidine
  modified_base 61: mod_base = OTHER; note = 2'-O-Methyl-cytidine
  modified_base 66: mod_base = OTHER; note = 2'-O-Methyl-uridine
  modified_base 67: mod_base = OTHER; note = 2'-O-Methyl-cytidine
  modified_base 70: mod_base = OTHER; note = 2'-O-Methyl-cytidine
  modified_base 71: mod_base = OTHER; note = 2'-O-Methyl-uridine
  modified_base 72: mod_base = OTHER; note = 2'-O-Methyl-uridine
  modified_base 74: mod_base = OTHER; note = 2'-O-Methyl-adenosine
  modified_base 75: mod_base = OTHER; note = 2'-O-Methyl-adenosine
  modified_base 76: mod_base = OTHER; note = 2'-O-Methyl-adenosine
  modified_base 77: mod_base = OTHER; note = 2'-O-Methyl-adenosine
  modified_base 78: mod_base = OTHER; note = 2'-O-Methyl-adenosine
  modified_base 79: mod_base = OTHER; note = 2'-O-Methyl-guanosine
  modified_base 80: mod_base = OTHER; note = 2'-O-Methyl-uridine
  modified_base 81: mod_base = OTHER; note = 2'-O-Methyl-guanosine
  modified_base 83: mod_base = OTHER; note = 2'-O-Methyl-cytidine
  modified_base 84: mod_base = OTHER; note = 2'-O-Methyl-adenosine
  modified_base 85: mod_base = OTHER; note = 2'-O-Methyl-cytidine
  modified_base 86: mod_base = OTHER; note = 2'-O-Methyl-cytidine
  modified_base 87: mod_base = OTHER; note = 2'-O-Methyl-guanosine
  modified_base 88: mod_base = OTHER; note = 2'-O-Methyl-adenosine
  modified_base 89: mod_base = OTHER; note = 2'-O-Methyl-guanosine
  modified_base 90: mod_base = OTHER; note = 2'-O-Methyl-uridine
  modified_base 91: mod_base = OTHER; note = 2'-O-Methyl-cytidine
  modified_base 92: mod_base = OTHER; note = 2'-O-Methyl-guanosine
  modified_base 93: mod_base = OTHER; note = 2'-O-Methyl-guanosine
  modified_base 94: mod_base = OTHER; note = 2'-O-Methyl-uridine
  modified_base 95: mod_base = OTHER; note = 2'-O-Methyl-guanosine
  modified_base 96: mod_base = OTHER; note = 2'-O-Methyl-cytidine
  modified_base 97: mod_base = OTHER; note = 2'-O-Methyl-uridine phosphorothioate
  modified_base 98: mod_base = OTHER; note = 2'-O-Methyl-uridine phosphorothioate
  modified_base 99: mod_base = OTHER; note = 2'-O-Methyl-uridine phosphorothioate
  modified_base 100: mod_base = OTHER; note = 2'-O-Methyl-uridine
  modified_base 101: mod_base = OTHER; note = 2'-O-Methyl-uridine
  modified_base 102: mod_base = OTHER; note = 2'-O-Methyl-uridine
  modified_base 103: mod_base = OTHER; note = 2'-O-Methyl-uridine
cccataccttggagcaacgggttttagagctagaaatagcaagttaaaataaggctagtccgttatcaacttgaaaaagtggcaccgagtcggtgcttttttt

SEQ ID NO: 1644 - RNA, 103 nt, synthetic construct; identical to SEQ ID NO: 1643
  source 1..103: mol_type = other RNA; note = Description of Artificial Sequence: Synthetic polynucleotide
  modified_base 1: mod_base = OTHER; note = 2'-O-Methyl-cytidine phosphorothioate
  modified_base 2: mod_base = OTHER; note = 2'-O-Methyl-cytidine phosphorothioate
  modified_base 3: mod_base = OTHER; note = 2'-O-Methyl-cytidine phosphorothioate
  modified_base 21: mod_base = OTHER; note = 2'-O-Methyl-guanosine
  modified_base 28: mod_base = OTHER; note = 2'-O-Methyl-adenosine
  modified_base 29: mod_base = OTHER; note = 2'-O-Methyl-guanosine
  modified_base 30: mod_base = OTHER; note = 2'-O-Methyl-cytidine
  modified_base 31: mod_base = OTHER; note = 2'-O-Methyl-uridine
  modified_base 32: mod_base = OTHER; note = 2'-O-Methyl-adenosine
  modified_base 34: mod_base = OTHER; note = 2'-O-Methyl-adenosine
  modified_base 35: mod_base = OTHER; note = 2'-O-Methyl-adenosine
  modified_base 36: mod_base = OTHER; note = 2'-O-Methyl-adenosine
  modified_base 37: mod_base = OTHER; note = 2'-O-Methyl-uridine
  modified_base 38: mod_base = OTHER; note = 2'-O-Methyl-adenosine
  modified_base 39: mod_base = OTHER; note = 2'-O-Methyl-guanosine
  modified_base 40: mod_base = OTHER; note = 2'-O-Methyl-cytidine
  modified_base 41: mod_base = OTHER; note = 2'-O-Methyl-adenosine
  modified_base 42: mod_base = OTHER; note = 2'-O-Methyl-adenosine
  modified_base 46: mod_base = OTHER; note = 2'-O-Methyl-adenosine
  modified_base 48: mod_base = OTHER; note = 2'-O-Methyl-adenosine
  modified_base 50: mod_base = OTHER; note = 2'-O-Methyl-uridine
  modified_base 52: mod_base = OTHER; note = 2'-O-Methyl-adenosine
  modified_base 53: mod_base = OTHER; note = 2'-O-Methyl-guanosine
  modified_base 54: mod_base = OTHER; note = 2'-O-Methyl-guanosine
  modified_base 55: mod_base = OTHER; note = 2'-O-Methyl-cytidine
  modified_base 56: mod_base = OTHER; note = 2'-O-Methyl-uridine
  modified_base 57: mod_base = OTHER; note = 2'-O-Methyl-adenosine
  modified_base 60: mod_base = OTHER; note = 2'-O-Methyl-cytidine
  modified_base 61: mod_base = OTHER; note = 2'-O-Methyl-cytidine
  modified_base 66: mod_base = OTHER; note = 2'-O-Methyl-uridine
  modified_base 67: mod_base = OTHER; note = 2'-O-Methyl-cytidine
  modified_base 70: mod_base = OTHER; note = 2'-O-Methyl-cytidine
  modified_base 71: mod_base = OTHER; note = 2'-O-Methyl-uridine
  modified_base 72: mod_base = OTHER; note = 2'-O-Methyl-uridine
  modified_base 74: mod_base = OTHER; note = 2'-O-Methyl-adenosine
  modified_base 75: mod_base = OTHER; note = 2'-O-Methyl-adenosine
  modified_base 76: mod_base = OTHER; note = 2'-O-Methyl-adenosine
  modified_base 77: mod_base = OTHER; note = 2'-O-Methyl-adenosine
  modified_base 78: mod_base = OTHER; note = 2'-O-Methyl-adenosine
  modified_base 79: mod_base = OTHER; note = 2'-O-Methyl-guanosine
  modified_base 80: mod_base = OTHER; note = 2'-O-Methyl-uridine
  modified_base 81: mod_base = OTHER; note = 2'-O-Methyl-guanosine
  modified_base 83: mod_base = OTHER; note = 2'-O-Methyl-cytidine
  modified_base 84: mod_base = OTHER; note = 2'-O-Methyl-adenosine
  modified_base 85: mod_base = OTHER; note = 2'-O-Methyl-cytidine
  modified_base 86: mod_base = OTHER; note = 2'-O-Methyl-cytidine
  modified_base 87: mod_base = OTHER; note = 2'-O-Methyl-guanosine
  modified_base 88: mod_base = OTHER; note = 2'-O-Methyl-adenosine
  modified_base 89: mod_base = OTHER; note = 2'-O-Methyl-guanosine
  modified_base 90: mod_base = OTHER; note = 2'-O-Methyl-uridine
  modified_base 91: mod_base = OTHER; note = 2'-O-Methyl-cytidine
  modified_base 92: mod_base = OTHER; note = 2'-O-Methyl-guanosine
  modified_base 93: mod_base = OTHER; note = 2'-O-Methyl-guanosine
  modified_base 94: mod_base = OTHER; note = 2'-O-Methyl-uridine
  modified_base 95: mod_base = OTHER; note = 2'-O-Methyl-guanosine
  modified_base 96: mod_base = OTHER; note = 2'-O-Methyl-cytidine
  modified_base 97: mod_base = OTHER; note = 2'-O-Methyl-uridine
  modified_base 98: mod_base = OTHER; note = 2'-O-Methyl-uridine phosphorothioate
  modified_base 99: mod_base = OTHER; note = 2'-O-Methyl-uridine phosphorothioate
  modified_base 100: mod_base = OTHER; note = 2'-O-Methyl-uridine
  modified_base 101: mod_base = OTHER; note = 2'-O-Methyl-uridine
  modified_base 102: mod_base = OTHER; note = 2'-O-Methyl-uridine
  modified_base 103: mod_base = OTHER; note = 2'-O-Methyl-uridine

SEQ ID NO: 1645 - RNA, 103 nt, synthetic construct; identical to SEQ ID NO: 1643
  source 1..103: mol_type = other RNA; note = Description of Artificial Sequence: Synthetic polynucleotide
  modified_base 1: mod_base = OTHER; note = 2'-O-Methyl-cytidine phosphorothioate
  modified_base 2: mod_base = OTHER; note = 2'-O-Methyl-cytidine phosphorothioate
  modified_base 3: mod_base = OTHER; note = 2'-O-Methyl-cytidine phosphorothioate
  modified_base 21: mod_base = OTHER; note = 2'-O-Methyl-guanosine
  modified_base 28: mod_base = OTHER; note = 2'-O-Methyl-adenosine
  modified_base 29: mod_base = OTHER; note = 2'-O-Methyl-guanosine
  modified_base 30: mod_base = OTHER; note = 2'-O-Methyl-cytidine
  modified_base 31: mod_base = OTHER; note = 2'-O-Methyl-uridine
  modified_base 32: mod_base = OTHER; note = 2'-O-Methyl-adenosine
  modified_base 34: mod_base = OTHER; note = 2'-O-Methyl-adenosine
  modified_base 35: mod_base = OTHER; note = 2'-O-Methyl-adenosine
  modified_base 36: mod_base = OTHER; note = 2'-O-Methyl-adenosine
  modified_base 37: mod_base = OTHER; note = 2'-O-Methyl-uridine
  modified_base 38: mod_base = OTHER; note = 2'-O-Methyl-adenosine
  modified_base 39: mod_base = OTHER; note = 2'-O-Methyl-guanosine
  modified_base 40: mod_base = OTHER; note = 2'-O-Methyl-cytidine
  modified_base 41: mod_base = OTHER; note = 2'-O-Methyl-adenosine
  modified_base 42: mod_base = OTHER; note = 2'-O-Methyl-adenosine
  modified_base 45: mod_base = OTHER; note = uridine phosphorothioate
  modified_base 46: mod_base = OTHER; note = 2'-O-Methyl-adenosine
  modified_base 48: mod_base = OTHER; note = 2'-O-Methyl-adenosine
  modified_base 50: mod_base = OTHER; note = 2'-O-Methyl-uridine
  modified_base 52: mod_base = OTHER; note = 2'-O-Methyl-adenosine
  modified_base 53: mod_base = OTHER; note = 2'-O-Methyl-guanosine
  modified_base 54: mod_base = OTHER; note = 2'-O-Methyl-guanosine
  modified_base 55: mod_base = OTHER; note = 2'-O-Methyl-cytidine
  modified_base 56: mod_base = OTHER; note = 2'-O-Methyl-uridine
  modified_base 57: mod_base = OTHER; note = 2'-O-Methyl-adenosine
  modified_base 60: mod_base = OTHER; note = 2'-O-Methyl-cytidine
  modified_base 61: mod_base = OTHER; note = 2'-O-Methyl-cytidine
  modified_base 64: mod_base = OTHER; note = uridine phosphorothioate
  modified_base 66: mod_base = OTHER; note = 2'-O-Methyl-uridine
  modified_base 67: mod_base = OTHER; note = 2'-O-Methyl-cytidine
  modified_base 70: mod_base = OTHER; note = 2'-O-Methyl-cytidine
  modified_base 71: mod_base = OTHER; note = 2'-O-Methyl-uridine
  modified_base 72: mod_base = OTHER; note = 2'-O-Methyl-uridine
  modified_base 74: mod_base = OTHER; note = 2'-O-Methyl-adenosine
  modified_base 75: mod_base = OTHER; note = 2'-O-Methyl-adenosine
  modified_base 76: mod_base = OTHER; note = 2'-O-Methyl-adenosine
  modified_base 77: mod_base = OTHER; note = 2'-O-Methyl-adenosine
  modified_base 78: mod_base = OTHER; note = 2'-O-Methyl-adenosine
  modified_base 79: mod_base = OTHER; note = 2'-O-Methyl-guanosine
  modified_base 80: mod_base = OTHER; note = 2'-O-Methyl-uridine
  modified_base 81: mod_base = OTHER; note = 2'-O-Methyl-guanosine
  modified_base 83: mod_base = OTHER; note = 2'-O-Methyl-cytidine
  modified_base 84: mod_base = OTHER; note = 2'-O-Methyl-adenosine
  modified_base 85: mod_base = OTHER; note = 2'-O-Methyl-cytidine
  modified_base 86: mod_base = OTHER; note = 2'-O-Methyl-cytidine
  modified_base 87: mod_base = OTHER; note = 2'-O-Methyl-guanosine
  modified_base 88: mod_base = OTHER; note = 2'-O-Methyl-adenosine
  modified_base 89: mod_base = OTHER; note = 2'-O-Methyl-guanosine
  modified_base 90: mod_base = OTHER; note = 2'-O-Methyl-uridine
  modified_base 91: mod_base = OTHER; note = 2'-O-Methyl-cytidine
  modified_base 92: mod_base = OTHER; note = 2'-O-Methyl-guanosine
  modified_base 93: mod_base = OTHER; note = 2'-O-Methyl-guanosine
  modified_base 94: mod_base = OTHER; note = 2'-O-Methyl-uridine
  modified_base 95: mod_base = OTHER; note = 2'-O-Methyl-guanosine
  modified_base 96: mod_base = OTHER; note = 2'-O-Methyl-cytidine
  modified_base 97: mod_base = OTHER; note = 2'-O-Methyl-uridine
  modified_base 98: mod_base = OTHER; note = 2'-O-Methyl-uridine phosphorothioate
  modified_base 99: mod_base = OTHER; note = 2'-O-Methyl-uridine phosphorothioate
  modified_base 100: mod_base = OTHER; note = 2'-O-Methyl-uridine
  modified_base 101: mod_base = OTHER; note = 2'-O-Methyl-uridine
  modified_base 102: mod_base = OTHER; note = 2'-O-Methyl-uridine
  modified_base 103: mod_base = OTHER; note = 2'-O-Methyl-uridine

SEQ ID NO: 1646 - RNA, 103 nt, synthetic construct; identical to SEQ ID NO: 1643
  source 1..103: mol_type = other RNA; note = Description of Artificial Sequence: Synthetic polynucleotide
  modified_base 1: mod_base = OTHER; note = 2'-O-Methyl-cytidine phosphorothioate
  modified_base 2: mod_base = OTHER; note = 2'-O-Methyl-cytidine phosphorothioate
  modified_base 3: mod_base = OTHER; note = 2'-O-Methyl-cytidine phosphorothioate
  modified_base 21: mod_base = OTHER; note = 2'-O-Methyl-guanosine
  modified_base 28: mod_base = OTHER; note = 2'-O-Methyl-adenosine
  modified_base 29: mod_base = OTHER; note = 2'-O-Methyl-guanosine
  modified_base 30: mod_base = OTHER; note = 2'-O-Methyl-cytidine
  modified_base 31: mod_base = OTHER; note = 2'-O-Methyl-uridine
  modified_base 32: mod_base = OTHER; note = 2'-O-Methyl-adenosine
  modified_base 34: mod_base = OTHER; note = 2'-O-Methyl-adenosine
  modified_base 35: mod_base = OTHER; note = 2'-O-Methyl-adenosine
  modified_base 36: mod_base = OTHER; note = 2'-O-Methyl-adenosine
  modified_base 37: mod_base = OTHER; note = 2'-O-Methyl-uridine
  modified_base 38: mod_base = OTHER; note = 2'-O-Methyl-adenosine
  modified_base 39: mod_base = OTHER; note = 2'-O-Methyl-guanosine
  modified_base 40: mod_base = OTHER; note = 2'-O-Methyl-cytidine
  modified_base 41: mod_base = OTHER; note = 2'-O-Methyl-adenosine
  modified_base 42: mod_base = OTHER; note = 2'-O-Methyl-adenosine
  modified_base 45: mod_base = OTHER; note = uridine phosphorothioate
  modified_base 46: mod_base = OTHER; note = 2'-O-Methyl-adenosine
  modified_base 48: mod_base = OTHER; note = 2'-O-Methyl-adenosine
  modified_base 50: mod_base = OTHER; note = 2'-O-Methyl-uridine
  modified_base 52: mod_base = OTHER; note = 2'-O-Methyl-adenosine
  modified_base 53: mod_base = OTHER; note = 2'-O-Methyl-guanosine
  modified_base 54: mod_base = OTHER; note = 2'-O-Methyl-guanosine
  modified_base 55: mod_base = OTHER; note = 2'-O-Methyl-cytidine
  modified_base 56: mod_base = OTHER; note = 2'-O-Methyl-uridine
  modified_base 57: mod_base = OTHER; note = 2'-O-Methyl-adenosine
  modified_base 60: mod_base = OTHER; note = 2'-O-Methyl-cytidine
  modified_base 61: mod_base = OTHER; note = 2'-O-Methyl-cytidine
  modified_base 66: mod_base = OTHER; note = 2'-O-Methyl-uridine
  modified_base 67: mod_base = OTHER; note = 2'-O-Methyl-cytidine
  modified_base 70: mod_base = OTHER; note = 2'-O-Methyl-cytidine
  modified_base 71: mod_base = OTHER; note = 2'-O-Methyl-uridine
  modified_base 72: mod_base = OTHER; note = 2'-O-Methyl-uridine
  modified_base 74: mod_base = OTHER; note = 2'-O-Methyl-adenosine
  modified_base 75: mod_base = OTHER; note = 2'-O-Methyl-adenosine
  modified_base 76: mod_base = OTHER; note = 2'-O-Methyl-adenosine
  modified_base 77: mod_base = OTHER; note = 2'-O-Methyl-adenosine
  modified_base 78: mod_base = OTHER; note = 2'-O-Methyl-adenosine
  modified_base 79: mod_base = OTHER; note = 2'-O-Methyl-guanosine
  modified_base 80: mod_base = OTHER; note = 2'-O-Methyl-uridine
  modified_base 81: mod_base = OTHER; note = 2'-O-Methyl-guanosine
  modified_base 83: mod_base = OTHER; note = 2'-O-Methyl-cytidine
  modified_base 84: mod_base = OTHER; note = 2'-O-Methyl-adenosine
  modified_base 85: mod_base = OTHER; note = 2'-O-Methyl-cytidine
  modified_base 86: mod_base = OTHER; note = 2'-O-Methyl-cytidine
  modified_base 87: mod_base = OTHER; note = 2'-O-Methyl-guanosine
  modified_base 88: mod_base = OTHER; note = 2'-O-Methyl-adenosine
  modified_base 89: mod_base = OTHER; note = 2'-O-Methyl-guanosine
  modified_base 90: mod_base = OTHER; note = 2'-O-Methyl-uridine
  modified_base 91: mod_base = OTHER; note = 2'-O-Methyl-cytidine
  modified_base 92: mod_base = OTHER; note = 2'-O-Methyl-guanosine
  modified_base 93: mod_base = OTHER; note = 2'-O-Methyl-guanosine
  modified_base 94: mod_base = OTHER; note = 2'-O-Methyl-uridine
  modified_base 95: mod_base = OTHER; note = 2'-O-Methyl-guanosine
  modified_base 96: mod_base = OTHER; note = 2'-O-Methyl-cytidine
  modified_base 97: mod_base = OTHER; note = 2'-O-Methyl-uridine
  modified_base 98: mod_base = OTHER; note = 2'-O-Methyl-uridine phosphorothioate
  modified_base 99: mod_base = OTHER; note = 2'-O-Methyl-uridine phosphorothioate
  modified_base 100: mod_base = OTHER; note = 2'-O-Methyl-uridine
  modified_base 101: mod_base = OTHER; note = 2'-O-Methyl-uridine
  modified_base 102: mod_base = OTHER; note = 2'-O-Methyl-uridine
  modified_base 103: mod_base = OTHER; note = 2'-O-Methyl-uridine

SEQ ID NO: 1647 - RNA, 103 nt, synthetic construct; identical to SEQ ID NO: 1643
  source 1..103: mol_type = other RNA; note = Description of Artificial Sequence: Synthetic polynucleotide
  modified_base 1: mod_base = OTHER; note = 2'-O-Methyl-cytidine phosphorothioate
  modified_base 2: mod_base = OTHER; note = 2'-O-Methyl-cytidine phosphorothioate
  modified_base 3: mod_base = OTHER; note = 2'-O-Methyl-cytidine phosphorothioate
  modified_base 21: mod_base = OTHER; note = 2'-O-Methyl-guanosine
  modified_base 28: mod_base = OTHER; note = 2'-O-Methyl-adenosine
  modified_base 29: mod_base = OTHER; note = 2'-O-Methyl-guanosine
  modified_base 30: mod_base = OTHER; note = 2'-O-Methyl-cytidine
  modified_base 31: mod_base = OTHER; note = 2'-O-Methyl-uridine
  modified_base 32: mod_base = OTHER; note = 2'-O-Methyl-adenosine
  modified_base 34: mod_base = OTHER; note = 2'-O-Methyl-adenosine
  modified_base 35: mod_base = OTHER; note = 2'-O-Methyl-adenosine
  modified_base 36: mod_base = OTHER; note = 2'-O-Methyl-adenosine
  modified_base 37: mod_base = OTHER; note = 2'-O-Methyl-uridine
  modified_base 38: mod_base = OTHER; note = 2'-O-Methyl-adenosine
  modified_base 39: mod_base = OTHER; note = 2'-O-Methyl-guanosine
  modified_base 40: mod_base = OTHER; note = 2'-O-Methyl-cytidine
  modified_base 41: mod_base = OTHER; note = 2'-O-Methyl-adenosine
  modified_base 42: mod_base = OTHER; note = 2'-O-Methyl-adenosine
  modified_base 46: mod_base = OTHER; note = 2'-O-Methyl-adenosine
  modified_base 48: mod_base = OTHER; note = 2'-O-Methyl-adenosine
  modified_base 50: mod_base = OTHER; note = 2'-O-Methyl-uridine
  modified_base 52: mod_base = OTHER; note = 2'-O-Methyl-adenosine
  modified_base 53: mod_base = OTHER; note = 2'-O-Methyl-guanosine
  modified_base 54: mod_base = OTHER; note = 2'-O-Methyl-guanosine
  modified_base 55: mod_base = OTHER; note = 2'-O-Methyl-cytidine
  modified_base 56: mod_base = OTHER; note = 2'-O-Methyl-uridine
  modified_base 57: mod_base = OTHER; note = 2'-O-Methyl-adenosine
  modified_base 60: mod_base = OTHER; note = 2'-O-Methyl-cytidine
  modified_base 61: mod_base = OTHER; note = 2'-O-Methyl-cytidine
  modified_base 64: mod_base = OTHER; note = uridine phosphorothioate
  modified_base 66: mod_base = OTHER; note = 2'-O-Methyl-uridine
  modified_base 67: mod_base = OTHER; note = 2'-O-Methyl-cytidine
  modified_base 70: mod_base = OTHER; note = 2'-O-Methyl-cytidine
  modified_base 71: mod_base = OTHER; note = 2'-O-Methyl-uridine
  modified_base 72: mod_base = OTHER; note = 2'-O-Methyl-uridine
  modified_base 74: mod_base = OTHER; note = 2'-O-Methyl-adenosine
  modified_base 75: mod_base = OTHER; note = 2'-O-Methyl-adenosine
  modified_base 76: mod_base = OTHER; note = 2'-O-Methyl-adenosine
  modified_base 77: mod_base = OTHER; note = 2'-O-Methyl-adenosine
  modified_base 78: mod_base = OTHER; note = 2'-O-Methyl-adenosine
  modified_base 79: mod_base = OTHER; note = 2'-O-Methyl-guanosine
  modified_base 80: mod_base = OTHER; note = 2'-O-Methyl-uridine
  modified_base 81: mod_base = OTHER; note = 2'-O-Methyl-guanosine
  modified_base 83: mod_base = OTHER; note = 2'-O-Methyl-cytidine
  modified_base 84: mod_base = OTHER; note = 2'-O-Methyl-adenosine
  modified_base 85: mod_base = OTHER; note = 2'-O-Methyl-cytidine
  modified_base 86: mod_base = OTHER; note = 2'-O-Methyl-cytidine
  modified_base 87: mod_base = OTHER; note = 2'-O-Methyl-guanosine
  modified_base 88: mod_base = OTHER; note = 2'-O-Methyl-adenosine
  modified_base 89: mod_base = OTHER; note = 2'-O-Methyl-guanosine
  modified_base 90: mod_base = OTHER; note = 2'-O-Methyl-uridine
  modified_base 91: mod_base = OTHER; note = 2'-O-Methyl-cytidine
  modified_base 92: mod_base = OTHER; note = 2'-O-Methyl-guanosine
  modified_base 93: mod_base = OTHER; note = 2'-O-Methyl-guanosine
  modified_base 94: mod_base = OTHER; note = 2'-O-Methyl-uridine
  modified_base 95: mod_base = OTHER; note = 2'-O-Methyl-guanosine
  modified_base 96: mod_base = OTHER; note = 2'-O-Methyl-cytidine
  modified_base 97: mod_base = OTHER; note = 2'-O-Methyl-uridine
  modified_base 98: mod_base = OTHER; note = 2'-O-Methyl-uridine phosphorothioate
  modified_base 99: mod_base = OTHER; note = 2'-O-Methyl-uridine phosphorothioate
  modified_base 100: mod_base = OTHER; note = 2'-O-Methyl-uridine
  modified_base 101: mod_base = OTHER; note = 2'-O-Methyl-uridine
  modified_base 102: mod_base = OTHER; note = 2'-O-Methyl-uridine
  modified_base 103: mod_base = OTHER; note = 2'-O-Methyl-uridine

SEQ ID NO: 1648 - DNA, 100 bp, synthetic construct; identical to SEQ ID NO: 429
  source 1..100: mol_type = other DNA; note = Description of Artificial Sequence: Synthetic oligonucleotide; note = Description of Combined DNA/RNA Molecule: Synthetic oligonucleotide
  modified_base 1: mod_base = OTHER; note = 2'-O-Methyl-cytidine phosphorothioate
  modified_base 2: mod_base = OTHER; note = 2'-O-Methyl-cytidine phosphorothioate
  modified_base 3: mod_base = OTHER; note = 2'-O-Methyl-cytidine phosphorothioate
  modified_base 21: mod_base = OTHER; note = 2'-O-Methyl-guanosine
  modified_base 28: mod_base = OTHER; note = 2'-O-Methyl-adenosine
  modified_base 29: mod_base = OTHER; note = 2'-O-Methyl-guanosine
  modified_base 30: mod_base = OTHER; note = 2'-O-Methyl-cytidine
  modified_base 31: mod_base = OTHER; note = 2'-O-Methyl-uridine
  modified_base 32: mod_base = OTHER; note = 2'-O-Methyl-adenosine
  modified_base 34: mod_base = OTHER; note = 2'-O-Methyl-adenosine
  modified_base 35: mod_base = OTHER; note = 2'-O-Methyl-adenosine
  modified_base 36: mod_base = OTHER; note = 2'-O-Methyl-adenosine
  modified_base 37: mod_base = OTHER; note = 2'-O-Methyl-uridine
  modified_base 38: mod_base = OTHER; note = 2'-O-Methyl-adenosine
  modified_base 39: mod_base = OTHER; note = 2'-O-Methyl-guanosine
  modified_base 40: mod_base = OTHER; note = 2'-O-Methyl-cytidine
  modified_base 41: mod_base = OTHER; note = 2'-O-Methyl-adenosine
  modified_base 42: mod_base = OTHER; note = 2'-O-Methyl-adenosine
  modified_base 46: mod_base = OTHER; note = 2'-O-Methyl-adenosine
  modified_base 48: mod_base = OTHER; note = 2'-O-Methyl-adenosine
  modified_base 50: mod_base = OTHER; note = 2'-O-Methyl-uridine
  modified_base 52: mod_base = OTHER; note = 2'-O-Methyl-adenosine
  modified_base 53: mod_base = OTHER; note = 2'-O-Methyl-guanosine
  modified_base 54: mod_base = OTHER; note = 2'-O-Methyl-guanosine
  modified_base 55: mod_base = OTHER; note = 2'-O-Methyl-cytidine
  modified_base 56: mod_base = OTHER; note = 2'-O-Methyl-uridine
  modified_base 57: mod_base = OTHER; note = 2'-O-Methyl-adenosine
  modified_base 60: mod_base = OTHER; note = 2'-O-Methyl-cytidine
  modified_base 61: mod_base = OTHER; note = 2'-O-Methyl-cytidine
  modified_base 66: mod_base = OTHER; note = 2'-O-Methyl-uridine
  modified_base 67: mod_base = OTHER; note = 2'-O-Methyl-cytidine
  modified_base 70: mod_base = OTHER; note = 2'-O-Methyl-cytidine
  modified_base 71: mod_base = OTHER; note = 2'-O-Methyl-uridine
  modified_base 72: mod_base = OTHER; note = 2'-O-Methyl-uridine
  modified_base 74: mod_base = OTHER; note = 2'-O-Methyl-adenosine
  modified_base 75: mod_base = OTHER; note = 2'-O-Methyl-adenosine
  modified_base 76: mod_base = OTHER; note = 2'-O-Methyl-adenosine
  modified_base 77: mod_base = OTHER; note = 2'-O-Methyl-adenosine
  modified_base 78: mod_base = OTHER; note = 2'-O-Methyl-adenosine
  modified_base 79: mod_base = OTHER; note = 2'-O-Methyl-guanosine
  modified_base 80: mod_base = OTHER; note = 2'-O-Methyl-uridine
  modified_base 81: mod_base = OTHER; note = 2'-O-Methyl-guanosine
  modified_base 83: mod_base = OTHER; note = 2'-O-Methyl-cytidine
  modified_base 84: mod_base = OTHER; note = 2'-O-Methyl-adenosine
  modified_base 85: mod_base = OTHER; note = 2'-O-Methyl-cytidine
  modified_base 86: mod_base = OTHER; note = 2'-O-Methyl-cytidine
  modified_base 87: mod_base = OTHER; note = 2'-O-Methyl-guanosine
  modified_base 88: mod_base = OTHER; note = 2'-O-Methyl-adenosine
  modified_base 89: mod_base = OTHER; note = 2'-O-Methyl-guanosine
  modified_base 90: mod_base = OTHER; note = 2'-O-Methyl-uridine
  modified_base 91: mod_base = OTHER; note = 2'-O-Methyl-cytidine
  modified_base 92: mod_base = OTHER; note = 2'-O-Methyl-guanosine
  modified_base 93: mod_base = OTHER; note = 2'-O-Methyl-guanosine
  modified_base 94: mod_base = OTHER; note = 2'-O-Methyl-uridine
  modified_base 95: mod_base = OTHER; note = 2'-O-Methyl-guanosine
  modified_base 96: mod_base = OTHER; note = 2'-O-Methyl-cytidine
  modified_base 97: mod_base = OTHER; note = 2'-O-Methyl-uridine phosphorothioate
  modified_base 98: mod_base = OTHER; note = 2'-O-Methyl-uridine phosphorothioate
  modified_base 99: mod_base = OTHER; note = 2'-O-Methyl-uridine phosphorothioate
  modified_base 100: mod_base = OTHER; note = 2'-O-Methyl-uridine
  misc_feature 1..4: note = RNA
  misc_feature 5: note = DNA
  misc_feature 6..9: note = RNA
  misc_feature 10: note = DNA
  misc_feature 11..12: note = RNA
  misc_feature 13: note = DNA
  misc_feature 14: note = RNA
  misc_feature 15: note = DNA
  misc_feature 16..17: note = RNA
  misc_feature 18: note = DNA
  misc_feature 19..100: note = RNA

SEQ ID NO: 1649 - DNA, 108 bp, synthetic construct
  source 1..108: mol_type = other DNA; note = Description of Artificial Sequence: Synthetic oligonucleotide; note = Description of Combined DNA/RNA Molecule: Synthetic oligonucleotide
  modified_base 1: mod_base = OTHER; note = 2'-O-Methyl-cytidine phosphorothioate
  modified_base 2: mod_base = OTHER; note = 2'-O-Methyl-cytidine phosphorothioate
  modified_base 3: mod_base = OTHER; note = 2'-O-Methyl-cytidine phosphorothioate
  modified_base 29: mod_base = OTHER; note = 2'-O-Methyl-guanosine
  modified_base 36: mod_base = OTHER; note = 2'-O-Methyl-adenosine
  modified_base 37: mod_base = OTHER; note = 2'-O-Methyl-guanosine
  modified_base 38: mod_base = OTHER; note = 2'-O-Methyl-cytidine
  modified_base 39: mod_base = OTHER; note = 2'-O-Methyl-uridine
  modified_base 40: mod_base = OTHER; note = 2'-O-Methyl-adenosine
  modified_base 42: mod_base = OTHER; note = 2'-O-Methyl-adenosine
  modified_base 43: mod_base = OTHER; note = 2'-O-Methyl-adenosine
  modified_base 44: mod_base = OTHER; note = 2'-O-Methyl-adenosine
  modified_base 45: mod_base = OTHER; note = 2'-O-Methyl-uridine
  modified_base 46: mod_base = OTHER; note = 2'-O-Methyl-adenosine
  modified_base 47: mod_base = OTHER; note = 2'-O-Methyl-guanosine
  modified_base 48: mod_base = OTHER; note = 2'-O-Methyl-cytidine
  modified_base 49: mod_base = OTHER; note = 2'-O-Methyl-adenosine
  modified_base 50: mod_base = OTHER; note = 2'-O-Methyl-adenosine
  modified_base 54: mod_base = OTHER; note = 2'-O-Methyl-adenosine
  modified_base 56: mod_base = OTHER; note = 2'-O-Methyl-adenosine
  modified_base 58: mod_base = OTHER; note = 2'-O-Methyl-uridine
  modified_base 60: mod_base = OTHER; note = 2'-O-Methyl-adenosine
  modified_base 61: mod_base = OTHER; note = 2'-O-Methyl-guanosine
  modified_base 62: mod_base = OTHER; note = 2'-O-Methyl-guanosine
  modified_base 63: mod_base = OTHER; note = 2'-O-Methyl-cytidine
  modified_base 64: mod_base = OTHER; note = 2'-O-Methyl-uridine
  modified_base 65: mod_base = OTHER; note = 2'-O-Methyl-adenosine
  modified_base 68: mod_base = OTHER; note = 2'-O-Methyl-cytidine
  modified_base 69: mod_base = OTHER; note = 2'-O-Methyl-cytidine
  modified_base 74: mod_base = OTHER; note = 2'-O-Methyl-uridine
  modified_base 75: mod_base = OTHER; note = 2'-O-Methyl-cytidine
  modified_base 78: mod_base = OTHER; note = 2'-O-Methyl-cytidine
  modified_base 79: mod_base = OTHER; note = 2'-O-Methyl-uridine
  modified_base 80: mod_base = OTHER; note = 2'-O-Methyl-uridine
  modified_base 82: mod_base = OTHER; note = 2'-O-Methyl-adenosine
  modified_base 83: mod_base = OTHER; note = 2'-O-Methyl-adenosine
  modified_base 84: mod_base = OTHER; note = 2'-O-Methyl-adenosine
  modified_base 85: mod_base = OTHER; note = 2'-O-Methyl-adenosine
  modified_base 86: mod_base = OTHER; note = 2'-O-Methyl-adenosine
  modified_base 87: mod_base = OTHER; note = 2'-O-Methyl-guanosine
  modified_base 88: mod_base = OTHER; note = 2'-O-Methyl-uridine
  modified_base 89: mod_base = OTHER; note = 2'-O-Methyl-guanosine
  modified_base 91: mod_base = OTHER; note = 2'-O-Methyl-cytidine
  modified_base 92: mod_base = OTHER; note = 2'-O-Methyl-adenosine
  modified_base 93: mod_base = OTHER; note = 2'-O-Methyl-cytidine
  modified_base 94: mod_base = OTHER; note = 2'-O-Methyl-cytidine
  modified_base 95: mod_base = OTHER; note = 2'-O-Methyl-guanosine
  modified_base 96: mod_base = OTHER; note = 2'-O-Methyl-adenosine
  modified_base 97: mod_base = OTHER; note = 2'-O-Methyl-guanosine
  modified_base 98: mod_base = OTHER; note = 2'-O-Methyl-uridine
  modified_base 99: mod_base = OTHER; note = 2'-O-Methyl-cytidine
  modified_base 100: mod_base = OTHER; note = 2'-O-Methyl-guanosine
  modified_base 101: mod_base = OTHER; note = 2'-O-Methyl-guanosine
  modified_base 102: mod_base = OTHER; note = 2'-O-Methyl-uridine
  modified_base 103: mod_base = OTHER; note = 2'-O-Methyl-guanosine
  modified_base 104: mod_base = OTHER; note = 2'-O-Methyl-cytidine
  modified_base 105: mod_base = OTHER; note = 2'-O-Methyl-uridine phosphorothioate
  modified_base 106: mod_base = OTHER; note = 2'-O-Methyl-uridine phosphorothioate
  modified_base 107: mod_base = OTHER; note = 2'-O-Methyl-uridine phosphorothioate
  modified_base 108: mod_base = OTHER; note = 2'-O-Methyl-uridine
  misc_feature 1..5: note = RNA
  misc_feature 6: note = DNA
  misc_feature 7..10: note = RNA
  misc_feature 11: note = DNA
  misc_feature 12..13: note = RNA
  misc_feature 14: note = DNA
  misc_feature 15: note = RNA
  misc_feature 16: note = DNA
  misc_feature 17..18: note = RNA
  misc_feature 19: note = DNA
  misc_feature 20..108: note = RNA
cccgcaccttggcgcagcgggttttagagttttagagctagaaatagcaagttaaaataaggctagtccgttatcaacttgaaaaagtggcaccgagtcggtgctttt

SEQ ID NO: 1650 - RNA, 99 nt, synthetic construct; identical to SEQ ID NO: 442
  source 1..99: mol_type = other RNA; note = Description of Artificial Sequence: Synthetic oligonucleotide
  modified_base 1: mod_base = OTHER; note = 2'-O-Methyl-adenosine phosphorothioate
  modified_base 2: mod_base = OTHER; note = 2'-O-Methyl-guanosine phosphorothioate
  modified_base 20: mod_base = OTHER; note = 2'-O-Methyl-guanosine
  modified_base 27: mod_base = OTHER; note = 2'-O-Methyl-adenosine
  modified_base 28: mod_base = OTHER; note = 2'-O-Methyl-guanosine
  modified_base 29: mod_base = OTHER; note = 2'-O-Methyl-cytidine
  modified_base 30: mod_base = OTHER; note = 2'-O-Methyl-uridine
  modified_base 31: mod_base = OTHER; note = 2'-O-Methyl-adenosine
  modified_base 33: mod_base = OTHER; note = 2'-O-Methyl-adenosine
  modified_base 34: mod_base = OTHER; note = 2'-O-Methyl-adenosine
  modified_base 35: mod_base = OTHER; note = 2'-O-Methyl-adenosine
  modified_base 36: mod_base = OTHER; note = 2'-O-Methyl-uridine
  modified_base 37: mod_base = OTHER; note = 2'-O-Methyl-adenosine
  modified_base 38: mod_base = OTHER; note = 2'-O-Methyl-guanosine
  modified_base 39: mod_base = OTHER; note = 2'-O-Methyl-cytidine
  modified_base 40: mod_base = OTHER; note = 2'-O-Methyl-adenosine
  modified_base 41: mod_base = OTHER; note = 2'-O-Methyl-adenosine
  modified_base 45: mod_base = OTHER; note = 2'-O-Methyl-adenosine
  modified_base 47: mod_base = OTHER; note = 2'-O-Methyl-adenosine
  modified_base 49: mod_base = OTHER; note = 2'-O-Methyl-uridine
  modified_base 51: mod_base = OTHER; note = 2'-O-Methyl-adenosine
  modified_base 52: mod_base = OTHER; note = 2'-O-Methyl-guanosine
  modified_base 53: mod_base = OTHER; note = 2'-O-Methyl-guanosine
  modified_base 54: mod_base = OTHER; note = 2'-O-Methyl-cytidine
  modified_base 55: mod_base = OTHER; note = 2'-O-Methyl-uridine
  modified_base 56: mod_base = OTHER; note = 2'-O-Methyl-adenosine
  modified_base 59: mod_base = OTHER; note = 2'-O-Methyl-cytidine
  modified_base 60: mod_base = OTHER; note = 2'-O-Methyl-cytidine
  modified_base 65: mod_base = OTHER; note = 2'-O-Methyl-uridine
  modified_base 66: mod_base = OTHER; note = 2'-O-Methyl-cytidine
  modified_base 69: mod_base = OTHER; note = 2'-O-Methyl-cytidine
  modified_base 70: mod_base = OTHER; note = 2'-O-Methyl-uridine
  modified_base 71: mod_base = OTHER; note = 2'-O-Methyl-uridine
  modified_base 73: mod_base = OTHER; note = 2'-O-Methyl-adenosine
  modified_base 74: mod_base = OTHER; note = 2'-O-Methyl-adenosine
  modified_base 75: mod_base = OTHER; note = 2'-O-Methyl-adenosine
  modified_base 76: mod_base = OTHER; note = 2'-O-Methyl-adenosine
  modified_base 77: mod_base = OTHER; note = 2'-O-Methyl-adenosine
  modified_base 78: mod_base = OTHER; note = 2'-O-Methyl-guanosine
  modified_base 79: mod_base = OTHER; note = 2'-O-Methyl-uridine
  modified_base 80: mod_base = OTHER; note = 2'-O-Methyl-guanosine
  modified_base 82: mod_base = OTHER; note = 2'-O-Methyl-cytidine
  modified_base 83: mod_base = OTHER; note = 2'-O-Methyl-adenosine
  modified_base 84: mod_base = OTHER; note = 2'-O-Methyl-cytidine
  modified_base 85: mod_base = OTHER; note = 2'-O-Methyl-cytidine
  modified_base 86: mod_base = OTHER; note = 2'-O-Methyl-guanosine
  modified_base 87: mod_base = OTHER; note = 2'-O-Methyl-adenosine
  modified_base 88: mod_base = OTHER; note = 2'-O-Methyl-guanosine
  modified_base 89: mod_base = OTHER; note = 2'-O-Methyl-uridine
  modified_base 90: mod_base = OTHER; note = 2'-O-Methyl-cytidine
  modified_base 91: mod_base = OTHER; note = 2'-O-Methyl-guanosine
  modified_base 92: mod_base = OTHER; note = 2'-O-Methyl-guanosine
  modified_base 93: mod_base = OTHER; note = 2'-O-Methyl-uridine
  modified_base 94: mod_base = OTHER; note = 2'-O-Methyl-guanosine
  modified_base 95: mod_base = OTHER; note = 2'-O-Methyl-cytidine
  modified_base 96: mod_base = OTHER; note = 2'-O-Methyl-uridine phosphorothioate
  modified_base 97: mod_base = OTHER; note = 2'-O-Methyl-uridine phosphorothioate
  modified_base 98: mod_base = OTHER; note = 2'-O-Methyl-uridine phosphorothioate
  modified_base 99: mod_base = OTHER; note = 2'-O-Methyl-uridine

SEQ ID NO: 1651 - RNA, 98 nt, synthetic construct; identical to SEQ ID NO: 443
  source 1..98: mol_type = other RNA; note = Description of Artificial Sequence: Synthetic oligonucleotide
  modified_base 1: mod_base = OTHER; note = 2'-O-Methyl-guanosine phosphorothioate
  modified_base 2: mod_base = OTHER; note = 2'-O-Methyl-adenosine phosphorothioate
  modified_base 3: mod_base = OTHER; note = uridine phosphorothioate
  modified_base 95: mod_base = OTHER; note = uridine phosphorothioate
  modified_base 96: mod_base = OTHER; note = 2'-O-Methyl-uridine phosphorothioate
  modified_base 97: mod_base = OTHER; note = 2'-O-Methyl-uridine phosphorothioate
  modified_base 98: mod_base = OTHER; note = 2'-O-Methyl-uridine

SEQ ID NO: 1652 - RNA, 98 nt, synthetic construct
  source 1..98: mol_type = other RNA; note = Description of Artificial Sequence: Synthetic oligonucleotide
  modified_base 1: mod_base = OTHER; note = 2'-O-Methyl-guanosine phosphorothioate
  modified_base 2: mod_base = OTHER; note = 2'-O-Methyl-adenosine phosphorothioate
  modified_base 3: mod_base = OTHER; note = uridine phosphorothioate
  modified_base 19: mod_base = OTHER; note = 2'-O-Methyl-guanosine
  modified_base 26: mod_base = OTHER; note = 2'-O-Methyl-adenosine
  modified_base 27: mod_base = OTHER; note = 2'-O-Methyl-guanosine
  modified_base 28: mod_base = OTHER; note = 2'-O-Methyl-cytidine
  modified_base 29: mod_base = OTHER; note = 2'-O-Methyl-uridine
  modified_base 30: mod_base = OTHER; note = 2'-O-Methyl-adenosine
  modified_base 32: mod_base = OTHER; note = 2'-O-Methyl-adenosine
  modified_base 33: mod_base = OTHER; note = 2'-O-Methyl-adenosine
  modified_base 34: mod_base = OTHER; note = 2'-O-Methyl-adenosine
  modified_base 35: mod_base = OTHER; note = 2'-O-Methyl-uridine
  modified_base 36: mod_base = OTHER; note = 2'-O-Methyl-adenosine
  modified_base 37: mod_base = OTHER; note = 2'-O-Methyl-guanosine
  modified_base 38: mod_base = OTHER; note = 2'-O-Methyl-cytidine
  modified_base 39: mod_base = OTHER; note = 2'-O-Methyl-adenosine
  modified_base 40: mod_base = OTHER; note = 2'-O-Methyl-adenosine
  modified_base 44: mod_base = OTHER; note = 2'-O-Methyl-adenosine
  modified_base 46: mod_base = OTHER; note = 2'-O-Methyl-adenosine
  modified_base 48: mod_base = OTHER; note = 2'-O-Methyl-uridine
  modified_base 50: mod_base = OTHER; note = 2'-O-Methyl-adenosine
  modified_base 51: mod_base = OTHER; note = 2'-O-Methyl-guanosine
  modified_base 52: mod_base = OTHER; note = 2'-O-Methyl-guanosine
  modified_base 53: mod_base = OTHER; note = 2'-O-Methyl-cytidine
  modified_base 54: mod_base = OTHER; note = 2'-O-Methyl-uridine
  modified_base 55: mod_base = OTHER; note = 2'-O-Methyl-adenosine
  modified_base 58: mod_base = OTHER; note = 2'-O-Methyl-cytidine
  modified_base 59: mod_base = OTHER; note = 2'-O-Methyl-cytidine
  modified_base 64: mod_base = OTHER; note = 2'-O-Methyl-uridine
  modified_base 65: mod_base = OTHER; note = 2'-O-Methyl-cytidine
  modified_base 68: mod_base = OTHER; note = 2'-O-Methyl-cytidine
  modified_base 69: mod_base = OTHER; note = 2'-O-Methyl-uridine
  modified_base 70: mod_base = OTHER; note = 2'-O-Methyl-uridine
  modified_base 72: mod_base = OTHER; note = 2'-O-Methyl-adenosine
  modified_base 73: mod_base = OTHER; note = 2'-O-Methyl-adenosine
  modified_base 74: mod_base = OTHER; note = 2'-O-Methyl-adenosine
  modified_base 75: mod_base = OTHER; note = 2'-O-Methyl-adenosine
  modified_base 76: mod_base = OTHER; note = 2'-O-Methyl-adenosine
  modified_base 77: mod_base = OTHER; note = 2'-O-Methyl-guanosine
  modified_base 78: mod_base = OTHER; note = 2'-O-Methyl-uridine
  modified_base 79: mod_base = OTHER; note = 2'-O-Methyl-guanosine
  modified_base 81: mod_base = OTHER; note = 2'-O-Methyl-cytidine
  modified_base 82: mod_base = OTHER; note = 2'-O-Methyl-adenosine
  modified_base 83: mod_base = OTHER; note = 2'-O-Methyl-cytidine
  modified_base 84: mod_base = OTHER; note = 2'-O-Methyl-cytidine
  modified_base 85: mod_base = OTHER; note = 2'-O-Methyl-guanosine
  modified_base 86: mod_base = OTHER; note = 2'-O-Methyl-adenosine
  modified_base 87: mod_base = OTHER; note = 2'-O-Methyl-guanosine
  modified_base 88: mod_base = OTHER; note = 2'-O-Methyl-uridine
  modified_base 89: mod_base = OTHER; note = 2'-O-Methyl-cytidine
  modified_base 90: mod_base = OTHER; note = 2'-O-Methyl-guanosine
  modified_base 91: mod_base = OTHER; note = 2'-O-Methyl-guanosine
  modified_base 92: mod_base = OTHER; note = 2'-O-Methyl-uridine
  modified_base 93: mod_base = OTHER; note = 2'-O-Methyl-guanosine
  modified_base 94: mod_base = OTHER; note = 2'-O-Methyl-cytidine
  modified_base 95: mod_base = OTHER; note = 2'-O-Methyl-uridine phosphorothioate
  modified_base 96: mod_base = OTHER; note = 2'-O-Methyl-uridine phosphorothioate
  modified_base 97: mod_base = OTHER; note = 2'-O-Methyl-uridine phosphorothioate
  modified_base 98: mod_base = OTHER; note = 2'-O-Methyl-uridine
gatacctgaataactctcgttttagagctagaaatagcaagttaaaataaggctagtccgttatcaacttgaaaaagtggcaccgagtcggtgctttt

SEQ ID NO: 1653 - RNA, 97 nt, synthetic construct
  source 1..97: mol_type = other RNA; note = Description of Artificial Sequence: Synthetic oligonucleotide
  modified_base 1: mod_base = OTHER; note = 2'-O-Methyl-adenosine phosphorothioate
  modified_base 2: mod_base = OTHER; note = 2'-O-Methyl-uridine phosphorothioate
  modified_base 3: mod_base = OTHER; note = adenosine phosphorothioate
  modified_base 18: mod_base = OTHER; note = 2'-O-Methyl-guanosine
  modified_base 25: mod_base = OTHER; note = 2'-O-Methyl-adenosine
  modified_base 26: mod_base = OTHER; note = 2'-O-Methyl-guanosine
  modified_base 27: mod_base = OTHER; note = 2'-O-Methyl-cytidine
  modified_base 28: mod_base = OTHER; note = 2'-O-Methyl-uridine
  modified_base 29: mod_base = OTHER; note = 2'-O-Methyl-adenosine
  modified_base 31: mod_base = OTHER; note = 2'-O-Methyl-adenosine
  modified_base 32: mod_base = OTHER; note = 2'-O-Methyl-adenosine
  modified_base 33: mod_base = OTHER; note = 2'-O-Methyl-adenosine
  modified_base 34: mod_base = OTHER; note = 2'-O-Methyl-uridine
  modified_base 35: mod_base = OTHER; note = 2'-O-Methyl-adenosine
  modified_base 36: mod_base = OTHER; note = 2'-O-Methyl-guanosine
  modified_base 37: mod_base = OTHER; note = 2'-O-Methyl-cytidine
  modified_base 38: mod_base = OTHER; note = 2'-O-Methyl-adenosine
  modified_base 39: mod_base = OTHER; note = 2'-O-Methyl-adenosine
  modified_base 43: mod_base = OTHER; note = 2'-O-Methyl-adenosine
  modified_base 45: mod_base = OTHER; note = 2'-O-Methyl-adenosine
  modified_base 47: mod_base = OTHER; note = 2'-O-Methyl-uridine
  modified_base 49: mod_base = OTHER; note = 2'-O-Methyl-adenosine
  modified_base 50: mod_base = OTHER; note = 2'-O-Methyl-guanosine
  modified_base 51: mod_base = OTHER; note = 2'-O-Methyl-guanosine
  modified_base 52: mod_base = OTHER; note = 2'-O-Methyl-cytidine
  modified_base 53: mod_base = OTHER; note = 2'-O-Methyl-uridine
  modified_base 54: mod_base = OTHER; note = 2'-O-Methyl-adenosine
  modified_base 57: mod_base = OTHER; note = 2'-O-Methyl-cytidine
  modified_base 58: mod_base = OTHER; note = 2'-O-Methyl-cytidine
  modified_base 63: mod_base = OTHER; note = 2'-O-Methyl-uridine
  modified_base 64: mod_base = OTHER; note = 2'-O-Methyl-cytidine
  modified_base 67: mod_base = OTHER; note = 2'-O-Methyl-cytidine
  modified_base 68: mod_base = OTHER; note = 2'-O-Methyl-uridine
  modified_base 69: mod_base = OTHER; note = 2'-O-Methyl-uridine
  modified_base 71: mod_base = OTHER; note = 2'-O-Methyl-adenosine
  modified_base 72: mod_base = OTHER; note = 2'-O-Methyl-adenosine
  modified_base 73: mod_base = OTHER; note = 2'-O-Methyl-adenosine
  modified_base 74: mod_base = OTHER; note = 2'-O-Methyl-adenosine
  modified_base 75: mod_base = OTHER; note = 2'-O-Methyl-adenosine
  modified_base 76: mod_base = OTHER; note = 2'-O-Methyl-guanosine
  modified_base 77: mod_base = OTHER; note = 2'-O-Methyl-uridine
  modified_base 78: mod_base = OTHER; note = 2'-O-Methyl-guanosine
  modified_base 80: mod_base = OTHER; note = 2'-O-Methyl-cytidine
  modified_base 81: mod_base = OTHER; note = 2'-O-Methyl-adenosine
  modified_base 82: mod_base = OTHER; note = 2'-O-Methyl-cytidine
  modified_base 83: mod_base = OTHER; note = 2'-O-Methyl-cytidine
  modified_base 84: mod_base = OTHER; note = 2'-O-Methyl-guanosine
  modified_base 85: mod_base = OTHER; note = 2'-O-Methyl-adenosine
  modified_base 86: mod_base = OTHER; note = 2'-O-Methyl-guanosine
  modified_base 87: mod_base = OTHER; note = 2'-O-Methyl-uridine
  modified_base 88: mod_base = OTHER; note = 2'-O-Methyl-cytidine
  modified_base 89: mod_base = OTHER; note = 2'-O-Methyl-guanosine
  modified_base 90: mod_base = OTHER; note = 2'-O-Methyl-guanosine
  modified_base 91: mod_base = OTHER; note = 2'-O-Methyl-uridine
  modified_base 92: mod_base = OTHER; note = 2'-O-Methyl-guanosine
  modified_base 93: mod_base = OTHER; note = 2'-O-Methyl-cytidine
  modified_base 94: mod_base = OTHER; note = 2'-O-Methyl-uridine phosphorothioate
  modified_base 95: mod_base = OTHER; note = 2'-O-Methyl-uridine phosphorothioate
  modified_base 96: mod_base = OTHER; note = 2'-O-Methyl-uridine phosphorothioate
  modified_base 97: mod_base = OTHER; note = 2'-O-Methyl-uridine
atacctgaataactctcgttttagagctagaaatagcaagttaaaataaggctagtccgttatcaacttgaaaaagtggcaccgagtcggtgctttt

SEQ ID NO: 1654 - RNA, 100 nt, synthetic construct
  source 1..100: mol_type = other RNA; note = Description of Artificial Sequence: Synthetic polynucleotide
  modified_base 1: mod_base = OTHER; note = 2'-O-Methyl-adenosine phosphorothioate
  modified_base 2: mod_base = OTHER; note = 2'-O-Methyl-adenosine phosphorothioate
  modified_base 3: mod_base = OTHER; note = 2'-O-Methyl-guanosine phosphorothioate
  modified_base 6: mod_base = OTHER; note = Nebularine - ribonebularine
  modified_base 21: mod_base = OTHER; note = 2'-O-Methyl-guanosine
  modified_base 28: mod_base = OTHER; note = 2'-O-Methyl-adenosine
  modified_base 29: mod_base = OTHER; note = 2'-O-Methyl-guanosine
  modified_base 30: mod_base = OTHER; note = 2'-O-Methyl-cytidine
  modified_base 31: mod_base = OTHER; note = 2'-O-Methyl-uridine
  modified_base 32: mod_base = OTHER; note = 2'-O-Methyl-adenosine
  modified_base 34: mod_base = OTHER; note = 2'-O-Methyl-adenosine
  modified_base 35: mod_base = OTHER; note = 2'-O-Methyl-adenosine
  modified_base 36: mod_base = OTHER; note = 2'-O-Methyl-adenosine
  modified_base 37: mod_base = OTHER; note = 2'-O-Methyl-uridine
  modified_base 38: mod_base = OTHER; note = 2'-O-Methyl-adenosine
  modified_base 39: mod_base = OTHER; note = 2'-O-Methyl-guanosine
  modified_base 40: mod_base = OTHER; note = 2'-O-Methyl-cytidine
  modified_base 41: mod_base = OTHER; note = 2'-O-Methyl-adenosine
  modified_base 42: mod_base = OTHER; note = 2'-O-Methyl-adenosine
  modified_base 46: mod_base = OTHER; note = 2'-O-Methyl-adenosine
  modified_base 48: mod_base = OTHER; note = 2'-O-Methyl-adenosine
  modified_base 50: mod_base = OTHER; note = 2'-O-Methyl-uridine
  modified_base 52: mod_base = OTHER; note = 2'-O-Methyl-adenosine
  modified_base 53: mod_base = OTHER; note = 2'-O-Methyl-guanosine
  modified_base 54: mod_base = OTHER; note = 2'-O-Methyl-guanosine
  modified_base 55: mod_base = OTHER; note = 2'-O-Methyl-cytidine
  modified_base 56: mod_base = OTHER; note = 2'-O-Methyl-uridine
  modified_base 57: mod_base = OTHER; note = 2'-O-Methyl-adenosine
  modified_base 60: mod_base = OTHER; note = 2'-O-Methyl-cytidine
  modified_base 61: mod_base = OTHER; note = 2'-O-Methyl-cytidine
  modified_base 66: mod_base = OTHER; note = 2'-O-Methyl-uridine
  modified_base 67: mod_base = OTHER; note = 2'-O-Methyl-cytidine
  modified_base 70: mod_base = OTHER; note = 2'-O-Methyl-cytidine
  modified_base 71: mod_base = OTHER; note = 2'-O-Methyl-uridine
  modified_base 72: mod_base = OTHER; note = 2'-O-Methyl-uridine
  modified_base 74: mod_base = OTHER; note = 2'-O-Methyl-adenosine
  modified_base 75: mod_base = OTHER; note = 2'-O-Methyl-adenosine
  modified_base 76: mod_base = OTHER; note = 2'-O-Methyl-adenosine
  modified_base 77: mod_base = OTHER; note = 2'-O-Methyl-adenosine
  modified_base 78: mod_base = OTHER; note = 2'-O-Methyl-adenosine
  modified_base 79: mod_base = OTHER; note = 2'-O-Methyl-guanosine
  modified_base 80: mod_base = OTHER; note = 2'-O-Methyl-uridine
  modified_base 81: mod_base = OTHER; note = 2'-O-Methyl-guanosine
  modified_base 83: mod_base = OTHER; note = 2'-O-Methyl-cytidine
  modified_base 84: mod_base = OTHER; note = 2'-O-Methyl-adenosine
  modified_base 85: mod_base = OTHER; note = 2'-O-Methyl-cytidine
  modified_base 86: mod_base = OTHER; note = 2'-O-Methyl-cytidine
  modified_base 87: mod_base = OTHER; note = 2'-O-Methyl-guanosine
  modified_base 88: mod_base = OTHER; note = 2'-O-Methyl-adenosine
  modified_base 89: mod_base = OTHER; note = 2'-O-Methyl-guanosine
  modified_base 90: mod_base = OTHER; note = 2'-O-Methyl-uridine
  modified_base 91: mod_base = OTHER; note = 2'-O-Methyl-cytidine
  modified_base 92: mod_base = OTHER; note = 2'-O-Methyl-guanosine
  modified_base 93: mod_base = OTHER; note = 2'-O-Methyl-guanosine
  modified_base 94: mod_base = OTHER; note = 2'-O-Methyl-uridine
  modified_base 95: mod_base = OTHER; note = 2'-O-Methyl-guanosine
  modified_base 96: mod_base = OTHER; note = 2'-O-Methyl-cytidine
  modified_base 97: mod_base = OTHER; note = 2'-O-Methyl-uridine phosphorothioate
  modified_base 98: mod_base = OTHER; note = 2'-O-Methyl-uridine phosphorothioate
  modified_base 99: mod_base = OTHER; note = 2'-O-Methyl-uridine phosphorothioate
  modified_base 100: mod_base = OTHER; note = 2'-O-Methyl-uridine
aagatncctgaataaccctcgttttagagctagaaatagcaagttaaaataaggctagtccgttatcaacttgaaaaagtggcaccgagtcggtgctttt

SEQ ID NO: 1655 - RNA, 100 nt, synthetic construct
  source 1..100: mol_type = other RNA; note = Description of Artificial Sequence: Synthetic polynucleotide
  modified_base 1: mod_base = OTHER; note = 2'-O-Methyl-adenosine phosphorothioate
  modified_base 2: mod_base = OTHER; note = 2'-O-Methyl-adenosine phosphorothioate
  modified_base 3: mod_base = OTHER; note = 2'-O-Methyl-guanosine phosphorothioate
  modified_base 6: mod_base = OTHER; note = Nebularine - ribonebularine
  modified_base 11: mod_base = OTHER; note = Nebularine - ribonebularine
  modified_base 21: mod_base = OTHER; note = 2'-O-Methyl-guanosine
  modified_base 28: mod_base = OTHER; note = 2'-O-Methyl-adenosine
  modified_base 29: mod_base = OTHER; note = 2'-O-Methyl-guanosine
  modified_base 30: mod_base = OTHER; note = 2'-O-Methyl-cytidine
  modified_base 31: mod_base = OTHER; note = 2'-O-Methyl-uridine
  modified_base 32: mod_base = OTHER; note = 2'-O-Methyl-adenosine
  modified_base 34: mod_base = OTHER; note = 2'-O-Methyl-adenosine
  modified_base 35: mod_base = OTHER; note = 2'-O-Methyl-adenosine
  modified_base 36: mod_base = OTHER; note = 2'-O-Methyl-adenosine
  modified_base 37: mod_base = OTHER; note = 2'-O-Methyl-uridine
  modified_base 38: mod_base = OTHER; note = 2'-O-Methyl-adenosine
  modified_base 39: mod_base = OTHER; note = 2'-O-Methyl-guanosine
  modified_base 40: mod_base = OTHER; note = 2'-O-Methyl-cytidine
  modified_base 41: mod_base = OTHER; note = 2'-O-Methyl-adenosine
  modified_base 42: mod_base = OTHER; note = 2'-O-Methyl-adenosine
  modified_base 46: mod_base = OTHER; note = 2'-O-Methyl-adenosine
  modified_base 48: mod_base = OTHER; note = 2'-O-Methyl-adenosine
  modified_base 50: mod_base = OTHER; note = 2'-O-Methyl-uridine
  modified_base 52: mod_base = OTHER; note = 2'-O-Methyl-adenosine
  modified_base 53: mod_base = OTHER; note = 2'-O-Methyl-guanosine
  modified_base 54: mod_base = OTHER; note = 2'-O-Methyl-guanosine
  modified_base 55: mod_base = OTHER; note = 2'-O-Methyl-cytidine
  modified_base 56: mod_base = OTHER; note = 2'-O-Methyl-uridine
  modified_base 57: mod_base = OTHER; note = 2'-O-Methyl-adenosine
  modified_base 60: mod_base = OTHER; note = 2'-O-Methyl-cytidine
  modified_base 61: mod_base = OTHER; note = 2'-O-Methyl-cytidine
  modified_base 66: mod_base = OTHER; note = 2'-O-Methyl-uridine
  modified_base 67: mod_base = OTHER; note = 2'-O-Methyl-cytidine
  modified_base 70: mod_base = OTHER; note = 2'-O-Methyl-cytidine
  modified_base 71: mod_base = OTHER; note = 2'-O-Methyl-uridine
  modified_base 72: mod_base = OTHER; note = 2'-O-Methyl-uridine
  modified_base 74: mod_base = OTHER; note = 2'-O-Methyl-adenosine
  modified_base 75: mod_base = OTHER; note = 2'-O-Methyl-adenosine
  modified_base 76: mod_base = OTHER; note = 2'-O-Methyl-adenosine
  modified_base 77: mod_base = OTHER; note = 2'-O-Methyl-adenosine
  modified_base 78: mod_base = OTHER; note = 2'-O-Methyl-adenosine
  modified_base 79: mod_base = OTHER; note = 2'-O-Methyl-guanosine
  modified_base 80: mod_base = OTHER; note = 2'-O-Methyl-uridine
  modified_base 81: mod_base = OTHER; note = 2'-O-Methyl-guanosine
  modified_base 83: mod_base = OTHER; note = 2'-O-Methyl-cytidine
  modified_base 84: mod_base = OTHER; note = 2'-O-Methyl-adenosine
  modified_base 85: mod_base = OTHER; note = 2'-O-Methyl-cytidine
  modified_base 86: mod_base = OTHER; note = 2'-O-Methyl-cytidine
  modified_base 87: mod_base = OTHER; note = 2'-O-Methyl-guanosine
  modified_base 88: mod_base = OTHER; note = 2'-O-Methyl-adenosine
  modified_base 89: mod_base = OTHER; note = 2'-O-Methyl-guanosine
  modified_base 90: mod_base = OTHER; note = 2'-O-Methyl-uridine
  modified_base 91: mod_base = OTHER; note = 2'-O-Methyl-cytidine
  modified_base 92: mod_base = OTHER; note = 2'-O-Methyl-guanosine
  modified_base 93: mod_base = OTHER; note = 2'-O-Methyl-guanosine
  modified_base 94: mod_base = OTHER; note = 2'-O-Methyl-uridine
  modified_base 95: mod_base = OTHER; note = 2'-O-Methyl-guanosine
  modified_base 96: mod_base = OTHER; note = 2'-O-Methyl-cytidine
  modified_base 97: mod_base = OTHER; note = 2'-O-Methyl-uridine phosphorothioate
  modified_base 98: mod_base = OTHER; note = 2'-O-Methyl-uridine phosphorothioate
  modified_base 99: mod_base = OTHER; note = 2'-O-Methyl-uridine phosphorothioate
  modified_base 100: mod_base = OTHER; note = 2'-O-Methyl-uridine
aagatncctgnataaccctcgttttagagctagaaatagcaagttaaaataaggctagtccgttatcaacttgaaaaagtggcaccgagtcggtgctttt

SEQ ID NO: 1656 - RNA, 100 nt, synthetic construct
  source 1..100: mol_type = other RNA; note = Description of Artificial Sequence: Synthetic polynucleotide
  modified_base 1: mod_base = OTHER; note = 2'-O-Methyl-adenosine phosphorothioate
  modified_base 2: mod_base = OTHER; note = 2'-O-Methyl-adenosine phosphorothioate
  modified_base 3: mod_base = OTHER; note = 2'-O-Methyl-guanosine phosphorothioate
  modified_base 6: mod_base = OTHER; note = Nebularine - ribonebularine
  modified_base 15: mod_base = OTHER; note = Nebularine - ribonebularine
  modified_base 21: mod_base = OTHER; note = 2'-O-Methyl-guanosine
  modified_base 28: mod_base = OTHER; note = 2'-O-Methyl-adenosine
  modified_base 29: mod_base = OTHER; note = 2'-O-Methyl-guanosine
  modified_base 30: mod_base = OTHER; note = 2'-O-Methyl-cytidine
  modified_base 31: mod_base = OTHER; note = 2'-O-Methyl-uridine
  modified_base 32: mod_base = OTHER; note = 2'-O-Methyl-adenosine
  modified_base 34: mod_base = OTHER; note = 2'-O-Methyl-adenosine
  modified_base 35: mod_base = OTHER; note = 2'-O-Methyl-adenosine
  modified_base 36: mod_base = OTHER; note = 2'-O-Methyl-adenosine
  modified_base 37: mod_base = OTHER; note = 2'-O-Methyl-uridine
  modified_base 38: mod_base = OTHER; note = 2'-O-Methyl-adenosine
  modified_base 39: mod_base = OTHER; note = 2'-O-Methyl-guanosine
  modified_base 40: mod_base = OTHER; note = 2'-O-Methyl-cytidine
  modified_base 41: mod_base = OTHER; note = 2'-O-Methyl-adenosine
  modified_base 42: mod_base = OTHER; note = 2'-O-Methyl-adenosine
  modified_base 46: mod_base = OTHER; note = 2'-O-Methyl-adenosine
  modified_base 48: mod_base = OTHER; note = 2'-O-Methyl-adenosine
  modified_base 50: mod_base = OTHER; note = 2'-O-Methyl-uridine
  modified_base 52: mod_base = OTHER; note = 2'-O-Methyl-adenosine
  modified_base 53: mod_base = OTHER; note = 2'-O-Methyl-guanosine
  modified_base 54: mod_base = OTHER; note = 2'-O-Methyl-guanosine
  modified_base 55: mod_base = OTHER; note = 2'-O-Methyl-cytidine
  modified_base 56: mod_base = OTHER; note = 2'-O-Methyl-uridine
  modified_base 57: mod_base = OTHER; note = 2'-O-Methyl-adenosine
  modified_base 60: mod_base = OTHER; note = 2'-O-Methyl-cytidine
  modified_base 61: mod_base = OTHER; note = 2'-O-Methyl-cytidine
  modified_base 66: mod_base = OTHER; note = 2'-O-Methyl-uridine
  modified_base 67: mod_base = OTHER; note = 2'-O-Methyl-cytidine
  modified_base 70: mod_base = OTHER; note = 2'-O-Methyl-cytidine
  modified_base 71: mod_base = OTHER; note = 2'-O-Methyl-uridine
  modified_base 72: mod_base = OTHER; note = 2'-O-Methyl-uridine
  modified_base 74: mod_base = OTHER; note = 2'-O-Methyl-adenosine
  modified_base 75: mod_base = OTHER; note = 2'-O-Methyl-adenosine
  modified_base 76: mod_base = OTHER; note = 2'-O-Methyl-adenosine
  modified_base 77: mod_base = OTHER; note = 2'-O-Methyl-adenosine
  modified_base 78: mod_base = OTHER; note = 2'-O-Methyl-adenosine
  modified_base 79: mod_base = OTHER; note = 2'-O-Methyl-guanosine
  modified_base 80: mod_base = OTHER; note = 2'-O-Methyl-uridine
  modified_base 81: mod_base = OTHER; note = 2'-O-Methyl-guanosine
  modified_base 83: mod_base = OTHER; note = 2'-O-Methyl-cytidine
  modified_base 84: mod_base = OTHER; note = 2'-O-Methyl-adenosine
  modified_base 85: mod_base = OTHER; note = 2'-O-Methyl-cytidine
  modified_base 86: mod_base = OTHER; note = 2'-O-Methyl-cytidine
  modified_base 87: mod_base = OTHER; note = 2'-O-Methyl-guanosine
  modified_base 88: mod_base = OTHER; note = 2'-O-Methyl-adenosine
  modified_base 89: mod_base = OTHER; note = 2'-O-Methyl-guanosine
  modified_base 90: mod_base = OTHER; note = 2'-O-Methyl-uridine
  modified_base 91: mod_base = OTHER; note = 2'-O-Methyl-cytidine
  modified_base 92: mod_base = OTHER; note = 2'-O-Methyl-guanosine
  modified_base 93: mod_base = OTHER; note = 2'-O-Methyl-guanosine
  modified_base 94: mod_base = OTHER; note = 2'-O-Methyl-uridine
  modified_base 95: mod_base = OTHER; note = 2'-O-Methyl-guanosine
  modified_base 96: mod_base = OTHER; note = 2'-O-Methyl-cytidine
  modified_base 97: mod_base = OTHER; note = 2'-O-Methyl-uridine phosphorothioate
  modified_base 98: mod_base = OTHER; note = 2'-O-Methyl-uridine phosphorothioate
  modified_base 99: mod_base = OTHER; note = 2'-O-Methyl-uridine phosphorothioate
  modified_base 100: mod_base = OTHER; note = 2'-O-Methyl-uridine
aagatncctgaatanccctcgttttagagctagaaatagcaagttaaaataaggctagtccgttatcaacttgaaaaagtggcaccgagtcggtgctttt

SEQ ID NO: 1657 - RNA, 100 nt, synthetic construct
  source 1..100: mol_type = other RNA; note = Description of Artificial Sequence: Synthetic polynucleotide
  modified_base 1: mod_base = OTHER; note = 2'-O-Methyl-adenosine phosphorothioate
  modified_base 2: mod_base = OTHER; note = 2'-O-Methyl-adenosine phosphorothioate
  modified_base 3: mod_base = OTHER; note = 2'-O-Methyl-guanosine phosphorothioate
  modified_base 6: mod_base = OTHER; note = Nebularine - ribonebularine
  modified_base 11: mod_base = OTHER; note = Nebularine - ribonebularine
  modified_base 14: mod_base = OTHER; note = Nebularine - ribonebularine
  modified_base 21: mod_base = OTHER; note = 2'-O-Methyl-guanosine
  modified_base 28: mod_base = OTHER; note = 2'-O-Methyl-adenosine
  modified_base 29: mod_base = OTHER; note = 2'-O-Methyl-guanosine
  modified_base 30: mod_base = OTHER; note = 2'-O-Methyl-cytidine
  modified_base 31: mod_base = OTHER; note = 2'-O-Methyl-uridine
  modified_base 32: mod_base = OTHER; note = 2'-O-Methyl-adenosine
  modified_base 34: mod_base = OTHER; note = 2'-O-Methyl-adenosine
  modified_base 35: mod_base = OTHER; note = 2'-O-Methyl-adenosine
  modified_base 36: mod_base = OTHER; note = 2'-O-Methyl-adenosine
  modified_base 37: mod_base = OTHER; note = 2'-O-Methyl-uridine
  modified_base 38: mod_base = OTHER; note = 2'-O-Methyl-adenosine
  modified_base 39: mod_base = OTHER; note = 2'-O-Methyl-guanosine
  modified_base 40: mod_base = OTHER; note = 2'-O-Methyl-cytidine
  modified_base 41: mod_base = OTHER; note = 2'-O-Methyl-adenosine
  modified_base 42: mod_base = OTHER; note = 2'-O-Methyl-adenosine
  modified_base 46: mod_base = OTHER; note = 2'-O-Methyl-adenosine
  modified_base 48: mod_base = OTHER; note = 2'-O-Methyl-adenosine
  modified_base 50: mod_base = OTHER; note = 2'-O-Methyl-uridine
  modified_base 52: mod_base = OTHER; note = 2'-O-Methyl-adenosine
  modified_base 53: mod_base = OTHER; note = 2'-O-Methyl-guanosine
  modified_base 54: mod_base = OTHER; note = 2'-O-Methyl-guanosine
  modified_base 55: mod_base = OTHER; note = 2'-O-Methyl-cytidine
  modified_base 56: mod_base = OTHER; note = 2'-O-Methyl-uridine
  modified_base 57: mod_base = OTHER; note = 2'-O-Methyl-adenosine
  modified_base 60: mod_base = OTHER; note = 2'-O-Methyl-cytidine
  modified_base 61: mod_base = OTHER; note = 2'-O-Methyl-cytidine
  modified_base 66: mod_base = OTHER; note = 2'-O-Methyl-uridine
  modified_base 67: mod_base = OTHER; note = 2'-O-Methyl-cytidine
  modified_base 70: mod_base = OTHER; note = 2'-O-Methyl-cytidine
  modified_base 71: mod_base = OTHER; note = 2'-O-Methyl-uridine
  modified_base 72: mod_base = OTHER; note = 2'-O-Methyl-uridine
  modified_base 74: mod_base = OTHER; note = 2'-O-Methyl-adenosine
  modified_base 75: mod_base = OTHER; note = 2'-O-Methyl-adenosine
  modified_base 76: mod_base = OTHER; note = 2'-O-Methyl-adenosine
  modified_base 77: mod_base = OTHER; note = 2'-O-Methyl-adenosine
  modified_base 78: mod_base = OTHER; note = 2'-O-Methyl-adenosine
  modified_base 79: mod_base = OTHER; note = 2'-O-Methyl-guanosine
  modified_base 80: mod_base = OTHER; note = 2'-O-Methyl-uridine
  modified_base 81: mod_base = OTHER; note = 2'-O-Methyl-guanosine
  modified_base 83: mod_base = OTHER; note = 2'-O-Methyl-cytidine
  modified_base 84: mod_base = OTHER; note = 2'-O-Methyl-adenosine
  modified_base 85: mod_base = OTHER; note = 2'-O-Methyl-cytidine
  modified_base 86: mod_base = OTHER; note = 2'-O-Methyl-cytidine
  modified_base 87: mod_base = OTHER; note = 2'-O-Methyl-guanosine
  modified_base 88: mod_base = OTHER; note = 2'-O-Methyl-adenosine
  modified_base 89: mod_base = OTHER; note = 2'-O-Methyl-guanosine
  modified_base 90: mod_base = OTHER; note = 2'-O-Methyl-uridine
  modified_base 91: mod_base = OTHER; note = 2'-O-Methyl-cytidine
  modified_base 92: mod_base = OTHER; note = 2'-O-Methyl-guanosine
  modified_base 93: mod_base = OTHER; note = 2'-O-Methyl-guanosine
  modified_base 94: mod_base = OTHER; note = 2'-O-Methyl-uridine
  modified_base 95: mod_base = OTHER; note = 2'-O-Methyl-guanosine
  modified_base 96: mod_base = OTHER; note = 2'-O-Methyl-cytidine
  modified_base 97: mod_base = OTHER; note = 2'-O-Methyl-uridine phosphorothioate
  modified_base 98: mod_base = OTHER; note = 2'-O-Methyl-uridine phosphorothioate
  modified_base 99: mod_base = OTHER; note = 2'-O-Methyl-uridine phosphorothioate
  modified_base 100: mod_base = OTHER; note = 2'-O-Methyl-uridine
aagatncctgnatnaccctcgttttagagctagaaatagcaagttaaaataaggctagtccgttatcaacttgaaaaagtggcaccgagtcggtgctttt

SEQ ID NO: 1658 - RNA, 100 nt, synthetic construct
  source 1..100: mol_type = other RNA; note = Description of Artificial Sequence: Synthetic polynucleotide
  modified_base 1: mod_base = OTHER; note = 2'-O-Methyl-adenosine phosphorothioate
  modified_base 2: mod_base = OTHER; note = 2'-O-Methyl-adenosine phosphorothioate
  modified_base 3: mod_base = OTHER; note = 2'-O-Methyl-guanosine phosphorothioate
  modified_base 4: mod_base = OTHER; note = Nebularine - ribonebularine
  modified_base 6: mod_base = OTHER; note = Nebularine - ribonebularine
  modified_base 21: mod_base = OTHER; note = 2'-O-Methyl-guanosine
  modified_base 28: mod_base = OTHER; note = 2'-O-Methyl-adenosine
  modified_base 29: mod_base = OTHER; note = 2'-O-Methyl-guanosine
  modified_base 30: mod_base = OTHER; note = 2'-O-Methyl-cytidine
  modified_base 31: mod_base = OTHER; note = 2'-O-Methyl-uridine
  modified_base 32: mod_base = OTHER; note = 2'-O-Methyl-adenosine
  modified_base 34: mod_base = OTHER; note = 2'-O-Methyl-adenosine
  modified_base 35: mod_base = OTHER; note = 2'-O-Methyl-adenosine
  modified_base 36: mod_base = OTHER; note = 2'-O-Methyl-adenosine
  modified_base 37: mod_base = OTHER; note = 2'-O-Methyl-uridine
  modified_base 38: mod_base = OTHER; note = 2'-O-Methyl-adenosine
  modified_base 39: mod_base = OTHER; note = 2'-O-Methyl-guanosine
  modified_base 40: mod_base = OTHER; note = 2'-O-Methyl-cytidine
  modified_base 41: mod_base = OTHER; note = 2'-O-Methyl-adenosine
  modified_base 42: mod_base = OTHER; note = 2'-O-Methyl-adenosine
  modified_base 46: mod_base = OTHER; note = 2'-O-Methyl-adenosine
  modified_base 48: mod_base = OTHER; note = 2'-O-Methyl-adenosine
  modified_base 50: mod_base = OTHER; note = 2'-O-Methyl-uridine
  modified_base 52: mod_base = OTHER; note = 2'-O-Methyl-adenosine
  modified_base 53: mod_base = OTHER; note = 2'-O-Methyl-guanosine
  modified_base 54: mod_base = OTHER; note = 2'-O-Methyl-guanosine
  modified_base 55: mod_base = OTHER; note = 2'-O-Methyl-cytidine
  modified_base 56: mod_base = OTHER; note = 2'-O-Methyl-uridine
  modified_base 57: mod_base = OTHER; note = 2'-O-Methyl-adenosine
  modified_base 60: mod_base = OTHER; note = 2'-O-Methyl-cytidine
  modified_base 61: mod_base = OTHER; note = 2'-O-Methyl-cytidine
  modified_base 66: mod_base = OTHER; note = 2'-O-Methyl-uridine
  modified_base 67: mod_base = OTHER; note = 2'-O-Methyl-cytidine
  modified_base 70: mod_base = OTHER; note = 2'-O-Methyl-cytidine
  modified_base 71: mod_base = OTHER; note = 2'-O-Methyl-uridine
  modified_base 72: mod_base = OTHER; note = 2'-O-Methyl-uridine
  modified_base 74: mod_base = OTHER; note = 2'-O-Methyl-adenosine
  modified_base 75: mod_base = OTHER; note = 2'-O-Methyl-adenosine
  modified_base 76: mod_base = OTHER; note = 2'-O-Methyl-adenosine
  modified_base 77: mod_base = OTHER; note = 2'-O-Methyl-adenosine
  modified_base 78: mod_base = OTHER; note = 2'-O-Methyl-adenosine
  modified_base 79: mod_base = OTHER; note = 2'-O-Methyl-guanosine
  modified_base 80: mod_base = OTHER; note = 2'-O-Methyl-uridine
  modified_base 81: mod_base = OTHER; note = 2'-O-Methyl-guanosine
  modified_base 83: mod_base = OTHER; note = 2'-O-Methyl-cytidine
  modified_base 84: mod_base = OTHER; note = 2'-O-Methyl-adenosine
  modified_base 85: mod_base = OTHER; note = 2'-O-Methyl-cytidine
  modified_base 86: mod_base = OTHER; note = 2'-O-Methyl-cytidine
  modified_base 87: mod_base = OTHER; note = 2'-O-Methyl-guanosine
  modified_base 88: mod_base = OTHER; note = 2'-O-Methyl-adenosine
  modified_base 89: mod_base = OTHER; note = 2'-O-Methyl-guanosine
  modified_base 90: mod_base = OTHER; note = 2'-O-Methyl-uridine
  modified_base 91: mod_base = OTHER; note = 2'-O-Methyl-cytidine
  modified_base 92: mod_base = OTHER; note = 2'-O-Methyl-guanosine
  modified_base 93: mod_base = OTHER; note = 2'-O-Methyl-guanosine
  modified_base 94: mod_base = OTHER; note = 2'-O-Methyl-uridine
  modified_base 95: mod_base = OTHER; note = 2'-O-Methyl-guanosine
  modified_base 96: mod_base = OTHER; note = 2'-O-Methyl-cytidine
  modified_base 97: mod_base = OTHER; note = 2'-O-Methyl-uridine phosphorothioate
  modified_base 98: mod_base = OTHER; note = 2'-O-Methyl-uridine phosphorothioate
  modified_base 99: mod_base = OTHER; note = 2'-O-Methyl-uridine phosphorothioate
  modified_base 100: mod_base = OTHER; note = 2'-O-Methyl-uridine
aagntncctgaataaccctcgttttagagctagaaatagcaagttaaaataaggctagtccgttatcaacttgaaaaagtggcaccgagtcggtgctttt

SEQ ID NO: 1659 - RNA, 100 nt, synthetic construct
  source 1..100: mol_type = other RNA; note = Description of Artificial Sequence: Synthetic polynucleotide
  modified_base 1: mod_base = OTHER; note = 2'-O-Methyl-adenosine phosphorothioate
  modified_base 2: mod_base = OTHER; note = 2'-O-Methyl-adenosine phosphorothioate
  modified_base 3: mod_base = OTHER; note = 2'-O-Methyl-guanosine phosphorothioate
  modified_base 4: mod_base = OTHER; note = Nebularine - ribonebularine
  modified_base 6: mod_base = OTHER; note = Nebularine - ribonebularine
  modified_base 15: mod_base = OTHER; note = Nebularine - ribonebularine
  modified_base 21: mod_base = OTHER; note = 2'-O-Methyl-guanosine
  modified_base 28: mod_base = OTHER; note = 2'-O-Methyl-adenosine
  modified_base 29: mod_base = OTHER; note = 2'-O-Methyl-guanosine
  modified_base 30: mod_base = OTHER; note = 2'-O-Methyl-cytidine
  modified_base 31: mod_base = OTHER; note = 2'-O-Methyl-uridine
  modified_base 32: mod_base = OTHER; note = 2'-O-Methyl-adenosine
  modified_base 34: mod_base = OTHER; note = 2'-O-Methyl-adenosine
  modified_base 35: mod_base = OTHER; note = 2'-O-Methyl-adenosine
  modified_base 36: mod_base = OTHER; note = 2'-O-Methyl-adenosine
  modified_base 37: mod_base = OTHER; note = 2'-O-Methyl-uridine
  modified_base 38: mod_base = OTHER; note = 2'-O-Methyl-adenosine
  modified_base 39: mod_base = OTHER; note = 2'-O-Methyl-guanosine
  modified_base 40: mod_base = OTHER; note = 2'-O-Methyl-cytidine
  modified_base 41: mod_base = OTHER; note = 2'-O-Methyl-adenosine
  modified_base 42: mod_base = OTHER; note = 2'-O-Methyl-adenosine
  modified_base 46: mod_base = OTHER; note = 2'-O-Methyl-adenosine
  modified_base 48: mod_base = OTHER; note = 2'-O-Methyl-adenosine
  modified_base 50: mod_base = OTHER; note = 2'-O-Methyl-uridine
  modified_base 52: mod_base = OTHER; note = 2'-O-Methyl-adenosine
  modified_base 53: mod_base = OTHER; note = 2'-O-Methyl-guanosine
  modified_base 54: mod_base = OTHER; note = 2'-O-Methyl-guanosine
  modified_base 55: mod_base = OTHER; note = 2'-O-Methyl-cytidine
  modified_base 56: mod_base = OTHER; note = 2'-O-Methyl-uridine
  modified_base 57: mod_base = OTHER; note = 2'-O-Methyl-adenosine
  modified_base 60: mod_base = OTHER; note = 2'-O-Methyl-cytidine
  modified_base 61: mod_base = OTHER; note = 2'-O-Methyl-cytidine
  modified_base 66: mod_base = OTHER; note = 2'-O-Methyl-uridine
  modified_base 67: mod_base = OTHER; note = 2'-O-Methyl-cytidine
  modified_base 70: mod_base = OTHER; note = 2'-O-Methyl-cytidine
  modified_base 71: mod_base = OTHER; note = 2'-O-Methyl-uridine
  modified_base 72: mod_base = OTHER; note = 2'-O-Methyl-uridine
  modified_base 74: mod_base = OTHER; note = 2'-O-Methyl-adenosine
  modified_base 75: mod_base = OTHER; note = 2'-O-Methyl-adenosine
  modified_base 76: mod_base = OTHER; note = 2'-O-Methyl-adenosine
  modified_base 77: mod_base = OTHER; note = 2'-O-Methyl-adenosine
  modified_base 78: mod_base = OTHER; note = 2'-O-Methyl-adenosine
  modified_base 79: mod_base = OTHER; note = 2'-O-Methyl-guanosine
  modified_base 80: mod_base = OTHER; note = 2'-O-Methyl-uridine
  modified_base 81: mod_base = OTHER; note = 2'-O-Methyl-guanosine
  modified_base 83: mod_base = OTHER; note = 2'-O-Methyl-cytidine
  modified_base 84: mod_base = OTHER; note = 2'-O-Methyl-adenosine
  modified_base 85: mod_base = OTHER; note = 2'-O-Methyl-cytidine
  modified_base 86: mod_base = OTHER; note = 2'-O-Methyl-cytidine
  modified_base 87: mod_base = OTHER; note = 2'-O-Methyl-guanosine
  modified_base 88: mod_base = OTHER; note = 2'-O-Methyl-adenosine
  modified_base 89: mod_base = OTHER; note = 2'-O-Methyl-guanosine
  modified_base 90: mod_base = OTHER; note = 2'-O-Methyl-uridine
  modified_base 91: mod_base = OTHER; note = 2'-O-Methyl-cytidine
  modified_base 92: mod_base = OTHER; note = 2'-O-Methyl-guanosine
  modified_base 93: mod_base = OTHER; note = 2'-O-Methyl-guanosine
  modified_base 94: mod_base = OTHER; note = 2'-O-Methyl-uridine
  modified_base 95: mod_base = OTHER; note = 2'-O-Methyl-guanosine
  modified_base 96: mod_base = OTHER; note = 2'-O-Methyl-cytidine
  modified_base 97: mod_base = OTHER; note = 2'-O-Methyl-uridine phosphorothioate
  modified_base 98: mod_base = OTHER; note = 2'-O-Methyl-uridine phosphorothioate
  modified_base 99: mod_base = OTHER; note = 2'-O-Methyl-uridine phosphorothioate
  modified_base 100: mod_base = OTHER; note = 2'-O-Methyl-uridine
aagntncctgaatanccctcgttttagagctagaaatagcaagttaaaataaggctagtccgttatcaacttgaaaaagtggcaccgagtcggtgctttt

SEQ ID NO: 1660 - RNA, 100 nt, synthetic construct
  source 1..100: mol_type = other RNA; note = Description of Artificial Sequence: Synthetic polynucleotide
  modified_base 1: mod_base = OTHER; note = 2'-O-Methyl-adenosine phosphorothioate
  modified_base 2: mod_base = OTHER; note = 2'-O-Methyl-adenosine phosphorothioate
  modified_base 3: mod_base = OTHER; note = 2'-O-Methyl-guanosine phosphorothioate
  modified_base 4: mod_base = OTHER; note = Nebularine - ribonebularine
  modified_base 14: mod_base = OTHER; note = Nebularine - ribonebularine
  modified_base 21: mod_base = OTHER; note = 2'-O-Methyl-guanosine
  modified_base 28: mod_base = OTHER; note = 2'-O-Methyl-adenosine
  modified_base 29: mod_base = OTHER; note = 2'-O-Methyl-guanosine
  modified_base 30: mod_base = OTHER; note = 2'-O-Methyl-cytidine
  modified_base 31: mod_base = OTHER; note = 2'-O-Methyl-uridine
  modified_base 32: mod_base = OTHER; note = 2'-O-Methyl-adenosine
  modified_base 34: mod_base = OTHER; note = 2'-O-Methyl-adenosine
  modified_base 35: mod_base = OTHER; note = 2'-O-Methyl-adenosine
  modified_base 36: mod_base = OTHER; note = 2'-O-Methyl-adenosine
  modified_base 37: mod_base = OTHER; note = 2'-O-Methyl-uridine
  modified_base 38: mod_base = OTHER; note = 2'-O-Methyl-adenosine
  modified_base 39: mod_base = OTHER; note = 2'-O-Methyl-guanosine
  modified_base 40: mod_base = OTHER; note = 2'-O-Methyl-cytidine
  modified_base 41: mod_base = OTHER; note = 2'-O-Methyl-adenosine
  modified_base 42: mod_base = OTHER; note = 2'-O-Methyl-adenosine
  modified_base 46: mod_base = OTHER; note = 2'-O-Methyl-adenosine
  modified_base 48: mod_base = OTHER; note = 2'-O-Methyl-adenosine
  modified_base 50: mod_base = OTHER; note = 2'-O-Methyl-uridine
  modified_base 52: mod_base = OTHER; note = 2'-O-Methyl-adenosine
  modified_base 53: mod_base = OTHER; note = 2'-O-Methyl-guanosine
  modified_base 54: mod_base = OTHER; note = 2'-O-Methyl-guanosine
  modified_base 55: mod_base = OTHER; note = 2'-O-Methyl-cytidine
  modified_base 56: mod_base = OTHER; note = 2'-O-Methyl-uridine
  modified_base 57: mod_base = OTHER; note = 2'-O-Methyl-adenosine
  modified_base 60: mod_base = OTHER; note = 2'-O-Methyl-cytidine
  modified_base 61: mod_base = OTHER; note = 2'-O-Methyl-cytidine
  modified_base 66: mod_base = OTHER; note = 2'-O-Methyl-uridine
  modified_base 67: mod_base = OTHER; note = 2'-O-Methyl-cytidine
  modified_base 70: mod_base = OTHER; note = 2'-O-Methyl-cytidine
  modified_base 71: mod_base = OTHER; note = 2'-O-Methyl-uridine
  modified_base 72: mod_base = OTHER; note = 2'-O-Methyl-uridine
  modified_base 74: mod_base = OTHER; note = 2'-O-Methyl-adenosine
  modified_base 75: mod_base = OTHER; note = 2'-O-Methyl-adenosine
  modified_base 76: mod_base = OTHER; note = 2'-O-Methyl-adenosine
  modified_base 77: mod_base = OTHER; note = 2'-O-Methyl-adenosine
  modified_base 78: mod_base = OTHER; note = 2'-O-Methyl-adenosine
  modified_base 79: mod_base = OTHER; note = 2'-O-Methyl-guanosine
  modified_base 80: mod_base = OTHER; note = 2'-O-Methyl-uridine
  modified_base 81: mod_base = OTHER; note = 2'-O-Methyl-guanosine
  modified_base 83: mod_base = OTHER; note = 2'-O-Methyl-cytidine
  modified_base 84: mod_base = OTHER; note = 2'-O-Methyl-adenosine
  modified_base 85: mod_base = OTHER; note = 2'-O-Methyl-cytidine
  modified_base 86: mod_base = OTHER; note = 2'-O-Methyl-cytidine
  modified_base 87: mod_base = OTHER; note = 2'-O-Methyl-guanosine
  modified_base 88: mod_base = OTHER; note = 2'-O-Methyl-adenosine
  modified_base 89: mod_base = OTHER; note = 2'-O-Methyl-guanosine
  modified_base 90: mod_base = OTHER; note = 2'-O-Methyl-uridine
  modified_base 91: mod_base = OTHER; note = 2'-O-Methyl-cytidine
  modified_base 92: mod_base = OTHER; note = 2'-O-Methyl-guanosine
  modified_base 93: mod_base = OTHER; note = 2'-O-Methyl-guanosine
  modified_base 94: mod_base = OTHER; note = 2'-O-Methyl-uridine
  modified_base 95: mod_base = OTHER; note = 2'-O-Methyl-guanosine
  modified_base 96: mod_base = OTHER; note = 2'-O-Methyl-cytidine
  modified_base 97: mod_base = OTHER; note = 2'-O-Methyl-uridine phosphorothioate
  modified_base 98: mod_base = OTHER; note = 2'-O-Methyl-uridine phosphorothioate
  modified_base 99: mod_base = OTHER; note = 2'-O-Methyl-uridine phosphorothioate
  modified_base 100: mod_base = OTHER; note = 2'-O-Methyl-uridine
aagntacctgaatnaccctcgttttagagctagaaatagcaagttaaaataaggctagtccgttatcaacttgaaaaagtggcaccgagtcggtgctttt

SEQ ID NO: 1661 - RNA, 100 nt, synthetic construct
  source 1..100: mol_type = other RNA; note = Description of Artificial Sequence: Synthetic polynucleotide
  modified_base 1: mod_base = OTHER; note = 2'-O-Methyl-adenosine phosphorothioate
  modified_base 2: mod_base = OTHER; note = 2'-O-Methyl-adenosine phosphorothioate
  modified_base 3: mod_base = OTHER; note = 2'-O-Methyl-guanosine phosphorothioate
  modified_base 11: mod_base = OTHER; note = Nebularine - ribonebularine
  modified_base 21: mod_base = OTHER; note = 2'-O-Methyl-guanosine
  modified_base 28: mod_base = OTHER; note = 2'-O-Methyl-adenosine
  modified_base 29: mod_base = OTHER; note = 2'-O-Methyl-guanosine
  modified_base 30: mod_base = OTHER; note = 2'-O-Methyl-cytidine
  modified_base 31: mod_base = OTHER; note = 2'-O-Methyl-uridine
  modified_base 32: mod_base = OTHER; note = 2'-O-Methyl-adenosine
  modified_base 34: mod_base = OTHER; note = 2'-O-Methyl-adenosine
  modified_base 35: mod_base = OTHER; note = 2'-O-Methyl-adenosine
  modified_base 36: mod_base = OTHER; note = 2'-O-Methyl-adenosine
  modified_base 37: mod_base = OTHER; note = 2'-O-Methyl-uridine
  modified_base 38: mod_base = OTHER; note = 2'-O-Methyl-adenosine
  modified_base 39: mod_base = OTHER; note = 2'-O-Methyl-guanosine
  modified_base 40: mod_base = OTHER; note = 2'-O-Methyl-cytidine
  modified_base 41: mod_base = OTHER; note = 2'-O-Methyl-adenosine
  modified_base 42: mod_base = OTHER; note = 2'-O-Methyl-adenosine
  modified_base 46: mod_base = OTHER; note = 2'-O-Methyl-adenosine
  modified_base 48: mod_base = OTHER; note = 2'-O-Methyl-adenosine
  modified_base 50: mod_base = OTHER; note = 2'-O-Methyl-uridine
  modified_base 52: mod_base = OTHER; note = 2'-O-Methyl-adenosine
  modified_base 53: mod_base = OTHER; note = 2'-O-Methyl-guanosine
  modified_base 54: mod_base = OTHER; note = 2'-O-Methyl-guanosine
  modified_base 55: mod_base = OTHER; note = 2'-O-Methyl-cytidine
  modified_base 56: mod_base = OTHER; note = 2'-O-Methyl-uridine
  modified_base 57: mod_base = OTHER; note = 2'-O-Methyl-adenosine
  modified_base 60: mod_base = OTHER; note = 2'-O-Methyl-cytidine
  modified_base 61: mod_base = OTHER; note = 2'-O-Methyl-cytidine
  modified_base 66: mod_base = OTHER; note = 2'-O-Methyl-uridine
  modified_base 67: mod_base = OTHER; note = 2'-O-Methyl-cytidine
  modified_base 70: mod_base = OTHER; note = 2'-O-Methyl-cytidine
  modified_base 71: mod_base = OTHER; note = 2'-O-Methyl-uridine
  modified_base 72: mod_base = OTHER; note = 2'-O-Methyl-uridine
  modified_base 74: mod_base = OTHER; note = 2'-O-Methyl-adenosine
  modified_base 75: mod_base = OTHER; note = 2'-O-Methyl-adenosine
  modified_base 76: mod_base = OTHER; note = 2'-O-Methyl-adenosine
  modified_base 77: mod_base = OTHER; note = 2'-O-Methyl-adenosine
  modified_base 78: mod_base = OTHER; note = 2'-O-Methyl-adenosine
  modified_base 79: mod_base = OTHER; note = 2'-O-Methyl-guanosine
  modified_base 80: mod_base = OTHER; note = 2'-O-Methyl-uridine
  modified_base 81: mod_base = OTHER; note = 2'-O-Methyl-guanosine
  modified_base 83: mod_base = OTHER; note = 2'-O-Methyl-cytidine
  modified_base 84: mod_base = OTHER; note = 2'-O-Methyl-adenosine
  modified_base 85: mod_base = OTHER; note = 2'-O-Methyl-cytidine
  modified_base 86: mod_base = OTHER; note = 2'-O-Methyl-cytidine
  modified_base 87: mod_base = OTHER; note = 2'-O-Methyl-guanosine
  modified_base 88: mod_base = OTHER; note = 2'-O-Methyl-adenosine
  modified_base 89: mod_base = OTHER; note = 2'-O-Methyl-guanosine
  modified_base 90: mod_base = OTHER; note = 2'-O-Methyl-uridine
  modified_base 91: mod_base = OTHER; note = 2'-O-Methyl-cytidine
  modified_base 92: mod_base = OTHER; note = 2'-O-Methyl-guanosine
  modified_base 93: mod_base = OTHER; note = 2'-O-Methyl-guanosine
  modified_base 94: mod_base = OTHER; note = 2'-O-Methyl-uridine
  modified_base 95: mod_base = OTHER; note = 2'-O-Methyl-guanosine
  modified_base 96: mod_base = OTHER; note = 2'-O-Methyl-cytidine
  modified_base 97: mod_base = OTHER; note = 2'-O-Methyl-uridine phosphorothioate
  modified_base 98: mod_base = OTHER; note = 2'-O-Methyl-uridine phosphorothioate
  modified_base 99: mod_base = OTHER; note = 2'-O-Methyl-uridine phosphorothioate
  modified_base 100: mod_base = OTHER; note = 2'-O-Methyl-uridine
aagatacctgnataaccctcgttttagagctagaaatagcaagttaaaataaggctagtccgttatcaacttgaaaaagtggcaccgagtcggtgctttt

SEQ ID NO: 1662 - RNA, 100 nt, synthetic construct
  source 1..100: mol_type = other RNA; note = Description of Artificial Sequence: Synthetic polynucleotide
  modified_base 1: mod_base = OTHER; note = 2'-O-Methyl-adenosine phosphorothioate
  modified_base 2: mod_base = OTHER; note = 2'-O-Methyl-adenosine phosphorothioate
  modified_base 3: mod_base = OTHER; note = 2'-O-Methyl-guanosine phosphorothioate
  modified_base 11: mod_base = OTHER; note = Nebularine - ribonebularine
  modified_base 15: mod_base = OTHER; note = Nebularine - ribonebularine
  modified_base 21: mod_base = OTHER; note = 2'-O-Methyl-guanosine
  modified_base 28: mod_base = OTHER; note = 2'-O-Methyl-adenosine
  modified_base 29: mod_base = OTHER; note = 2'-O-Methyl-guanosine
  modified_base 30: mod_base = OTHER; note = 2'-O-Methyl-cytidine
  modified_base 31: mod_base = OTHER; note = 2'-O-Methyl-uridine
  modified_base 32: mod_base = OTHER; note = 2'-O-Methyl-adenosine
  modified_base 34: mod_base = OTHER; note = 2'-O-Methyl-adenosine
  modified_base 35: mod_base = OTHER; note = 2'-O-Methyl-adenosine
  modified_base 36: mod_base = OTHER; note = 2'-O-Methyl-adenosine
  modified_base 37: mod_base = OTHER; note = 2'-O-Methyl-uridine
  modified_base 38: mod_base = OTHER; note = 2'-O-Methyl-adenosine
  modified_base 39: mod_base = OTHER; note = 2'-O-Methyl-guanosine
  modified_base 40: mod_base = OTHER; note = 2'-O-Methyl-cytidine
  modified_base 41: mod_base = OTHER; note = 2'-O-Methyl-adenosine
  modified_base 42: mod_base = OTHER; note = 2'-O-Methyl-adenosine
  modified_base 46: mod_base = OTHER; note = 2'-O-Methyl-adenosine
  modified_base 48: mod_base = OTHER; note = 2'-O-Methyl-adenosine
  modified_base 50: mod_base = OTHER; note = 2'-O-Methyl-uridine
  modified_base 52: mod_base = OTHER; note = 2'-O-Methyl-adenosine
  modified_base 53: mod_base = OTHER; note = 2'-O-Methyl-guanosine
  modified_base 54: mod_base = OTHER; note = 2'-O-Methyl-guanosine
  modified_base 55: mod_base = OTHER; note = 2'-O-Methyl-cytidine
  modified_base 56: mod_base = OTHER; note = 2'-O-Methyl-uridine
  modified_base 57: mod_base = OTHER; note = 2'-O-Methyl-adenosine
  modified_base 60: mod_base = OTHER; note = 2'-O-Methyl-cytidine
  modified_base 61: mod_base = OTHER; note = 2'-O-Methyl-cytidine
  modified_base 66: mod_base = OTHER; note = 2'-O-Methyl-uridine
  modified_base 67: mod_base = OTHER; note = 2'-O-Methyl-cytidine
  modified_base 70: mod_base = OTHER; note = 2'-O-Methyl-cytidine
  modified_base 71: mod_base = OTHER; note = 2'-O-Methyl-uridine
  modified_base 72: mod_base = OTHER; note = 2'-O-Methyl-uridine
  modified_base 74: mod_base = OTHER; note = 2'-O-Methyl-adenosine
  modified_base 75: mod_base = OTHER; note = 2'-O-Methyl-adenosine
  modified_base 76: mod_base = OTHER; note = 2'-O-Methyl-adenosine
  modified_base 77: mod_base = OTHER; note = 2'-O-Methyl-adenosine
  modified_base 78: mod_base = OTHER; note = 2'-O-Methyl-adenosine
  modified_base 79: mod_base = OTHER; note = 2'-O-Methyl-guanosine
  modified_base 80: mod_base = OTHER; note = 2'-O-Methyl-uridine
  modified_base 81: mod_base = OTHER; note = 2'-O-Methyl-guanosine
  modified_base 83: mod_base = OTHER; note = 2'-O-Methyl-cytidine
  modified_base 84: mod_base = OTHER; note = 2'-O-Methyl-adenosine
  modified_base 85: mod_base = OTHER; note = 2'-O-Methyl-cytidine
  modified_base 86: mod_base = OTHER; note = 2'-O-Methyl-cytidine
  modified_base 87: mod_base = OTHER; note = 2'-O-Methyl-guanosine
  modified_base 88: mod_base = OTHER; note = 2'-O-Methyl-adenosine
  modified_base 89: mod_base = OTHER; note = 2'-O-Methyl-guanosine
  modified_base 90: mod_base = OTHER; note = 2'-O-Methyl-uridine
  modified_base 91: mod_base = OTHER; note = 2'-O-Methyl-cytidine
  modified_base 92: mod_base = OTHER; note = 2'-O-Methyl-guanosine
  modified_base 93: mod_base = OTHER; note = 2'-O-Methyl-guanosine
  modified_base 94: mod_base = OTHER; note = 2'-O-Methyl-uridine
  modified_base 95: mod_base = OTHER; note = 2'-O-Methyl-guanosine
  modified_base 96: mod_base = OTHER; note = 2'-O-Methyl-cytidine
  modified_base 97: mod_base = OTHER; note = 2'-O-Methyl-uridine phosphorothioate
  modified_base 98: mod_base = OTHER; note = 2'-O-Methyl-uridine phosphorothioate
  modified_base 99: mod_base = OTHER; note = 2'-O-Methyl-uridine phosphorothioate
  modified_base 100: mod_base = OTHER; note = 2'-O-Methyl-uridine
aagatacctgnatanccctcgttttagagctagaaatagcaagttaaaataaggctagtccgttatcaacttgaaaaagtggcaccgagtcggtgctttt

SEQ ID NO: 1663 - RNA, 100 nt, synthetic construct; identical to SEQ ID NO: 55
  source 1..100: mol_type = other RNA; note = Description of Artificial Sequence: Synthetic polynucleotide
  modified_base 1: mod_base = OTHER; note = 2'-O-Methyl-cytidine phosphorothioate
  modified_base 2: mod_base = OTHER; note = 2'-O-Methyl-adenosine phosphorothioate
  modified_base 3: mod_base = OTHER; note = 2'-O-Methyl-guanosine phosphorothioate
  modified_base 21: mod_base = OTHER; note = 2'-O-Methyl-guanosine
  modified_base 25: mod_base = OTHER; note = uridine phosphorothioate
  modified_base 28: mod_base = OTHER; note = 2'-O-Methyl-adenosine
  modified_base 29: mod_base = OTHER; note = 2'-O-Methyl-guanosine
  modified_base 30: mod_base = OTHER; note = 2'-O-Methyl-cytidine
  modified_base 31: mod_base = OTHER; note = 2'-O-Methyl-uridine
  modified_base 32: mod_base = OTHER; note = 2'-O-Methyl-adenosine
  modified_base 33: mod_base = OTHER; note = 2'-O-Methyl-guanosine
  modified_base 34: mod_base = OTHER; note = 2'-O-Methyl-adenosine
  modified_base 35: mod_base = OTHER; note = 2'-O-Methyl-adenosine
  modified_base 36: mod_base = OTHER; note = 2'-O-Methyl-adenosine
  modified_base 37: mod_base = OTHER; note = 2'-O-Methyl-uridine
  modified_base 38: mod_base = OTHER; note = 2'-O-Methyl-adenosine
  modified_base 39: mod_base = OTHER; note = 2'-O-Methyl-guanosine
  modified_base 40: mod_base = OTHER; note = 2'-O-Methyl-cytidine
  modified_base 41: mod_base = OTHER; note = 2'-O-Methyl-adenosine
  modified_base 42: mod_base = OTHER; note = 2'-O-Methyl-adenosine
  modified_base 46: mod_base = OTHER; note = 2'-O-Methyl-adenosine
  modified_base 48: mod_base = OTHER; note = 2'-O-Methyl-adenosine
  modified_base 50: mod_base = OTHER; note = 2'-O-Methyl-uridine
  modified_base 52: mod_base = OTHER; note = 2'-O-Methyl-adenosine
  modified_base 53: mod_base = OTHER; note = 2'-O-Methyl-guanosine
  modified_base 54: mod_base = OTHER; note = 2'-O-Methyl-guanosine
  modified_base 57: mod_base = OTHER; note = 2'-O-Methyl-adenosine
  modified_base 61: mod_base = OTHER; note = 2'-O-Methyl-cytidine
  modified_base 66: mod_base = OTHER; note = 2'-O-Methyl-uridine
  modified_base 67: mod_base = OTHER; note = 2'-O-Methyl-cytidine
  modified_base 70: mod_base = OTHER; note = 2'-O-Methyl-cytidine
  modified_base 71: mod_base = OTHER; note = 2'-O-Methyl-uridine
  modified_base 72: mod_base = OTHER; note = 2'-O-Methyl-uridine
  modified_base 73: mod_base = OTHER; note = 2'-O-Methyl-guanosine
  modified_base 74: mod_base = OTHER; note = 2'-O-Methyl-adenosine
  modified_base 75: mod_base = OTHER; note = 2'-O-Methyl-adenosine
  modified_base 76: mod_base = OTHER; note = 2'-O-Methyl-adenosine
  modified_base 77: mod_base = OTHER; note = 2'-O-Methyl-adenosine
  modified_base 78: mod_base = OTHER; note = 2'-O-Methyl-adenosine
  modified_base 79: mod_base = OTHER; note = 2'-O-Methyl-guanosine
  modified_base 80: mod_base = OTHER; note = 2'-O-Methyl-uridine
  modified_base 82: mod_base = OTHER; note = 2'-O-Methyl-guanosine
  modified_base 83: mod_base = OTHER; note = 2'-O-Methyl-cytidine
  modified_base 84: mod_base = OTHER; note = 2'-O-Methyl-adenosine
  modified_base 85: mod_base = OTHER; note = 2'-O-Methyl-cytidine
  modified_base 86: mod_base = OTHER; note = 2'-O-Methyl-cytidine
  modified_base 87: mod_base = OTHER; note = 2'-O-Methyl-guanosine
  modified_base 89: mod_base = OTHER; note = 2'-O-Methyl-guanosine
  modified_base 91: mod_base = OTHER; note = 2'-O-Methyl-cytidine
  modified_base 92: mod_base = OTHER; note = 2'-O-Methyl-guanosine
  modified_base 93: mod_base = OTHER; note = 2'-O-Methyl-guanosine
  modified_base 94: mod_base = OTHER; note = 2'-O-Methyl-uridine
  modified_base 95: mod_base = OTHER; note = 2'-O-Methyl-guanosine
  modified_base 96: mod_base = OTHER; note = 2'-O-Methyl-cytidine
  modified_base 97: mod_base = OTHER; note = 2'-O-Methyl-uridine
  modified_base 98: mod_base = OTHER; note = 2'-O-Methyl-uridine phosphorothioate
  modified_base 99: mod_base = OTHER; note = 2'-O-Methyl-uridine phosphorothioate
  modified_base 100: mod_base = OTHER; note = 2'-O-Methyl-uridine

SEQ ID NO: 1664 - RNA, 100 nt, synthetic construct; identical to SEQ ID NO: 55
  source 1..100: mol_type = other RNA; note = Description of Artificial Sequence: Synthetic polynucleotide
  modified_base 1: mod_base = OTHER; note = 2'-O-Methyl-cytidine phosphorothioate
  modified_base 2: mod_base = OTHER; note = 2'-O-Methyl-adenosine phosphorothioate
  modified_base 3: mod_base = OTHER; note = 2'-O-Methyl-guanosine phosphorothioate
  modified_base 21: mod_base = OTHER; note = 2'-O-Methyl-guanosine
  modified_base 25: mod_base = OTHER; note = uridine phosphorothioate
  modified_base 28: mod_base = OTHER; note = 2'-O-Methyl-adenosine
  modified_base 29: mod_base = OTHER; note = 2'-O-Methyl-guanosine
  modified_base 30: mod_base = OTHER; note = 2'-O-Methyl-cytidine
  modified_base 31: mod_base = OTHER; note = 2'-O-Methyl-uridine
  modified_base 32: mod_base = OTHER; note = 2'-O-Methyl-adenosine
  modified_base 34: mod_base = OTHER; note = 2'-O-Methyl-adenosine
  modified_base 35: mod_base = OTHER; note = 2'-O-Methyl-adenosine
  modified_base 36: mod_base = OTHER; note = 2'-O-Methyl-adenosine
  modified_base 37: mod_base = OTHER; note = 2'-O-Methyl-uridine
  modified_base 38: mod_base = OTHER; note = 2'-O-Methyl-adenosine
  modified_base 39: mod_base = OTHER; note = 2'-O-Methyl-guanosine
  modified_base 40: mod_base = OTHER; note = 2'-O-Methyl-cytidine
  modified_base 41: mod_base = OTHER; note = 2'-O-Methyl-adenosine
  modified_base 42: mod_base = OTHER; note = 2'-O-Methyl-adenosine
  modified_base 46: mod_base = OTHER; note = 2'-O-Methyl-adenosine
  modified_base 48: mod_base = OTHER; note = 2'-O-Methyl-adenosine
  modified_base 50: mod_base = OTHER; note = 2'-O-Methyl-uridine
  modified_base 52: mod_base = OTHER; note = 2'-O-Methyl-adenosine
  modified_base 53: mod_base = OTHER; note = 2'-O-Methyl-guanosine
  modified_base 54: mod_base = OTHER; note = 2'-O-Methyl-guanosine
  modified_base 57: mod_base = OTHER; note = 2'-O-Methyl-adenosine
  modified_base 61: mod_base = OTHER; note = 2'-O-Methyl-cytidine
  modified_base 66: mod_base = OTHER; note = 2'-O-Methyl-uridine
  modified_base 67: mod_base = OTHER; note = 2'-O-Methyl-cytidine
  modified_base 70: mod_base = OTHER; note = 2'-O-Methyl-cytidine
  modified_base 71: mod_base = OTHER; note = 2'-O-Methyl-uridine
  modified_base 72: mod_base = OTHER; note = 2'-O-Methyl-uridine
  modified_base 73: mod_base = OTHER; note = 2'-O-Methyl-guanosine
  modified_base 74: mod_base = OTHER; note = 2'-O-Methyl-adenosine
  modified_base 75: mod_base = OTHER; note = 2'-O-Methyl-adenosine
  modified_base 76: mod_base = OTHER; note = 2'-O-Methyl-adenosine
  modified_base 77: mod_base = OTHER; note = 2'-O-Methyl-adenosine
  modified_base 78: mod_base = OTHER; note = 2'-O-Methyl-adenosine
  modified_base 79: mod_base = OTHER; note = 2'-O-Methyl-guanosine
  modified_base 80: mod_base = OTHER; note = 2'-O-Methyl-uridine
  modified_base 82: mod_base = OTHER; note = 2'-O-Methyl-guanosine
  modified_base 83: mod_base = OTHER; note = 2'-O-Methyl-cytidine
  modified_base 84: mod_base = OTHER; note = 2'-O-Methyl-adenosine
  modified_base 85: mod_base = OTHER; note = 2'-O-Methyl-cytidine
  modified_base 86: mod_base = OTHER; note = 2'-O-Methyl-cytidine
  modified_base 87: mod_base = OTHER; note = 2'-O-Methyl-guanosine
  modified_base 89: mod_base = OTHER; note = 2'-O-Methyl-guanosine
  modified_base 92: mod_base = OTHER; note = 2'-O-Methyl-guanosine
  modified_base 93: mod_base = OTHER; note = 2'-O-Methyl-guanosine
  modified_base 94: mod_base = OTHER; note = 2'-O-Methyl-uridine
  modified_base 95: mod_base = OTHER; note = 2'-O-Methyl-guanosine
  modified_base 96: mod_base = OTHER; note = 2'-O-Methyl-cytidine
  modified_base 97: mod_base = OTHER; note = 2'-O-Methyl-uridine phosphorothioate
  modified_base 98: mod_base = OTHER; note = 2'-O-Methyl-uridine phosphorothioate
  modified_base 99: mod_base = OTHER; note = 2'-O-Methyl-uridine phosphorothioate
  modified_base 100: mod_base = OTHER; note = 2'-O-Methyl-uridine

SEQ ID NO: 1665 - RNA, 100 nt, synthetic construct; identical to SEQ ID NO: 421
  source 1..100: mol_type = other RNA; note = Description of Artificial Sequence: Synthetic polynucleotide
  modified_base 1: mod_base = OTHER; note = 2'-O-Methyl-cytidine phosphorothioate
  modified_base 2: mod_base = OTHER; note = 2'-O-Methyl-cytidine phosphorothioate
  modified_base 3: mod_base = OTHER; note = 2'-O-Methyl-cytidine phosphorothioate
  modified_base 21: mod_base = OTHER; note = 2'-O-Methyl-guanosine
  modified_base 28: mod_base = OTHER; note = 2'-O-Methyl-adenosine
  modified_base 29: mod_base = OTHER; note = 2'-O-Methyl-guanosine
  modified_base 30: mod_base = OTHER; note = 2'-O-Methyl-cytidine
  modified_base 31: mod_base = OTHER; note = 2'-O-Methyl-uridine
  modified_base 32: mod_base = OTHER; note = 2'-O-Methyl-adenosine
  modified_base 34: mod_base = OTHER; note = 2'-O-Methyl-adenosine
  modified_base 35: mod_base = OTHER; note = 2'-O-Methyl-adenosine
  modified_base 36: mod_base = OTHER; note = 2'-O-Methyl-adenosine
  modified_base 37: mod_base = OTHER; note = 2'-O-Methyl-uridine
  modified_base 38: mod_base = OTHER; note = 2'-O-Methyl-adenosine
  modified_base 39: mod_base = OTHER; note = 2'-O-Methyl-guanosine
  modified_base 40: mod_base = OTHER; note = 2'-O-Methyl-cytidine
  modified_base 41: mod_base = OTHER; note = 2'-O-Methyl-adenosine
  modified_base 42: mod_base = OTHER; note = 2'-O-Methyl-adenosine
  modified_base 45: mod_base = OTHER; note = uridine phosphorothioate
  modified_base 46: mod_base = OTHER; note = 2'-O-Methyl-adenosine
  modified_base 48: mod_base = OTHER; note = 2'-O-Methyl-adenosine
  modified_base 50: mod_base = OTHER; note = 2'-O-Methyl-uridine
  modified_base 52: mod_base = OTHER; note = 2'-O-Methyl-adenosine
  modified_base 53: mod_base = OTHER; note = 2'-O-Methyl-guanosine
  modified_base 54: mod_base = OTHER; note = 2'-O-Methyl-guanosine
  modified_base 57: mod_base = OTHER; note = 2'-O-Methyl-adenosine
  modified_base 61: mod_base = OTHER; note = 2'-O-Methyl-cytidine
  modified_base 64: mod_base = OTHER; note = uridine phosphorothioate
  modified_base 66: mod_base = OTHER; note = 2'-O-Methyl-uridine
  modified_base 67: mod_base = OTHER; note = 2'-O-Methyl-cytidine
  modified_base 70: mod_base = OTHER; note = 2'-O-Methyl-cytidine
  modified_base 71: mod_base = OTHER; note = 2'-O-Methyl-uridine
  modified_base 72: mod_base = OTHER; note = 2'-O-Methyl-uridine
  modified_base 74: mod_base = OTHER; note = 2'-O-Methyl-adenosine
  modified_base 75: mod_base = OTHER; note = 2'-O-Methyl-adenosine
  modified_base 76: mod_base = OTHER; note = 2'-O-Methyl-adenosine
  modified_base 77: mod_base = OTHER; note = 2'-O-Methyl-adenosine
  modified_base 78: mod_base = OTHER; note = 2'-O-Methyl-adenosine
  modified_base 79: mod_base = OTHER; note = 2'-O-Methyl-guanosine
  modified_base 80: mod_base = OTHER; note = 2'-O-Methyl-uridine
  modified_base 82: mod_base = OTHER; note = 2'-O-Methyl-guanosine
  modified_base 83: mod_base = OTHER; note = 2'-O-Methyl-cytidine
  modified_base 84: mod_base = OTHER; note = 2'-O-Methyl-adenosine
  modified_base 85: mod_base = OTHER; note = 2'-O-Methyl-cytidine
  modified_base 86: mod_base = OTHER; note = 2'-O-Methyl-cytidine
  modified_base 87: mod_base = OTHER; note = 2'-O-Methyl-guanosine
  modified_base 89: mod_base = OTHER; note = 2'-O-Methyl-guanosine
  modified_base 92: mod_base = OTHER; note = 2'-O-Methyl-guanosine
  modified_base 93: mod_base = OTHER; note = 2'-O-Methyl-guanosine
  modified_base 94: mod_base = OTHER; note = 2'-O-Methyl-uridine
  modified_base 95: mod_base = OTHER; note = 2'-O-Methyl-guanosine
  modified_base 96: mod_base = OTHER; note = 2'-O-Methyl-cytidine
  modified_base 97: mod_base = OTHER; note = 2'-O-Methyl-uridine
  modified_base 98: mod_base = OTHER; note = 2'-O-Methyl-uridine phosphorothioate
  modified_base 99: mod_base = OTHER; note = 2'-O-Methyl-uridine phosphorothioate
  modified_base 100: mod_base = OTHER; note = 2'-O-Methyl-uridine

SEQ ID NO: 1666 - RNA, 100 nt, synthetic construct; identical to SEQ ID NO: 422
  source 1..100: mol_type = other RNA; note = Description of Artificial Sequence: Synthetic polynucleotide
  modified_base 1: mod_base = OTHER; note = 2'-O-Methyl-guanosine phosphorothioate
  modified_base 2: mod_base = OTHER; note = 2'-O-Methyl-adenosine phosphorothioate
  modified_base 3: mod_base = OTHER; note = 2'-O-Methyl-guanosine phosphorothioate
  modified_base 21: mod_base = OTHER; note = 2'-O-Methyl-guanosine
  modified_base 28: mod_base = OTHER; note = 2'-O-Methyl-adenosine
  modified_base 29: mod_base = OTHER; note = 2'-O-Methyl-guanosine
  modified_base 30: mod_base = OTHER; note = 2'-O-Methyl-cytidine
  modified_base 31: mod_base = OTHER; note = 2'-O-Methyl-uridine
  modified_base 32: mod_base = OTHER; note = 2'-O-Methyl-adenosine
  modified_base 34: mod_base = OTHER; note = 2'-O-Methyl-adenosine
  modified_base 35: mod_base = OTHER; note = 2'-O-Methyl-adenosine
  modified_base 36: mod_base = OTHER; note = 2'-O-Methyl-adenosine
  modified_base 37: mod_base = OTHER; note = 2'-O-Methyl-uridine
  modified_base 38: mod_base = OTHER; note = 2'-O-Methyl-adenosine
  modified_base 39: mod_base = OTHER; note = 2'-O-Methyl-guanosine
  modified_base 40: mod_base = OTHER; note = 2'-O-Methyl-cytidine
  modified_base 41: mod_base = OTHER; note = 2'-O-Methyl-adenosine
  modified_base 42: mod_base = OTHER; note = 2'-O-Methyl-adenosine
  modified_base 45: mod_base = OTHER; note = uridine phosphorothioate
  modified_base 46: mod_base = OTHER; note = 2'-O-Methyl-adenosine
  modified_base 48: mod_base = OTHER; note = 2'-O-Methyl-adenosine
  modified_base 50: mod_base = OTHER; note = 2'-O-Methyl-uridine
  modified_base 52: mod_base = OTHER; note = 2'-O-Methyl-adenosine
  modified_base 53: mod_base = OTHER; note = 2'-O-Methyl-guanosine
  modified_base 54: mod_base = OTHER; note = 2'-O-Methyl-guanosine
  modified_base 57: mod_base = OTHER; note = 2'-O-Methyl-adenosine
  modified_base 61: mod_base = OTHER; note = 2'-O-Methyl-cytidine
  modified_base 64: mod_base = OTHER; note = uridine phosphorothioate
  modified_base 66: mod_base = OTHER; note = 2'-O-Methyl-uridine
  modified_base 67: mod_base = OTHER; note = 2'-O-Methyl-cytidine
  modified_base 70: mod_base = OTHER; note = 2'-O-Methyl-cytidine
  modified_base 71: mod_base = OTHER; note = 2'-O-Methyl-uridine
  modified_base 72: mod_base = OTHER; note = 2'-O-Methyl-uridine
  modified_base 74: mod_base = OTHER; note = 2'-O-Methyl-adenosine
  modified_base 75: mod_base = OTHER; note = 2'-O-Methyl-adenosine
  modified_base 76: mod_base = OTHER; note = 2'-O-Methyl-adenosine
  modified_base 77: mod_base = OTHER; note = 2'-O-Methyl-adenosine
  modified_base 78: mod_base = OTHER; note = 2'-O-Methyl-adenosine
  modified_base 79: mod_base = OTHER; note = 2'-O-Methyl-guanosine
  modified_base 80: mod_base = OTHER; note = 2'-O-Methyl-uridine
  modified_base 82: mod_base = OTHER; note = 2'-O-Methyl-guanosine
  modified_base 83: mod_base = OTHER; note = 2'-O-Methyl-cytidine
  modified_base 84: mod_base = OTHER; note = 2'-O-Methyl-adenosine
  modified_base 85: mod_base = OTHER; note = 2'-O-Methyl-cytidine
  modified_base 86: mod_base = OTHER; note = 2'-O-Methyl-cytidine
  modified_base 87: mod_base = OTHER; note = 2'-O-Methyl-guanosine
  modified_base 89: mod_base = OTHER; note = 2'-O-Methyl-guanosine
  modified_base 92: mod_base = OTHER; note = 2'-O-Methyl-guanosine
  modified_base 93: mod_base = OTHER; note = 2'-O-Methyl-guanosine
  modified_base 94: mod_base = OTHER; note = 2'-O-Methyl-uridine
  modified_base 95: mod_base = OTHER; note = 2'-O-Methyl-guanosine
  modified_base 96: mod_base = OTHER; note = 2'-O-Methyl-cytidine
  modified_base 97: mod_base = OTHER; note = 2'-O-Methyl-uridine
  modified_base 98: mod_base = OTHER; note = 2'-O-Methyl-uridine phosphorothioate
  modified_base 99: mod_base = OTHER; note = 2'-O-Methyl-uridine phosphorothioate
  modified_base 100: mod_base = OTHER; note = 2'-O-Methyl-uridine

SEQ ID NO: 1667 - RNA, 100 nt, synthetic construct; identical to SEQ ID NO: 55
  source 1..100: mol_type = other RNA; note = Description of Artificial Sequence: Synthetic polynucleotide
  modified_base 1: mod_base = OTHER; note = 2'-O-Methyl-cytidine phosphorothioate
  modified_base 2: mod_base = OTHER; note = 2'-O-Methyl-adenosine phosphorothioate
  modified_base 3: mod_base = OTHER; note = 2'-O-Methyl-guanosine phosphorothioate
  modified_base 21: mod_base = OTHER; note = 2'-O-Methyl-guanosine
  modified_base 28: mod_base = OTHER; note = 2'-O-Methyl-adenosine
  modified_base 29: mod_base = OTHER; note = 2'-O-Methyl-guanosine
  modified_base 30: mod_base = OTHER; note = 2'-O-Methyl-cytidine
  modified_base 31: mod_base = OTHER; note = 2'-O-Methyl-uridine
  modified_base 32: mod_base = OTHER; note = 2'-O-Methyl-adenosine
  modified_base 34: mod_base = OTHER; note = 2'-O-Methyl-adenosine
  modified_base 35: mod_base = OTHER; note = 2'-O-Methyl-adenosine
  modified_base 36: mod_base = OTHER; note = 2'-O-Methyl-adenosine
  modified_base 37: mod_base = OTHER; note = 2'-O-Methyl-uridine
  modified_base 38: mod_base = OTHER; note = 2'-O-Methyl-adenosine
  modified_base 39: mod_base = OTHER; note = 2'-O-Methyl-guanosine
  modified_base 40: mod_base = OTHER; note = 2'-O-Methyl-cytidine
  modified_base 41: mod_base = OTHER; note = 2'-O-Methyl-adenosine
  modified_base 42: mod_base = OTHER; note = 2'-O-Methyl-adenosine
  modified_base 45: mod_base = OTHER; note = uridine phosphorothioate
  modified_base 46: mod_base = OTHER; note = 2'-O-Methyl-adenosine
  modified_base 48: mod_base = OTHER; note = 2'-O-Methyl-adenosine
  modified_base 50: mod_base = OTHER; note = 2'-O-Methyl-uridine
  modified_base 52: mod_base = OTHER; note = 2'-O-Methyl-adenosine
  modified_base 53: mod_base = OTHER; note = 2'-O-Methyl-guanosine
  modified_base 54: mod_base = OTHER; note = 2'-O-Methyl-guanosine
  modified_base 55: mod_base = OTHER; note = 2'-O-Methyl-cytidine
  modified_base 56: mod_base = OTHER; note = 2'-O-Methyl-uridine
  modified_base 57: mod_base = OTHER; note = 2'-O-Methyl-adenosine
  modified_base 60: mod_base = OTHER; note = 2'-O-Methyl-cytidine
  modified_base 61: mod_base = OTHER; note = 2'-O-Methyl-cytidine
  modified_base 64: mod_base = OTHER; note = uridine phosphorothioate
  modified_base 66: mod_base = OTHER; note = 2'-O-Methyl-uridine
  modified_base 67: mod_base = OTHER; note = 2'-O-Methyl-cytidine
  modified_base 70: mod_base = OTHER; note = 2'-O-Methyl-cytidine
  modified_base 71: mod_base = OTHER; note = 2'-O-Methyl-uridine
  modified_base 72: mod_base = OTHER; note = 2'-O-Methyl-uridine
  modified_base 74: mod_base = OTHER; note = 2'-O-Methyl-adenosine
  modified_base 75: mod_base = OTHER; note = 2'-O-Methyl-adenosine
  modified_base 76: mod_base = OTHER; note = 2'-O-Methyl-adenosine
  modified_base 77: mod_base = OTHER; note = 2'-O-Methyl-adenosine
  modified_base 78: mod_base = OTHER; note = 2'-O-Methyl-adenosine
  modified_base 79: mod_base = OTHER; note = 2'-O-Methyl-guanosine
  modified_base 80: mod_base = OTHER; note = 2'-O-Methyl-uridine
  modified_base 81: mod_base = OTHER; note = 2'-O-Methyl-guanosine
  modified_base 83: mod_base = OTHER; note = 2'-O-Methyl-cytidine
  modified_base 84: mod_base = OTHER; note = 2'-O-Methyl-adenosine
  modified_base 85: mod_base = OTHER; note = 2'-O-Methyl-cytidine
  modified_base 86: mod_base = OTHER; note = 2'-O-Methyl-cytidine
  modified_base 87: mod_base = OTHER; note = 2'-O-Methyl-guanosine
  modified_base 88: mod_base = OTHER; note = 2'-O-Methyl-adenosine
  modified_base 89: mod_base = OTHER; note = 2'-O-Methyl-guanosine
  modified_base 90: mod_base = OTHER; note = 2'-O-Methyl-uridine
  modified_base 91: mod_base = OTHER; note = 2'-O-Methyl-cytidine
  modified_base 92: mod_base = OTHER; note = 2'-O-Methyl-guanosine
  modified_base 93: mod_base = OTHER; note = 2'-O-Methyl-guanosine
  modified_base 94: mod_base = OTHER; note = 2'-O-Methyl-uridine
  modified_base 95: mod_base = OTHER; note = 2'-O-Methyl-guanosine
  modified_base 96: mod_base = OTHER; note = 2'-O-Methyl-cytidine
  modified_base 97: mod_base = OTHER; note = 2'-O-Methyl-uridine
  modified_base 98: mod_base = OTHER; note = 2'-O-Methyl-uridine phosphorothioate
  modified_base 99: mod_base = OTHER; note = 2'-O-Methyl-uridine phosphorothioate
  modified_base 100: mod_base = OTHER; note = 2'-O-Methyl-uridine

SEQ ID NO: 1668 - RNA, 100 nt, synthetic construct; identical to SEQ ID NO: 55
  source 1..100: mol_type = other RNA; note = Description of Artificial Sequence: Synthetic polynucleotide
  modified_base 1: mod_base = OTHER; note = 2'-O-Methyl-cytidine phosphorothioate
  modified_base 2: mod_base = OTHER; note = 2'-O-Methyl-adenosine phosphorothioate
  modified_base 3: mod_base = OTHER; note = 2'-O-Methyl-guanosine phosphorothioate
  modified_base 21: mod_base = OTHER; note = 2'-O-Methyl-guanosine
  modified_base 28: mod_base = OTHER; note = 2'-O-Methyl-adenosine
  modified_base 29: mod_base = OTHER; note = 2'-O-Methyl-guanosine
  modified_base 30: mod_base = OTHER; note = 2'-O-Methyl-cytidine
  modified_base 31: mod_base = OTHER; note = 2'-O-Methyl-uridine
  modified_base 32: mod_base = OTHER; note = 2'-O-Methyl-adenosine
  modified_base 33: mod_base = OTHER; note = 2'-O-Methyl-guanosine
  modified_base 34: mod_base = OTHER; note = 2'-O-Methyl-adenosine
  modified_base 35: mod_base = OTHER; note = 2'-O-Methyl-adenosine
  modified_base 36: mod_base = OTHER; note = 2'-O-Methyl-adenosine
  modified_base 37: mod_base = OTHER; note = 2'-O-Methyl-uridine
  modified_base 38: mod_base = OTHER; note = 2'-O-Methyl-adenosine
  modified_base 39: mod_base = OTHER; note = 2'-O-Methyl-guanosine
  modified_base 40: mod_base = OTHER; note = 2'-O-Methyl-cytidine
  modified_base 41: mod_base = OTHER; note = 2'-O-Methyl-adenosine
  modified_base 42: mod_base = OTHER; note = 2'-O-Methyl-adenosine
  modified_base 45: mod_base = OTHER; note = uridine phosphorothioate
  modified_base 46: mod_base = OTHER; note = 2'-O-Methyl-adenosine
  modified_base 48: mod_base = OTHER; note = 2'-O-Methyl-adenosine
  modified_base 50: mod_base = OTHER; note = 2'-O-Methyl-uridine
  modified_base 52: mod_base = OTHER; note = 2'-O-Methyl-adenosine
  modified_base 53: mod_base = OTHER; note = 2'-O-Methyl-guanosine
  modified_base 54: mod_base = OTHER; note = 2'-O-Methyl-guanosine
  modified_base 57: mod_base = OTHER; note = 2'-O-Methyl-adenosine
  modified_base 61: mod_base = OTHER; note = 2'-O-Methyl-cytidine
  modified_base 64: mod_base = OTHER; note = uridine phosphorothioate
  modified_base 66: mod_base = OTHER; note = 2'-O-Methyl-uridine
  modified_base 67: mod_base = OTHER; note = 2'-O-Methyl-cytidine
  modified_base 70: mod_base = OTHER; note = 2'-O-Methyl-cytidine
  modified_base 71: mod_base = OTHER; note = 2'-O-Methyl-uridine
  modified_base 72: mod_base = OTHER; note = 2'-O-Methyl-uridine
  modified_base 73: mod_base = OTHER; note = 2'-O-Methyl-guanosine
  modified_base 74: mod_base = OTHER; note = 2'-O-Methyl-adenosine
  modified_base 75: mod_base = OTHER; note = 2'-O-Methyl-adenosine
  modified_base 76: mod_base = OTHER; note = 2'-O-Methyl-adenosine
  modified_base 77: mod_base = OTHER; note = 2'-O-Methyl-adenosine
  modified_base 78: mod_base = OTHER; note = 2'-O-Methyl-adenosine
  modified_base 79: mod_base = OTHER; note = 2'-O-Methyl-guanosine
  modified_base 80: mod_base = OTHER; note = 2'-O-Methyl-uridine
  modified_base 82: mod_base = OTHER; note = 2'-O-Methyl-guanosine
  modified_base 83: mod_base = OTHER; note = 2'-O-Methyl-cytidine
  modified_base 84: mod_base = OTHER; note = 2'-O-Methyl-adenosine
  modified_base 85: mod_base = OTHER; note = 2'-O-Methyl-cytidine
  modified_base 86: mod_base = OTHER; note = 2'-O-Methyl-cytidine
  modified_base 87: mod_base = OTHER; note = 2'-O-Methyl-guanosine
  modified_base 89: mod_base = OTHER; note = 2'-O-Methyl-guanosine
  modified_base 91: mod_base = OTHER; note = 2'-O-Methyl-cytidine
  modified_base 92: mod_base = OTHER; note = 2'-O-Methyl-guanosine
  modified_base 93: mod_base = OTHER; note = 2'-O-Methyl-guanosine
  modified_base 94: mod_base = OTHER; note = 2'-O-Methyl-uridine
  modified_base 95: mod_base = OTHER; note = 2'-O-Methyl-guanosine
  modified_base 96: mod_base = OTHER; note = 2'-O-Methyl-cytidine
  modified_base 97: mod_base = OTHER; note = 2'-O-Methyl-uridine phosphorothioate
  modified_base 98: mod_base = OTHER; note = 2'-O-Methyl-uridine phosphorothioate
  modified_base 99: mod_base = OTHER; note = 2'-O-Methyl-uridine phosphorothioate
  modified_base 100: mod_base = OTHER; note = 2'-O-Methyl-uridine

SEQ ID NO: 1669 - RNA, 100 nt, synthetic construct; identical to SEQ ID NO: 421
  source 1..100: mol_type = other RNA; note = Description of Artificial Sequence: Synthetic polynucleotide
  modified_base 1: mod_base = OTHER; note = 2'-O-Methyl-cytidine phosphorothioate
  modified_base 2: mod_base = OTHER; note = 2'-O-Methyl-cytidine phosphorothioate
  modified_base 3: mod_base = OTHER; note = 2'-O-Methyl-cytidine phosphorothioate
  modified_base 21: mod_base = OTHER; note = 2'-O-Methyl-guanosine
  modified_base 25: mod_base = OTHER; note = uridine phosphorothioate
  modified_base 28: mod_base = OTHER; note = 2'-O-Methyl-adenosine
  modified_base 29: mod_base = OTHER; note = 2'-O-Methyl-guanosine
  modified_base 30: mod_base = OTHER; note = 2'-O-Methyl-cytidine
  modified_base 31: mod_base = OTHER; note = 2'-O-Methyl-uridine
  modified_base 32: mod_base = OTHER; note = 2'-O-Methyl-adenosine
  modified_base 34: mod_base = OTHER; note = 2'-O-Methyl-adenosine
  modified_base 35: mod_base = OTHER; note = 2'-O-Methyl-adenosine
  modified_base 36: mod_base = OTHER; note = 2'-O-Methyl-adenosine
  modified_base 37: mod_base = OTHER; note = 2'-O-Methyl-uridine
  modified_base 38: mod_base = OTHER; note = 2'-O-Methyl-adenosine
  modified_base 39: mod_base = OTHER; note = 2'-O-Methyl-guanosine
  modified_base 40: mod_base = OTHER; note = 2'-O-Methyl-cytidine
  modified_base 41: mod_base = OTHER; note = 2'-O-Methyl-adenosine
  modified_base 42: mod_base = OTHER; note = 2'-O-Methyl-adenosine
  modified_base 45: mod_base = OTHER; note = uridine phosphorothioate
  modified_base 46: mod_base = OTHER; note = 2'-O-Methyl-adenosine
  modified_base 48: mod_base = OTHER; note = 2'-O-Methyl-adenosine
  modified_base 50: mod_base = OTHER; note = 2'-O-Methyl-uridine
  modified_base 52: mod_base = OTHER; note = 2'-O-Methyl-adenosine
  modified_base 53: mod_base = OTHER; note = 2'-O-Methyl-guanosine
  modified_base 54: mod_base = OTHER; note = 2'-O-Methyl-guanosine
  modified_base 57: mod_base = OTHER; note = 2'-O-Methyl-adenosine
  modified_base 61: mod_base = OTHER; note = 2'-O-Methyl-cytidine
  modified_base 66: mod_base = OTHER; note = 2'-O-Methyl-uridine
  modified_base 67: mod_base = OTHER; note = 2'-O-Methyl-cytidine
  modified_base 70: mod_base = OTHER; note = 2'-O-Methyl-cytidine
  modified_base 71: mod_base = OTHER; note = 2'-O-Methyl-uridine
  modified_base 72: mod_base = OTHER; note = 2'-O-Methyl-uridine
  modified_base 74: mod_base = OTHER; note = 2'-O-Methyl-adenosine
  modified_base 75: mod_base = OTHER; note = 2'-O-Methyl-adenosine
  modified_base 76: mod_base = OTHER; note = 2'-O-Methyl-adenosine
  modified_base 77: mod_base = OTHER; note = 2'-O-Methyl-adenosine
  modified_base 78: mod_base = OTHER; note = 2'-O-Methyl-adenosine
  modified_base 79: mod_base = OTHER; note = 2'-O-Methyl-guanosine
  modified_base 80: mod_base = OTHER; note = 2'-O-Methyl-uridine
  modified_base 82: mod_base = OTHER; note = 2'-O-Methyl-guanosine
  modified_base 83: mod_base = OTHER; note = 2'-O-Methyl-cytidine
  modified_base 84: mod_base = OTHER; note = 2'-O-Methyl-adenosine
  modified_base 85: mod_base = OTHER; note = 2'-O-Methyl-cytidine
  modified_base 86: mod_base = OTHER; note = 2'-O-Methyl-cytidine
  modified_base 87: mod_base = OTHER; note = 2'-O-Methyl-guanosine
  modified_base 89: mod_base = OTHER; note = 2'-O-Methyl-guanosine
  modified_base 92: mod_base = OTHER; note = 2'-O-Methyl-guanosine
  modified_base 93: mod_base = OTHER; note = 2'-O-Methyl-guanosine
  modified_base 94: mod_base = OTHER; note = 2'-O-Methyl-uridine
  modified_base 95: mod_base = OTHER; note = 2'-O-Methyl-guanosine
  modified_base 96: mod_base = OTHER; note = 2'-O-Methyl-cytidine
  modified_base 97: mod_base = OTHER; note = 2'-O-Methyl-uridine
  modified_base 98: mod_base = OTHER; note = 2'-O-Methyl-uridine phosphorothioate
  modified_base 99: mod_base = OTHER; note = 2'-O-Methyl-uridine phosphorothioate
  modified_base 100: mod_base = OTHER; note = 2'-O-Methyl-uridine

SEQ ID NO: 1670 - RNA, 100 nt, synthetic construct; identical to SEQ ID NO: 422
  source 1..100: mol_type = other RNA; note = Description of Artificial Sequence: Synthetic polynucleotide
  modified_base 1: mod_base = OTHER; note = 2'-O-Methyl-guanosine phosphorothioate
  modified_base 2: mod_base = OTHER; note = 2'-O-Methyl-adenosine phosphorothioate
  modified_base 3: mod_base = OTHER; note = 2'-O-Methyl-guanosine phosphorothioate
  modified_base 21: mod_base = OTHER; note = 2'-O-Methyl-guanosine
  modified_base 25: mod_base = OTHER; note = uridine phosphorothioate
  modified_base 28: mod_base = OTHER; note = 2'-O-Methyl-adenosine
  modified_base 29: mod_base = OTHER; note = 2'-O-Methyl-guanosine
  modified_base 30: mod_base = OTHER; note = 2'-O-Methyl-cytidine
  modified_base 31: mod_base = OTHER; note = 2'-O-Methyl-uridine
  modified_base 32: mod_base = OTHER; note = 2'-O-Methyl-adenosine
  modified_base 34: mod_base = OTHER; note = 2'-O-Methyl-adenosine
  modified_base 35: mod_base = OTHER; note = 2'-O-Methyl-adenosine
  modified_base 36: mod_base = OTHER; note = 2'-O-Methyl-adenosine
  modified_base 37: mod_base = OTHER; note = 2'-O-Methyl-uridine
  modified_base 38: mod_base = OTHER; note = 2'-O-Methyl-adenosine
  modified_base 39: mod_base = OTHER; note = 2'-O-Methyl-guanosine
  modified_base 40: mod_base = OTHER; note = 2'-O-Methyl-cytidine
  modified_base 41: mod_base = OTHER; note = 2'-O-Methyl-adenosine
  modified_base 42: mod_base = OTHER; note = 2'-O-Methyl-adenosine
  modified_base 45: mod_base = OTHER; note = uridine phosphorothioate
  modified_base 46: mod_base = OTHER; note = 2'-O-Methyl-adenosine
  modified_base 48: mod_base = OTHER; note = 2'-O-Methyl-adenosine
  modified_base 50: mod_base = OTHER; note = 2'-O-Methyl-uridine
  modified_base 52: mod_base = OTHER; note = 2'-O-Methyl-adenosine
  modified_base 53: mod_base = OTHER; note = 2'-O-Methyl-guanosine
  modified_base 54: mod_base = OTHER; note = 2'-O-Methyl-guanosine
  modified_base 57: mod_base = OTHER; note = 2'-O-Methyl-adenosine
  modified_base 61: mod_base = OTHER; note = 2'-O-Methyl-cytidine
  modified_base 66: mod_base = OTHER; note = 2'-O-Methyl-uridine
  modified_base 67: mod_base = OTHER; note = 2'-O-Methyl-cytidine
  modified_base 70: mod_base = OTHER; note = 2'-O-Methyl-cytidine
  modified_base 71: mod_base = OTHER; note = 2'-O-Methyl-uridine
  modified_base 72: mod_base = OTHER; note = 2'-O-Methyl-uridine
  modified_base 74: mod_base = OTHER; note = 2'-O-Methyl-adenosine
  modified_base 75: mod_base = OTHER; note = 2'-O-Methyl-adenosine
  modified_base 76: mod_base = OTHER; note = 2'-O-Methyl-adenosine
  modified_base 77: mod_base = OTHER; note = 2'-O-Methyl-adenosine
  modified_base 78: mod_base = OTHER; note = 2'-O-Methyl-adenosine
  modified_base 79: mod_base = OTHER; note = 2'-O-Methyl-guanosine
  modified_base 80: mod_base = OTHER; note = 2'-O-Methyl-uridine
  modified_base 82: mod_base = OTHER; note = 2'-O-Methyl-guanosine
  modified_base 83: mod_base = OTHER; note = 2'-O-Methyl-cytidine
  modified_base 84: mod_base = OTHER; note = 2'-O-Methyl-adenosine
  modified_base 85: mod_base = OTHER; note = 2'-O-Methyl-cytidine
  modified_base 86: mod_base = OTHER; note = 2'-O-Methyl-cytidine
  modified_base 87: mod_base = OTHER; note = 2'-O-Methyl-guanosine
  modified_base 89: mod_base = OTHER; note = 2'-O-Methyl-guanosine
  modified_base 92: mod_base = OTHER; note = 2'-O-Methyl-guanosine
  modified_base 93: mod_base = OTHER; note = 2'-O-Methyl-guanosine
  modified_base 94: mod_base = OTHER; note = 2'-O-Methyl-uridine
  modified_base 95: mod_base = OTHER; note = 2'-O-Methyl-guanosine
  modified_base 96: mod_base = OTHER; note = 2'-O-Methyl-cytidine
  modified_base 97: mod_base = OTHER; note = 2'-O-Methyl-uridine
  modified_base 98: mod_base = OTHER; note = 2'-O-Methyl-uridine phosphorothioate
  modified_base 99: mod_base = OTHER; note = 2'-O-Methyl-uridine phosphorothioate
  modified_base 100: mod_base = OTHER; note = 2'-O-Methyl-uridine

SEQ ID NO: 1671 - RNA, 100 nt, synthetic construct; identical to SEQ ID NO: 55
  source 1..100: mol_type = other RNA; note = Description of Artificial Sequence: Synthetic polynucleotide
  modified_base 1: mod_base = OTHER; note = 2'-O-Methyl-cytidine phosphorothioate
  modified_base 2: mod_base = OTHER; note = 2'-O-Methyl-adenosine phosphorothioate
  modified_base 3: mod_base = OTHER; note = 2'-O-Methyl-guanosine phosphorothioate
  modified_base 21: mod_base = OTHER; note = 2'-O-Methyl-guanosine
  modified_base 25: mod_base = OTHER; note = uridine phosphorothioate
  modified_base 28: mod_base = OTHER; note = 2'-O-Methyl-adenosine
  modified_base 29: mod_base = OTHER; note = 2'-O-Methyl-guanosine
  modified_base 30: mod_base = OTHER; note = 2'-O-Methyl-cytidine
  modified_base 31: mod_base = OTHER; note = 2'-O-Methyl-uridine
  modified_base 32: mod_base = OTHER; note = 2'-O-Methyl-adenosine
  modified_base 34: mod_base = OTHER; note = 2'-O-Methyl-adenosine
  modified_base 35: mod_base = OTHER; note = 2'-O-Methyl-adenosine
  modified_base 36: mod_base = OTHER; note = 2'-O-Methyl-adenosine
  modified_base 37: mod_base = OTHER; note = 2'-O-Methyl-uridine
  modified_base 38: mod_base = OTHER; note = 2'-O-Methyl-adenosine
  modified_base 39: mod_base = OTHER; note = 2'-O-Methyl-guanosine
  modified_base 40: mod_base = OTHER; note = 2'-O-Methyl-cytidine
  modified_base 41: mod_base = OTHER; note = 2'-O-Methyl-adenosine
  modified_base 42: mod_base = OTHER; note = 2'-O-Methyl-adenosine
  modified_base 45: mod_base = OTHER; note = uridine phosphorothioate
  modified_base 46: mod_base = OTHER; note = 2'-O-Methyl-adenosine
  modified_base 48: mod_base = OTHER; note = 2'-O-Methyl-adenosine
  modified_base 50: mod_base = OTHER; note = 2'-O-Methyl-uridine
  modified_base 52: mod_base = OTHER; note = 2'-O-Methyl-adenosine
  modified_base 53: mod_base = OTHER; note = 2'-O-Methyl-guanosine
  modified_base 54: mod_base = OTHER; note = 2'-O-Methyl-guanosine
  modified_base 55: mod_base = OTHER; note = 2'-O-Methyl-cytidine
  modified_base 56: mod_base = OTHER; note = 2'-O-Methyl-uridine
  modified_base 57: mod_base = OTHER; note = 2'-O-Methyl-adenosine
  modified_base 60: mod_base = OTHER; note = 2'-O-Methyl-cytidine
  modified_base 61: mod_base = OTHER; note = 2'-O-Methyl-cytidine
  modified_base 66: mod_base = OTHER; note = 2'-O-Methyl-uridine
  modified_base 67: mod_base = OTHER; note = 2'-O-Methyl-cytidine
  modified_base 70: mod_base = OTHER; note = 2'-O-Methyl-cytidine
  modified_base 71: mod_base = OTHER; note = 2'-O-Methyl-uridine
  modified_base 72: mod_base = OTHER; note = 2'-O-Methyl-uridine
  modified_base 74: mod_base = OTHER; note = 2'-O-Methyl-adenosine
  modified_base 75: mod_base = OTHER; note = 2'-O-Methyl-adenosine
  modified_base 76: mod_base = OTHER; note = 2'-O-Methyl-adenosine
  modified_base 77: mod_base = OTHER; note = 2'-O-Methyl-adenosine
  modified_base 78: mod_base = OTHER; note = 2'-O-Methyl-adenosine
  modified_base 79: mod_base = OTHER; note = 2'-O-Methyl-guanosine
  modified_base 80: mod_base = OTHER; note = 2'-O-Methyl-uridine
  modified_base 81: mod_base = OTHER; note = 2'-O-Methyl-guanosine
  modified_base 83: mod_base = OTHER; note = 2'-O-Methyl-cytidine
  modified_base 84: mod_base = OTHER; note = 2'-O-Methyl-adenosine
  modified_base 85: mod_base = OTHER; note = 2'-O-Methyl-cytidine
  modified_base 86: mod_base = OTHER; note = 2'-O-Methyl-cytidine
  modified_base 87: mod_base = OTHER; note = 2'-O-Methyl-guanosine
  modified_base 88: mod_base = OTHER; note = 2'-O-Methyl-adenosine
  modified_base 89: mod_base = OTHER; note = 2'-O-Methyl-guanosine
  modified_base 90: mod_base = OTHER; note = 2'-O-Methyl-uridine
  modified_base 91: mod_base = OTHER; note = 2'-O-Methyl-cytidine
  modified_base 92: mod_base = OTHER; note = 2'-O-Methyl-guanosine
  modified_base 93: mod_base = OTHER; note = 2'-O-Methyl-guanosine
  modified_base 94: mod_base = OTHER; note = 2'-O-Methyl-uridine
  modified_base 95: mod_base = OTHER; note = 2'-O-Methyl-guanosine
  modified_base 96: mod_base = OTHER; note = 2'-O-Methyl-cytidine
  modified_base 97: mod_base = OTHER; note = 2'-O-Methyl-uridine
  modified_base 98: mod_base = OTHER; note = 2'-O-Methyl-uridine phosphorothioate
  modified_base 99: mod_base = OTHER; note = 2'-O-Methyl-uridine phosphorothioate
  modified_base 100: mod_base = OTHER; note = 2'-O-Methyl-uridine

SEQ ID NO: 1672 - RNA, 100 nt, synthetic construct; identical to SEQ ID NO: 55
  source 1..100: mol_type = other RNA; note = Description of Artificial Sequence: Synthetic polynucleotide
  modified_base 1: mod_base = OTHER; note = 2'-O-Methyl-cytidine phosphorothioate
  modified_base 2: mod_base = OTHER; note = 2'-O-Methyl-adenosine phosphorothioate
  modified_base 3: mod_base = OTHER; note = 2'-O-Methyl-guanosine phosphorothioate
  modified_base 21: mod_base = OTHER; note = 2'-O-Methyl-guanosine
  modified_base 25: mod_base = OTHER; note = uridine phosphorothioate
  modified_base 28: mod_base = OTHER; note = 2'-O-Methyl-adenosine
  modified_base 29: mod_base = OTHER; note = 2'-O-Methyl-guanosine
  modified_base 30: mod_base = OTHER; note = 2'-O-Methyl-cytidine
  modified_base 31: mod_base = OTHER; note = 2'-O-Methyl-uridine
  modified_base 32: mod_base = OTHER; note = 2'-O-Methyl-adenosine
  modified_base 33: mod_base = OTHER; note = 2'-O-Methyl-guanosine
  modified_base 34: mod_base = OTHER; note = 2'-O-Methyl-adenosine
  modified_base 35: mod_base = OTHER; note = 2'-O-Methyl-adenosine
  modified_base 36: mod_base = OTHER; note = 2'-O-Methyl-adenosine
  modified_base 37: mod_base = OTHER; note = 2'-O-Methyl-uridine
  modified_base 38: mod_base = OTHER; note = 2'-O-Methyl-adenosine
  modified_base 39: mod_base = OTHER; note = 2'-O-Methyl-guanosine
  modified_base 40: mod_base = OTHER; note = 2'-O-Methyl-cytidine
  modified_base 41: mod_base = OTHER; note = 2'-O-Methyl-adenosine
  modified_base 42: mod_base = OTHER; note = 2'-O-Methyl-adenosine
  modified_base 45: mod_base = OTHER; note = uridine phosphorothioate
  modified_base 46: mod_base = OTHER; note = 2'-O-Methyl-adenosine
  modified_base 48: mod_base = OTHER; note = 2'-O-Methyl-adenosine
  modified_base 50: mod_base = OTHER; note = 2'-O-Methyl-uridine
  modified_base 52: mod_base = OTHER; note = 2'-O-Methyl-adenosine
  modified_base 53: mod_base = OTHER; note = 2'-O-Methyl-guanosine
  modified_base 54: mod_base = OTHER; note = 2'-O-Methyl-guanosine
  modified_base 55: mod_base = OTHER; note = 2'-O-Methyl-cytidine
  modified_base 56: mod_base = OTHER; note = 2'-O-Methyl-uridine
  modified_base 57: mod_base = OTHER; note = 2'-O-Methyl-adenosine
  modified_base 60: mod_base = OTHER; note = 2'-O-Methyl-cytidine
  modified_base 61: mod_base = OTHER; note = 2'-O-Methyl-cytidine
  modified_base 66: mod_base = OTHER; note = 2'-O-Methyl-uridine
  modified_base 67: mod_base = OTHER; note = 2'-O-Methyl-cytidine
  modified_base 70: mod_base = OTHER; note = 2'-O-Methyl-cytidine
  modified_base 71: mod_base = OTHER; note = 2'-O-Methyl-uridine
  modified_base 72: mod_base = OTHER; note = 2'-O-Methyl-uridine
  modified_base 74: mod_base = OTHER; note = 2'-O-Methyl-adenosine
  modified_base 75: mod_base = OTHER; note = 2'-O-Methyl-adenosine
  modified_base 76: mod_base = OTHER; note = 2'-O-Methyl-adenosine
  modified_base 77: mod_base = OTHER; note = 2'-O-Methyl-adenosine
  modified_base 78: mod_base = OTHER; note = 2'-O-Methyl-adenosine
  modified_base 79: mod_base = OTHER; note = 2'-O-Methyl-guanosine
  modified_base 80: mod_base = OTHER; note = 2'-O-Methyl-uridine
  modified_base 82: mod_base = OTHER; note = 2'-O-Methyl-guanosine
  modified_base 83: mod_base = OTHER; note = 2'-O-Methyl-cytidine
  modified_base 84: mod_base = OTHER; note = 2'-O-Methyl-adenosine
  modified_base 85: mod_base = OTHER; note = 2'-O-Methyl-cytidine
  modified_base 86: mod_base = OTHER; note = 2'-O-Methyl-cytidine
  modified_base 87: mod_base = OTHER; note = 2'-O-Methyl-guanosine
  modified_base 89: mod_base = OTHER; note = 2'-O-Methyl-guanosine
  modified_base 92: mod_base = OTHER; note = 2'-O-Methyl-guanosine
  modified_base 93: mod_base = OTHER; note = 2'-O-Methyl-guanosine
  modified_base 94: mod_base = OTHER; note = 2'-O-Methyl-uridine
  modified_base 95: mod_base = OTHER; note = 2'-O-Methyl-guanosine
  modified_base 96: mod_base = OTHER; note = 2'-O-Methyl-cytidine
  modified_base 97: mod_base = OTHER; note = 2'-O-Methyl-uridine phosphorothioate
  modified_base 98: mod_base = OTHER; note = 2'-O-Methyl-uridine phosphorothioate
  modified_base 99: mod_base = OTHER; note = 2'-O-Methyl-uridine phosphorothioate
  modified_base 100: mod_base = OTHER; note = 2'-O-Methyl-uridine

SEQ ID NO: 1673 - RNA, 100 nt, synthetic construct; identical to SEQ ID NO: 421
  source 1..100: mol_type = other RNA; note = Description of Artificial Sequence: Synthetic polynucleotide
  modified_base 1: mod_base = OTHER; note = 2'-O-Methyl-cytidine phosphorothioate
  modified_base 2: mod_base = OTHER; note = 2'-O-Methyl-cytidine phosphorothioate
  modified_base 3: mod_base = OTHER; note = 2'-O-Methyl-cytidine phosphorothioate
  modified_base 21: mod_base = OTHER; note = 2'-O-Methyl-guanosine
  modified_base 25: mod_base = OTHER; note = uridine phosphorothioate
  modified_base 28: mod_base = OTHER; note = 2'-O-Methyl-adenosine
  modified_base 29: mod_base = OTHER; note = 2'-O-Methyl-guanosine
  modified_base 30: mod_base = OTHER; note = 2'-O-Methyl-cytidine
  modified_base 31: mod_base = OTHER; note = 2'-O-Methyl-uridine
  modified_base 32: mod_base = OTHER; note = 2'-O-Methyl-adenosine
  modified_base 34: mod_base = OTHER; note = 2'-O-Methyl-adenosine
  modified_base 35: mod_base = OTHER; note = 2'-O-Methyl-adenosine
  modified_base 36: mod_base = OTHER; note = 2'-O-Methyl-adenosine
  modified_base 37: mod_base = OTHER; note = 2'-O-Methyl-uridine
  modified_base 38: mod_base = OTHER; note = 2'-O-Methyl-adenosine
  modified_base 39: mod_base = OTHER; note = 2'-O-Methyl-guanosine
  modified_base 40: mod_base = OTHER; note = 2'-O-Methyl-cytidine
  modified_base 41: mod_base = OTHER; note = 2'-O-Methyl-adenosine
  modified_base 42: mod_base = OTHER; note = 2'-O-Methyl-adenosine
  modified_base 46: mod_base = OTHER; note = 2'-O-Methyl-adenosine
  modified_base 48: mod_base = OTHER; note = 2'-O-Methyl-adenosine
  modified_base 50: mod_base = OTHER; note = 2'-O-Methyl-uridine
  modified_base 52: mod_base = OTHER; note = 2'-O-Methyl-adenosine
  modified_base 53: mod_base = OTHER; note = 2'-O-Methyl-guanosine
  modified_base 54: mod_base = OTHER; note = 2'-O-Methyl-guanosine
  modified_base 57: mod_base = OTHER; note = 2'-O-Methyl-adenosine
  modified_base 61: mod_base = OTHER; note = 2'-O-Methyl-cytidine
  modified_base 64: mod_base = OTHER; note = uridine phosphorothioate
  modified_base 66: mod_base = OTHER; note = 2'-O-Methyl-uridine
  modified_base 67: mod_base = OTHER; note = 2'-O-Methyl-cytidine
  modified_base 70: mod_base = OTHER; note = 2'-O-Methyl-cytidine
  modified_base 71: mod_base = OTHER; note = 2'-O-Methyl-uridine
  modified_base 72: mod_base = OTHER; note = 2'-O-Methyl-uridine
  modified_base 74: mod_base = OTHER; note = 2'-O-Methyl-adenosine
  modified_base 75: mod_base = OTHER; note = 2'-O-Methyl-adenosine
  modified_base 76: mod_base = OTHER; note = 2'-O-Methyl-adenosine
  modified_base 77: mod_base = OTHER; note = 2'-O-Methyl-adenosine
  modified_base 78: mod_base = OTHER; note = 2'-O-Methyl-adenosine
  modified_base 79: mod_base = OTHER; note = 2'-O-Methyl-guanosine
  modified_base 80: mod_base = OTHER; note = 2'-O-Methyl-uridine
  modified_base 82: mod_base = OTHER; note = 2'-O-Methyl-guanosine
  modified_base 83: mod_base = OTHER; note = 2'-O-Methyl-cytidine
  modified_base 84: mod_base = OTHER; note = 2'-O-Methyl-adenosine
  modified_base 85: mod_base = OTHER; note = 2'-O-Methyl-cytidine
  modified_base 86: mod_base = OTHER; note = 2'-O-Methyl-cytidine
  modified_base 87: mod_base = OTHER; note = 2'-O-Methyl-guanosine
  modified_base 89: mod_base = OTHER; note = 2'-O-Methyl-guanosine
  modified_base 92: mod_base = OTHER; note = 2'-O-Methyl-guanosine
  modified_base 93: mod_base = OTHER; note = 2'-O-Methyl-guanosine
  modified_base 94: mod_base = OTHER; note = 2'-O-Methyl-uridine
  modified_base 95: mod_base = OTHER; note = 2'-O-Methyl-guanosine
  modified_base 96: mod_base = OTHER; note = 2'-O-Methyl-cytidine
  modified_base 97: mod_base = OTHER; note = 2'-O-Methyl-uridine
  modified_base 98: mod_base = OTHER; note = 2'-O-Methyl-uridine phosphorothioate
  modified_base 99: mod_base = OTHER; note = 2'-O-Methyl-uridine phosphorothioate
  modified_base 100: mod_base = OTHER; note = 2'-O-Methyl-uridine

SEQ ID NO: 1674 - RNA, 100 nt, synthetic construct; identical to SEQ ID NO: 422
  source 1..100: mol_type = other RNA; note = Description of Artificial Sequence: Synthetic polynucleotide
  modified_base 1: mod_base = OTHER; note = 2'-O-Methyl-guanosine phosphorothioate
  modified_base 2: mod_base = OTHER; note = 2'-O-Methyl-adenosine phosphorothioate
  modified_base 3: mod_base = OTHER; note = 2'-O-Methyl-guanosine phosphorothioate
  modified_base 21: mod_base = OTHER; note = 2'-O-Methyl-guanosine
  modified_base 25: mod_base = OTHER; note = uridine phosphorothioate
  modified_base 28: mod_base = OTHER; note = 2'-O-Methyl-adenosine
  modified_base 29: mod_base = OTHER; note = 2'-O-Methyl-guanosine
  modified_base 30: mod_base = OTHER; note = 2'-O-Methyl-cytidine
  modified_base 31: mod_base = OTHER; note = 2'-O-Methyl-uridine
  modified_base 32: mod_base = OTHER; note = 2'-O-Methyl-adenosine
  modified_base 34: mod_base = OTHER; note = 2'-O-Methyl-adenosine
  modified_base 35: mod_base = OTHER; note = 2'-O-Methyl-adenosine
  modified_base 36: mod_base = OTHER; note = 2'-O-Methyl-adenosine
  modified_base 37: mod_base = OTHER; note = 2'-O-Methyl-uridine
  modified_base 38: mod_base = OTHER; note = 2'-O-Methyl-adenosine
  modified_base 39: mod_base = OTHER; note = 2'-O-Methyl-guanosine
  modified_base 40: mod_base = OTHER; note = 2'-O-Methyl-cytidine
  modified_base 41: mod_base = OTHER; note = 2'-O-Methyl-adenosine
  modified_base 42: mod_base = OTHER; note = 2'-O-Methyl-adenosine
  modified_base 46: mod_base = OTHER; note = 2'-O-Methyl-adenosine
  modified_base 48: mod_base = OTHER; note = 2'-O-Methyl-adenosine
  modified_base 50: mod_base = OTHER; note = 2'-O-Methyl-uridine
  modified_base 52: mod_base = OTHER; note = 2'-O-Methyl-adenosine
  modified_base 53: mod_base = OTHER; note = 2'-O-Methyl-guanosine
  modified_base 54: mod_base = OTHER; note = 2'-O-Methyl-guanosine
  modified_base 57: mod_base = OTHER; note = 2'-O-Methyl-adenosine
  modified_base 61: mod_base = OTHER; note = 2'-O-Methyl-cytidine
  modified_base 64: mod_base = OTHER; note = uridine phosphorothioate
  modified_base 66: mod_base = OTHER; note = 2'-O-Methyl-uridine
  modified_base 67: mod_base = OTHER; note = 2'-O-Methyl-cytidine
  modified_base 70: mod_base = OTHER; note = 2'-O-Methyl-cytidine
  modified_base 71: mod_base = OTHER; note = 2'-O-Methyl-uridine
  modified_base 72: mod_base = OTHER; note = 2'-O-Methyl-uridine
  modified_base 74: mod_base = OTHER; note = 2'-O-Methyl-adenosine
  modified_base 75: mod_base = OTHER; note = 2'-O-Methyl-adenosine
  modified_base 76: mod_base = OTHER; note = 2'-O-Methyl-adenosine
  modified_base 77: mod_base = OTHER; note = 2'-O-Methyl-adenosine
  modified_base 78: mod_base = OTHER; note = 2'-O-Methyl-adenosine
  modified_base 79: mod_base = OTHER; note = 2'-O-Methyl-guanosine
  modified_base 80: mod_base = OTHER; note = 2'-O-Methyl-uridine
  modified_base 82: mod_base = OTHER; note = 2'-O-Methyl-guanosine
  modified_base 83: mod_base = OTHER; note = 2'-O-Methyl-cytidine
  modified_base 84: mod_base = OTHER; note = 2'-O-Methyl-adenosine
  modified_base 85: mod_base = OTHER; note = 2'-O-Methyl-cytidine
  modified_base 86: mod_base = OTHER; note = 2'-O-Methyl-cytidine
  modified_base 87: mod_base = OTHER; note = 2'-O-Methyl-guanosine
  modified_base 89: mod_base = OTHER; note = 2'-O-Methyl-guanosine
  modified_base 92: mod_base = OTHER; note = 2'-O-Methyl-guanosine
  modified_base 93: mod_base = OTHER; note = 2'-O-Methyl-guanosine
  modified_base 94: mod_base = OTHER; note = 2'-O-Methyl-uridine
  modified_base 95: mod_base = OTHER; note = 2'-O-Methyl-guanosine
  modified_base 96: mod_base = OTHER; note = 2'-O-Methyl-cytidine
  modified_base 97: mod_base = OTHER; note = 2'-O-Methyl-uridine
  modified_base 98: mod_base = OTHER; note = 2'-O-Methyl-uridine phosphorothioate
  modified_base 99: mod_base = OTHER; note = 2'-O-Methyl-uridine phosphorothioate
  modified_base 100: mod_base = OTHER; note = 2'-O-Methyl-uridine

SEQ ID NO: 1675 - RNA, 100 nt, synthetic construct; identical to SEQ ID NO: 55
  source 1..100: mol_type = other RNA; note = Description of Artificial Sequence: Synthetic polynucleotide
  modified_base 1: mod_base = OTHER; note = 2'-O-Methyl-cytidine phosphorothioate
  modified_base 2: mod_base = OTHER; note = 2'-O-Methyl-adenosine phosphorothioate
  modified_base 3: mod_base = OTHER; note = 2'-O-Methyl-guanosine phosphorothioate
  modified_base 21: mod_base = OTHER; note = 2'-O-Methyl-guanosine
  modified_base 25: mod_base = OTHER; note = uridine phosphorothioate
  modified_base 28: mod_base = OTHER; note = 2'-O-Methyl-adenosine
  modified_base 29: mod_base = OTHER; note = 2'-O-Methyl-guanosine
  modified_base 30: mod_base = OTHER; note = 2'-O-Methyl-cytidine
  modified_base 31: mod_base = OTHER; note = 2'-O-Methyl-uridine
  modified_base 32: mod_base = OTHER; note = 2'-O-Methyl-adenosine
  modified_base 34: mod_base = OTHER; note = 2'-O-Methyl-adenosine
  modified_base 35: mod_base = OTHER; note = 2'-O-Methyl-adenosine
  modified_base 36: mod_base = OTHER; note = 2'-O-Methyl-adenosine
  modified_base 37: mod_base = OTHER; note = 2'-O-Methyl-uridine
  modified_base 38: mod_base = OTHER; note = 2'-O-Methyl-adenosine
  modified_base 39: mod_base = OTHER; note = 2'-O-Methyl-guanosine
  modified_base 40: mod_base = OTHER; note = 2'-O-Methyl-cytidine
  modified_base 41: mod_base = OTHER; note = 2'-O-Methyl-adenosine
  modified_base 42: mod_base = OTHER; note = 2'-O-Methyl-adenosine
  modified_base 46: mod_base = OTHER; note = 2'-O-Methyl-adenosine
  modified_base 48: mod_base = OTHER; note = 2'-O-Methyl-adenosine
  modified_base 50: mod_base = OTHER; note = 2'-O-Methyl-uridine
  modified_base 52: mod_base = OTHER; note = 2'-O-Methyl-adenosine
  modified_base 53: mod_base = OTHER; note = 2'-O-Methyl-guanosine
  modified_base 54: mod_base = OTHER; note = 2'-O-Methyl-guanosine
  modified_base 55: mod_base = OTHER; note = 2'-O-Methyl-cytidine
  modified_base 56: mod_base = OTHER; note = 2'-O-Methyl-uridine
  modified_base 57: mod_base = OTHER; note = 2'-O-Methyl-adenosine
  modified_base 60: mod_base = OTHER; note = 2'-O-Methyl-cytidine
  modified_base 61: mod_base = OTHER; note = 2'-O-Methyl-cytidine
  modified_base 64: mod_base = OTHER; note = uridine phosphorothioate
  modified_base 66: mod_base = OTHER; note = 2'-O-Methyl-uridine
  modified_base 67: mod_base = OTHER; note = 2'-O-Methyl-cytidine
  modified_base 70: mod_base = OTHER; note = 2'-O-Methyl-cytidine
  modified_base 71: mod_base = OTHER; note = 2'-O-Methyl-uridine
  modified_base 72: mod_base = OTHER; note = 2'-O-Methyl-uridine
  modified_base 74: mod_base = OTHER; note = 2'-O-Methyl-adenosine
  modified_base 75: mod_base = OTHER; note = 2'-O-Methyl-adenosine
  modified_base 76: mod_base = OTHER; note = 2'-O-Methyl-adenosine
  modified_base 77: mod_base = OTHER; note = 2'-O-Methyl-adenosine
  modified_base 78: mod_base = OTHER; note = 2'-O-Methyl-adenosine
  modified_base 79: mod_base = OTHER; note = 2'-O-Methyl-guanosine
  modified_base 80: mod_base = OTHER; note = 2'-O-Methyl-uridine
  modified_base 81: mod_base = OTHER; note = 2'-O-Methyl-guanosine
  modified_base 83: mod_base = OTHER; note = 2'-O-Methyl-cytidine
  modified_base 84: mod_base = OTHER; note = 2'-O-Methyl-adenosine
  modified_base 85: mod_base = OTHER; note = 2'-O-Methyl-cytidine
  modified_base 86: mod_base = OTHER; note = 2'-O-Methyl-cytidine
  modified_base 87: mod_base = OTHER; note = 2'-O-Methyl-guanosine
  modified_base 88: mod_base = OTHER; note = 2'-O-Methyl-adenosine
  modified_base 89: mod_base = OTHER; note = 2'-O-Methyl-guanosine
  modified_base 90: mod_base = OTHER; note = 2'-O-Methyl-uridine
  modified_base 91: mod_base = OTHER; note = 2'-O-Methyl-cytidine
  modified_base 92: mod_base = OTHER; note = 2'-O-Methyl-guanosine
  modified_base 93: mod_base = OTHER; note = 2'-O-Methyl-guanosine
  modified_base 94: mod_base = OTHER; note = 2'-O-Methyl-uridine
  modified_base 95: mod_base = OTHER; note = 2'-O-Methyl-guanosine
  modified_base 96: mod_base = OTHER; note = 2'-O-Methyl-cytidine
  modified_base 97: mod_base = OTHER; note = 2'-O-Methyl-uridine
  modified_base 98: mod_base = OTHER; note = 2'-O-Methyl-uridine phosphorothioate
  modified_base 99: mod_base = OTHER; note = 2'-O-Methyl-uridine phosphorothioate
  modified_base 100: mod_base = OTHER; note = 2'-O-Methyl-uridine

SEQ ID NO: 1676 - RNA, 100 nt, synthetic construct; identical to SEQ ID NO: 421
  source 1..100: mol_type = other RNA; note = Description of Artificial Sequence: Synthetic polynucleotide
  modified_base 1: mod_base = OTHER; note = 2'-O-Methyl-cytidine phosphorothioate
  modified_base 2: mod_base = OTHER; note = 2'-O-Methyl-cytidine phosphorothioate
  modified_base 3: mod_base = OTHER; note = 2'-O-Methyl-cytidine phosphorothioate
  modified_base 21: mod_base = OTHER; note = 2'-O-Methyl-guanosine
  modified_base 25: mod_base = OTHER; note = uridine phosphorothioate
  modified_base 28: mod_base = OTHER; note = 2'-O-Methyl-adenosine
  modified_base 29: mod_base = OTHER; note = 2'-O-Methyl-guanosine
  modified_base 30: mod_base = OTHER; note = 2'-O-Methyl-cytidine
  modified_base 31: mod_base = OTHER; note = 2'-O-Methyl-uridine
  modified_base 32: mod_base = OTHER; note = 2'-O-Methyl-adenosine
  modified_base 34: mod_base = OTHER; note = 2'-O-Methyl-adenosine
  modified_base 35: mod_base = OTHER; note = 2'-O-Methyl-adenosine
  modified_base 36: mod_base = OTHER; note = 2'-O-Methyl-adenosine
  modified_base 37: mod_base = OTHER; note = 2'-O-Methyl-uridine
  modified_base 38: mod_base = OTHER; note = 2'-O-Methyl-adenosine
  modified_base 39: mod_base = OTHER; note = 2'-O-Methyl-guanosine
  modified_base 40: mod_base = OTHER; note = 2'-O-Methyl-cytidine
  modified_base 41: mod_base = OTHER; note = 2'-O-Methyl-adenosine
  modified_base 42: mod_base = OTHER; note = 2'-O-Methyl-adenosine
  modified_base 45: mod_base = OTHER; note = uridine phosphorothioate
  modified_base 46: mod_base = OTHER; note = 2'-O-Methyl-adenosine
  modified_base 48: mod_base = OTHER; note = 2'-O-Methyl-adenosine
  modified_base 50: mod_base = OTHER; note = 2'-O-Methyl-uridine
  modified_base 52: mod_base = OTHER; note = 2'-O-Methyl-adenosine
  modified_base 53: mod_base = OTHER; note = 2'-O-Methyl-guanosine
  modified_base 54: mod_base = OTHER; note = 2'-O-Methyl-guanosine
  modified_base 57: mod_base = OTHER; note = 2'-O-Methyl-adenosine
  modified_base 61: mod_base = OTHER; note = 2'-O-Methyl-cytidine
  modified_base 64: mod_base = OTHER; note = uridine phosphorothioate
  modified_base 66: mod_base = OTHER; note = 2'-O-Methyl-uridine
  modified_base 67: mod_base = OTHER; note = 2'-O-Methyl-cytidine
  modified_base 70: mod_base = OTHER; note = 2'-O-Methyl-cytidine
  modified_base 71: mod_base = OTHER; note = 2'-O-Methyl-uridine
  modified_base 72: mod_base = OTHER; note = 2'-O-Methyl-uridine
  modified_base 74: mod_base = OTHER; note = 2'-O-Methyl-adenosine
  modified_base 75: mod_base = OTHER; note = 2'-O-Methyl-adenosine
  modified_base 76: mod_base = OTHER; note = 2'-O-Methyl-adenosine
  modified_base 77: mod_base = OTHER; note = 2'-O-Methyl-adenosine
  modified_base 78: mod_base = OTHER; note = 2'-O-Methyl-adenosine
  modified_base 79: mod_base = OTHER; note = 2'-O-Methyl-guanosine
  modified_base 80: mod_base = OTHER; note = 2'-O-Methyl-uridine
  modified_base 82: mod_base = OTHER; note = 2'-O-Methyl-guanosine
  modified_base 83: mod_base = OTHER; note = 2'-O-Methyl-cytidine
  modified_base 84: mod_base = OTHER; note = 2'-O-Methyl-adenosine
  modified_base 85: mod_base = OTHER; note = 2'-O-Methyl-cytidine
  modified_base 86: mod_base = OTHER; note = 2'-O-Methyl-cytidine
  modified_base 87: mod_base = OTHER; note = 2'-O-Methyl-guanosine
  modified_base 89: mod_base = OTHER; note = 2'-O-Methyl-guanosine
  modified_base 92: mod_base = OTHER; note = 2'-O-Methyl-guanosine
  modified_base 93: mod_base = OTHER; note = 2'-O-Methyl-guanosine
  modified_base 94: mod_base = OTHER; note = 2'-O-Methyl-uridine
  modified_base 95: mod_base = OTHER; note = 2'-O-Methyl-guanosine
  modified_base 96: mod_base = OTHER; note = 2'-O-Methyl-cytidine
  modified_base 97: mod_base = OTHER; note = 2'-O-Methyl-uridine
  modified_base 98: mod_base = OTHER; note = 2'-O-Methyl-uridine phosphorothioate
  modified_base 99: mod_base = OTHER; note = 2'-O-Methyl-uridine phosphorothioate
  modified_base 100: mod_base = OTHER; note = 2'-O-Methyl-uridine

SEQ ID NO: 1677 - RNA, 100 nt, synthetic construct; identical to SEQ ID NO: 422
  source 1..100: mol_type = other RNA; note = Description of Artificial Sequence: Synthetic polynucleotide
  modified_base 1: mod_base = OTHER; note = 2'-O-Methyl-guanosine phosphorothioate
  modified_base 2: mod_base = OTHER; note = 2'-O-Methyl-adenosine phosphorothioate
  modified_base 3: mod_base = OTHER; note = 2'-O-Methyl-guanosine phosphorothioate
  modified_base 21: mod_base = OTHER; note = 2'-O-Methyl-guanosine
  modified_base 25: mod_base = OTHER; note = uridine phosphorothioate
  modified_base 28: mod_base = OTHER; note = 2'-O-Methyl-adenosine
  modified_base 29: mod_base = OTHER; note = 2'-O-Methyl-guanosine
  modified_base 30: mod_base = OTHER; note = 2'-O-Methyl-cytidine
  modified_base 31: mod_base = OTHER; note = 2'-O-Methyl-uridine
  modified_base 32: mod_base = OTHER; note = 2'-O-Methyl-adenosine
  modified_base 34: mod_base = OTHER; note = 2'-O-Methyl-adenosine
  modified_base 35: mod_base = OTHER; note = 2'-O-Methyl-adenosine
  modified_base 36: mod_base = OTHER; note = 2'-O-Methyl-adenosine
  modified_base 37: mod_base = OTHER; note = 2'-O-Methyl-uridine
  modified_base 38: mod_base = OTHER; note = 2'-O-Methyl-adenosine
  modified_base 39: mod_base = OTHER; note = 2'-O-Methyl-guanosine
  modified_base 40: mod_base = OTHER; note = 2'-O-Methyl-cytidine
  modified_base 41: mod_base = OTHER; note = 2'-O-Methyl-adenosine
  modified_base 42: mod_base = OTHER; note = 2'-O-Methyl-adenosine
  modified_base 45: mod_base = OTHER; note = uridine phosphorothioate
  modified_base 46: mod_base = OTHER; note = 2'-O-Methyl-adenosine
  modified_base 48: mod_base = OTHER; note = 2'-O-Methyl-adenosine
  modified_base 50: mod_base = OTHER; note = 2'-O-Methyl-uridine
  modified_base 52: mod_base = OTHER; note = 2'-O-Methyl-adenosine
  modified_base 53: mod_base = OTHER; note = 2'-O-Methyl-guanosine
  modified_base 54: mod_base = OTHER; note = 2'-O-Methyl-guanosine
  modified_base 57: mod_base = OTHER; note = 2'-O-Methyl-adenosine
  modified_base 61: mod_base = OTHER; note = 2'-O-Methyl-cytidine
  modified_base 64: mod_base = OTHER; note = uridine phosphorothioate
  modified_base 66: mod_base = OTHER; note = 2'-O-Methyl-uridine
  modified_base 67: mod_base = OTHER; note = 2'-O-Methyl-cytidine
  modified_base 70: mod_base = OTHER; note = 2'-O-Methyl-cytidine
  modified_base 71: mod_base = OTHER; note = 2'-O-Methyl-uridine
  modified_base 72: mod_base = OTHER; note = 2'-O-Methyl-uridine
  modified_base 74: mod_base = OTHER; note = 2'-O-Methyl-adenosine
  modified_base 75: mod_base = OTHER; note = 2'-O-Methyl-adenosine
  modified_base 76: mod_base = OTHER; note = 2'-O-Methyl-adenosine
  modified_base 77: mod_base = OTHER; note = 2'-O-Methyl-adenosine
  modified_base 78: mod_base = OTHER; note = 2'-O-Methyl-adenosine
  modified_base 79: mod_base = OTHER; note = 2'-O-Methyl-guanosine
  modified_base 80: mod_base = OTHER; note = 2'-O-Methyl-uridine
  modified_base 82: mod_base = OTHER; note = 2'-O-Methyl-guanosine
  modified_base 83: mod_base = OTHER; note = 2'-O-Methyl-cytidine
  modified_base 84: mod_base = OTHER; note = 2'-O-Methyl-adenosine
  modified_base 85: mod_base = OTHER; note = 2'-O-Methyl-cytidine
  modified_base 86: mod_base = OTHER; note = 2'-O-Methyl-cytidine
  modified_base 87: mod_base = OTHER; note = 2'-O-Methyl-guanosine
  modified_base 89: mod_base = OTHER; note = 2'-O-Methyl-guanosine
  modified_base 92: mod_base = OTHER; note = 2'-O-Methyl-guanosine
  modified_base 93: mod_base = OTHER; note = 2'-O-Methyl-guanosine
  modified_base 94: mod_base = OTHER; note = 2'-O-Methyl-uridine
  modified_base 95: mod_base = OTHER; note = 2'-O-Methyl-guanosine
  modified_base 96: mod_base = OTHER; note = 2'-O-Methyl-cytidine
  modified_base 97: mod_base = OTHER; note = 2'-O-Methyl-uridine
  modified_base 98: mod_base = OTHER; note = 2'-O-Methyl-uridine phosphorothioate
  modified_base 99: mod_base = OTHER; note = 2'-O-Methyl-uridine phosphorothioate
  modified_base 100: mod_base = OTHER; note = 2'-O-Methyl-uridine

SEQ ID NO: 1678 - RNA, 100 nt, synthetic construct; identical to SEQ ID NO: 55
  source 1..100: mol_type = other RNA; note = Description of Artificial Sequence: Synthetic polynucleotide
  modified_base 1: mod_base = OTHER; note = 2'-O-Methyl-cytidine phosphorothioate
  modified_base 2: mod_base = OTHER; note = 2'-O-Methyl-adenosine phosphorothioate
  modified_base 3: mod_base = OTHER; note = 2'-O-Methyl-guanosine phosphorothioate
  modified_base 21: mod_base = OTHER; note = 2'-O-Methyl-guanosine
  modified_base 25: mod_base = OTHER; note = uridine phosphorothioate
  modified_base 28: mod_base = OTHER; note = 2'-O-Methyl-adenosine
  modified_base 29: mod_base = OTHER; note = 2'-O-Methyl-guanosine
  modified_base 30: mod_base = OTHER; note = 2'-O-Methyl-cytidine
  modified_base 31: mod_base = OTHER; note = 2'-O-Methyl-uridine
  modified_base 32: mod_base = OTHER; note = 2'-O-Methyl-adenosine
  modified_base 34: mod_base = OTHER; note = 2'-O-Methyl-adenosine
  modified_base 35: mod_base = OTHER; note = 2'-O-Methyl-adenosine
  modified_base 36: mod_base = OTHER; note = 2'-O-Methyl-adenosine
  modified_base 37: mod_base = OTHER; note = 2'-O-Methyl-uridine
  modified_base 38: mod_base = OTHER; note = 2'-O-Methyl-adenosine
  modified_base 39: mod_base = OTHER; note = 2'-O-Methyl-guanosine
  modified_base 40: mod_base = OTHER; note = 2'-O-Methyl-cytidine
  modified_base 41: mod_base = OTHER; note = 2'-O-Methyl-adenosine
  modified_base 42: mod_base = OTHER; note = 2'-O-Methyl-adenosine
  modified_base 45: mod_base = OTHER; note = uridine phosphorothioate
  modified_base 46: mod_base = OTHER; note = 2'-O-Methyl-adenosine
  modified_base 48: mod_base = OTHER; note = 2'-O-Methyl-adenosine
  modified_base 50: mod_base = OTHER; note = 2'-O-Methyl-uridine
  modified_base 52: mod_base = OTHER; note = 2'-O-Methyl-adenosine
  modified_base 53: mod_base = OTHER; note = 2'-O-Methyl-guanosine
  modified_base 54: mod_base = OTHER; note = 2'-O-Methyl-guanosine
  modified_base 55: mod_base = OTHER; note = 2'-O-Methyl-cytidine
  modified_base 56: mod_base = OTHER; note = 2'-O-Methyl-uridine
  modified_base 57: mod_base = OTHER; note = 2'-O-Methyl-adenosine
  modified_base 60: mod_base = OTHER; note = 2'-O-Methyl-cytidine
  modified_base 61: mod_base = OTHER; note = 2'-O-Methyl-cytidine
  modified_base 64: mod_base = OTHER; note = uridine phosphorothioate
  modified_base 66: mod_base = OTHER; note = 2'-O-Methyl-uridine
  modified_base 67: mod_base = OTHER; note = 2'-O-Methyl-cytidine
  modified_base 70: mod_base = OTHER; note = 2'-O-Methyl-cytidine
  modified_base 71: mod_base = OTHER; note = 2'-O-Methyl-uridine
  modified_base 72: mod_base = OTHER; note = 2'-O-Methyl-uridine
  modified_base 74: mod_base = OTHER; note = 2'-O-Methyl-adenosine
  modified_base 75: mod_base = OTHER; note = 2'-O-Methyl-adenosine
  modified_base 76: mod_base = OTHER; note = 2'-O-Methyl-adenosine
  modified_base 77: mod_base = OTHER; note = 2'-O-Methyl-adenosine
  modified_base 78: mod_base = OTHER; note = 2'-O-Methyl-adenosine
  modified_base 79: mod_base = OTHER; note = 2'-O-Methyl-guanosine
  modified_base 80: mod_base = OTHER; note = 2'-O-Methyl-uridine
  modified_base 81: mod_base = OTHER; note = 2'-O-Methyl-guanosine
  modified_base 83: mod_base = OTHER; note = 2'-O-Methyl-cytidine
  modified_base 84: mod_base = OTHER; note = 2'-O-Methyl-adenosine
  modified_base 85: mod_base = OTHER; note = 2'-O-Methyl-cytidine
  modified_base 86: mod_base = OTHER; note = 2'-O-Methyl-cytidine
  modified_base 87: mod_base = OTHER; note = 2'-O-Methyl-guanosine
  modified_base 88: mod_base = OTHER; note = 2'-O-Methyl-adenosine
  modified_base 89: mod_base = OTHER; note = 2'-O-Methyl-guanosine
  modified_base 90: mod_base = OTHER; note = 2'-O-Methyl-uridine
  modified_base 91: mod_base = OTHER; note = 2'-O-Methyl-cytidine
  modified_base 92: mod_base = OTHER; note = 2'-O-Methyl-guanosine
  modified_base 93: mod_base = OTHER; note = 2'-O-Methyl-guanosine
  modified_base 94: mod_base = OTHER; note = 2'-O-Methyl-uridine
  modified_base 95: mod_base = OTHER; note = 2'-O-Methyl-guanosine
  modified_base 96: mod_base = OTHER; note = 2'-O-Methyl-cytidine
  modified_base 97: mod_base = OTHER; note = 2'-O-Methyl-uridine
  modified_base 98: mod_base = OTHER; note = 2'-O-Methyl-uridine phosphorothioate
  modified_base 99: mod_base = OTHER; note = 2'-O-Methyl-uridine phosphorothioate
  modified_base 100: mod_base = OTHER; note = 2'-O-Methyl-uridine

SEQ ID NO: 1679 - RNA, 100 nt, synthetic construct; identical to SEQ ID NO: 55
  source 1..100: mol_type = other RNA; note = Description of Artificial Sequence: Synthetic polynucleotide
  modified_base 1: mod_base = OTHER; note = 2'-O-Methyl-cytidine phosphorothioate
  modified_base 2: mod_base = OTHER; note = 2'-O-Methyl-adenosine phosphorothioate
  modified_base 3: mod_base = OTHER; note = 2'-O-Methyl-guanosine
  modified_base 21: mod_base = OTHER; note = 2'-O-Methyl-guanosine
  modified_base 28: mod_base = OTHER; note = 2'-O-Methyl-adenosine
  modified_base 29: mod_base = OTHER; note = 2'-O-Methyl-guanosine
  modified_base 30: mod_base = OTHER; note = 2'-O-Methyl-cytidine
  modified_base 31: mod_base = OTHER; note = 2'-O-Methyl-uridine
  modified_base 32: mod_base = OTHER; note = 2'-O-Methyl-adenosine
  modified_base 34: mod_base = OTHER; note = 2'-O-Methyl-adenosine
  modified_base 35: mod_base = OTHER; note = 2'-O-Methyl-adenosine
  modified_base 36: mod_base = OTHER; note = 2'-O-Methyl-adenosine
  modified_base 37: mod_base = OTHER; note = 2'-O-Methyl-uridine
  modified_base 38: mod_base = OTHER; note = 2'-O-Methyl-adenosine
  modified_base 39: mod_base = OTHER; note = 2'-O-Methyl-guanosine
  modified_base 40: mod_base = OTHER; note = 2'-O-Methyl-cytidine
  modified_base 41: mod_base = OTHER; note = 2'-O-Methyl-adenosine
  modified_base 42: mod_base = OTHER; note = 2'-O-Methyl-adenosine
  modified_base 46: mod_base = OTHER; note = 2'-O-Methyl-adenosine
  modified_base 48: mod_base = OTHER; note = 2'-O-Methyl-adenosine
  modified_base 50: mod_base = OTHER; note = 2'-O-Methyl-uridine
  modified_base 52: mod_base = OTHER; note = 2'-O-Methyl-adenosine
  modified_base 53: mod_base = OTHER; note = 2'-O-Methyl-guanosine
  modified_base 54: mod_base = OTHER; note = 2'-O-Methyl-guanosine
  modified_base 57: mod_base = OTHER; note = 2'-O-Methyl-adenosine
  modified_base 61: mod_base = OTHER; note = 2'-O-Methyl-cytidine
  modified_base 66: mod_base = OTHER; note = 2'-O-Methyl-uridine
  modified_base 67: mod_base = OTHER; note = 2'-O-Methyl-cytidine
  modified_base 70: mod_base = OTHER; note = 2'-O-Methyl-cytidine
  modified_base 71: mod_base = OTHER; note = 2'-O-Methyl-uridine
  modified_base 72: mod_base = OTHER; note = 2'-O-Methyl-uridine
  modified_base 74: mod_base = OTHER; note = 2'-O-Methyl-adenosine
  modified_base 75: mod_base = OTHER; note = 2'-O-Methyl-adenosine
  modified_base 76: mod_base = OTHER; note = 2'-O-Methyl-adenosine
  modified_base 77: mod_base = OTHER; note = 2'-O-Methyl-adenosine
  modified_base 78: mod_base = OTHER; note = 2'-O-Methyl-adenosine
  modified_base 79: mod_base = OTHER; note = 2'-O-Methyl-guanosine
  modified_base 80: mod_base = OTHER; note = 2'-O-Methyl-uridine
  modified_base 82: mod_base = OTHER; note = 2'-O-Methyl-guanosine
  modified_base 83: mod_base = OTHER; note = 2'-O-Methyl-cytidine
  modified_base 84: mod_base = OTHER; note = 2'-O-Methyl-adenosine
  modified_base 85: mod_base = OTHER; note = 2'-O-Methyl-cytidine
  modified_base 86: mod_base = OTHER; note = 2'-O-Methyl-cytidine
  modified_base 87: mod_base = OTHER; note = 2'-O-Methyl-guanosine
  modified_base 89: mod_base = OTHER; note = 2'-O-Methyl-guanosine
  modified_base 92: mod_base = OTHER; note = 2'-O-Methyl-guanosine
  modified_base 93: mod_base = OTHER; note = 2'-O-Methyl-guanosine
  modified_base 94: mod_base = OTHER; note = 2'-O-Methyl-uridine
  modified_base 95: mod_base = OTHER; note = 2'-O-Methyl-guanosine
  modified_base 96: mod_base = OTHER; note = 2'-O-Methyl-cytidine
  modified_base 97: mod_base = OTHER; note = 2'-O-Methyl-uridine
  modified_base 98: mod_base = OTHER; note = 2'-O-Methyl-uridine phosphorothioate
  modified_base 99: mod_base = OTHER; note = 2'-O-Methyl-uridine phosphorothioate
  modified_base 100: mod_base = OTHER; note = 2'-O-Methyl-uridine

SEQ ID NO: 1680 - RNA, 100 nt, synthetic construct; identical to SEQ ID NO: 55
  source 1..100: mol_type = other RNA; note = Description of Artificial Sequence: Synthetic polynucleotide
  modified_base 1: mod_base = OTHER; note = 2'-O-Methyl-cytidine phosphorothioate
  modified_base 2: mod_base = OTHER; note = 2'-O-Methyl-adenosine phosphorothioate
  modified_base 3: mod_base = OTHER; note = 2'-O-Methyl-guanosine
  modified_base 21: mod_base = OTHER; note = 2'-O-Methyl-guanosine
  modified_base 28: mod_base = OTHER; note = 2'-O-Methyl-adenosine
  modified_base 29: mod_base = OTHER; note = 2'-O-Methyl-guanosine
  modified_base 30: mod_base = OTHER; note = 2'-O-Methyl-cytidine
  modified_base 31: mod_base = OTHER; note = 2'-O-Methyl-uridine
  modified_base 32: mod_base = OTHER; note = 2'-O-Methyl-adenosine
  modified_base 33: mod_base = OTHER; note = 2'-O-Methyl-guanosine
  modified_base 34: mod_base = OTHER; note = 2'-O-Methyl-adenosine
  modified_base 35: mod_base = OTHER; note = 2'-O-Methyl-adenosine
  modified_base 36: mod_base = OTHER; note = 2'-O-Methyl-adenosine
  modified_base 37: mod_base = OTHER; note = 2'-O-Methyl-uridine
  modified_base 38: mod_base = OTHER; note = 2'-O-Methyl-adenosine
  modified_base 39: mod_base = OTHER; note = 2'-O-Methyl-guanosine
  modified_base 40: mod_base = OTHER; note = 2'-O-Methyl-cytidine
  modified_base 41: mod_base = OTHER; note = 2'-O-Methyl-adenosine
  modified_base 42: mod_base = OTHER; note = 2'-O-Methyl-adenosine
  modified_base 46: mod_base = OTHER; note = 2'-O-Methyl-adenosine
  modified_base 48: mod_base = OTHER; note = 2'-O-Methyl-adenosine
  modified_base 50: mod_base = OTHER; note = 2'-O-Methyl-uridine
  modified_base 52: mod_base = OTHER; note = 2'-O-Methyl-adenosine
  modified_base 53: mod_base = OTHER; note = 2'-O-Methyl-guanosine
  modified_base 54: mod_base = OTHER; note = 2'-O-Methyl-guanosine
  modified_base 55: mod_base = OTHER; note = 2'-O-Methyl-cytidine
  modified_base 56: mod_base = OTHER; note = 2'-O-Methyl-uridine
  modified_base 57: mod_base = OTHER; note = 2'-O-Methyl-adenosine
  modified_base 60: mod_base = OTHER; note = 2'-O-Methyl-cytidine
  modified_base 61: mod_base = OTHER; note = 2'-O-Methyl-cytidine
  modified_base 66: mod_base = OTHER; note = 2'-O-Methyl-uridine
  modified_base 67: mod_base = OTHER; note = 2'-O-Methyl-cytidine
  modified_base 70: mod_base = OTHER; note = 2'-O-Methyl-cytidine
  modified_base 71: mod_base = OTHER; note = 2'-O-Methyl-uridine
  modified_base 72: mod_base = OTHER; note = 2'-O-Methyl-uridine
  modified_base 73: mod_base = OTHER; note = 2'-O-Methyl-guanosine
  modified_base 74: mod_base = OTHER; note = 2'-O-Methyl-adenosine
  modified_base 75: mod_base = OTHER; note = 2'-O-Methyl-adenosine
  modified_base 76: mod_base = OTHER; note = 2'-O-Methyl-adenosine
  modified_base 77: mod_base = OTHER; note = 2'-O-Methyl-adenosine
  modified_base 78: mod_base = OTHER; note = 2'-O-Methyl-adenosine
  modified_base 79: mod_base = OTHER; note = 2'-O-Methyl-guanosine
  modified_base 80: mod_base = OTHER; note = 2'-O-Methyl-uridine
  modified_base 81: mod_base = OTHER; note = 2'-O-Methyl-guanosine
  modified_base 83: mod_base = OTHER; note = 2'-O-Methyl-cytidine
  modified_base 84: mod_base = OTHER; note = 2'-O-Methyl-adenosine
  modified_base 85: mod_base = OTHER; note = 2'-O-Methyl-cytidine
  modified_base 86: mod_base = OTHER; note = 2'-O-Methyl-cytidine
  modified_base 87: mod_base = OTHER; note = 2'-O-Methyl-guanosine
  modified_base 88: mod_base = OTHER; note = 2'-O-Methyl-adenosine
  modified_base 89: mod_base = OTHER; note = 2'-O-Methyl-guanosine
  modified_base 90: mod_base = OTHER; note = 2'-O-Methyl-uridine
  modified_base 91: mod_base = OTHER; note = 2'-O-Methyl-cytidine
  modified_base 92: mod_base = OTHER; note = 2'-O-Methyl-guanosine
  modified_base 93: mod_base = OTHER; note = 2'-O-Methyl-guanosine
  modified_base 94: mod_base = OTHER; note = 2'-O-Methyl-uridine
  modified_base 95: mod_base = OTHER; note = 2'-O-Methyl-guanosine
  modified_base 96: mod_base = OTHER; note = 2'-O-Methyl-cytidine
  modified_base 97: mod_base = OTHER; note = 2'-O-Methyl-uridine
  modified_base 98: mod_base = OTHER; note = 2'-O-Methyl-uridine phosphorothioate
  modified_base 99: mod_base = OTHER; note = 2'-O-Methyl-uridine phosphorothioate
  modified_base 100: mod_base = OTHER; note = 2'-O-Methyl-uridine

SEQ ID NO: 1681 - RNA, 100 nt, synthetic construct; identical to SEQ ID NO: 421
  source 1..100: mol_type = other RNA; note = Description of Artificial Sequence: Synthetic polynucleotide
  modified_base 1: mod_base = OTHER; note = 2'-O-Methyl-cytidine phosphorothioate
  modified_base 2: mod_base = OTHER; note = 2'-O-Methyl-cytidine phosphorothioate
  modified_base 3: mod_base = OTHER; note = 2'-O-Methyl-cytidine
  modified_base 21: mod_base = OTHER; note = 2'-O-Methyl-guanosine
  modified_base 28: mod_base = OTHER; note = 2'-O-Methyl-adenosine
  modified_base 29: mod_base = OTHER; note = 2'-O-Methyl-guanosine
  modified_base 30: mod_base = OTHER; note = 2'-O-Methyl-cytidine
  modified_base 31: mod_base = OTHER; note = 2'-O-Methyl-uridine
  modified_base 32: mod_base = OTHER; note = 2'-O-Methyl-adenosine
  modified_base 34: mod_base = OTHER; note = 2'-O-Methyl-adenosine
  modified_base 35: mod_base = OTHER; note = 2'-O-Methyl-adenosine
  modified_base 36: mod_base = OTHER; note = 2'-O-Methyl-adenosine
  modified_base 37: mod_base = OTHER; note = 2'-O-Methyl-uridine
  modified_base 38: mod_base = OTHER; note = 2'-O-Methyl-adenosine
  modified_base 39: mod_base = OTHER; note = 2'-O-Methyl-guanosine
  modified_base 40: mod_base = OTHER; note = 2'-O-Methyl-cytidine
  modified_base 41: mod_base = OTHER; note = 2'-O-Methyl-adenosine
  modified_base 42: mod_base = OTHER; note = 2'-O-Methyl-adenosine
  modified_base 46: mod_base = OTHER; note = 2'-O-Methyl-adenosine
  modified_base 48: mod_base = OTHER; note = 2'-O-Methyl-adenosine
  modified_base 50: mod_base = OTHER; note = 2'-O-Methyl-uridine
  modified_base 52: mod_base = OTHER; note = 2'-O-Methyl-adenosine
  modified_base 53: mod_base = OTHER; note = 2'-O-Methyl-guanosine
  modified_base 54: mod_base = OTHER; note = 2'-O-Methyl-guanosine
  modified_base 57: mod_base = OTHER; note = 2'-O-Methyl-adenosine
  modified_base 61: mod_base = OTHER; note = 2'-O-Methyl-cytidine
  modified_base 66: mod_base = OTHER; note = 2'-O-Methyl-uridine
  modified_base 67: mod_base = OTHER; note = 2'-O-Methyl-cytidine
  modified_base 70: mod_base = OTHER; note = 2'-O-Methyl-cytidine
  modified_base 71: mod_base = OTHER; note = 2'-O-Methyl-uridine
  modified_base 72: mod_base = OTHER; note = 2'-O-Methyl-uridine
  modified_base 74: mod_base = OTHER; note = 2'-O-Methyl-adenosine
  modified_base 75: mod_base = OTHER; note = 2'-O-Methyl-adenosine
  modified_base 76: mod_base = OTHER; note = 2'-O-Methyl-adenosine
  modified_base 77: mod_base = OTHER; note = 2'-O-Methyl-adenosine
  modified_base 78: mod_base = OTHER; note = 2'-O-Methyl-adenosine
  modified_base 79: mod_base = OTHER; note = 2'-O-Methyl-guanosine
  modified_base 80: mod_base = OTHER; note = 2'-O-Methyl-uridine
  modified_base 82: mod_base = OTHER; note = 2'-O-Methyl-guanosine
  modified_base 83: mod_base = OTHER; note = 2'-O-Methyl-cytidine
  modified_base 84: mod_base = OTHER; note = 2'-O-Methyl-adenosine
  modified_base 85: mod_base = OTHER; note = 2'-O-Methyl-cytidine
  modified_base 86: mod_base = OTHER; note = 2'-O-Methyl-cytidine
  modified_base 87: mod_base = OTHER; note = 2'-O-Methyl-guanosine
  modified_base 89: mod_base = OTHER; note = 2'-O-Methyl-guanosine
  modified_base 92: mod_base = OTHER; note = 2'-O-Methyl-guanosine
  modified_base 93: mod_base = OTHER; note = 2'-O-Methyl-guanosine
  modified_base 94: mod_base = OTHER; note = 2'-O-Methyl-uridine
  modified_base 95: mod_base = OTHER; note = 2'-O-Methyl-guanosine
  modified_base 96: mod_base = OTHER; note = 2'-O-Methyl-cytidine
  modified_base 97: mod_base = OTHER; note = 2'-O-Methyl-uridine
  modified_base 98: mod_base = OTHER; note = 2'-O-Methyl-uridine phosphorothioate
  modified_base 99: mod_base = OTHER; note = 2'-O-Methyl-uridine phosphorothioate
  modified_base 100: mod_base = OTHER; note = 2'-O-Methyl-uridine

SEQ ID NO: 1682 - RNA, 100 nt, synthetic construct; identical to SEQ ID NO: 421
  source 1..100: mol_type = other RNA; note = Description of Artificial Sequence: Synthetic polynucleotide
  modified_base 1: mod_base = OTHER; note = 2'-O-Methyl-cytidine phosphorothioate
  modified_base 2: mod_base = OTHER; note = 2'-O-Methyl-cytidine phosphorothioate
  modified_base 3: mod_base = OTHER; note = 2'-O-Methyl-cytidine
  modified_base 21: mod_base = OTHER; note = 2'-O-Methyl-guanosine
  modified_base 28: mod_base = OTHER; note = 2'-O-Methyl-adenosine
  modified_base 29: mod_base = OTHER; note = 2'-O-Methyl-guanosine
  modified_base 30: mod_base = OTHER; note = 2'-O-Methyl-cytidine
  modified_base 31: mod_base = OTHER; note = 2'-O-Methyl-uridine
  modified_base 32: mod_base = OTHER; note = 2'-O-Methyl-adenosine
  modified_base 34: mod_base = OTHER; note = 2'-O-Methyl-adenosine
  modified_base 35: mod_base = OTHER; note = 2'-O-Methyl-adenosine
  modified_base 36: mod_base = OTHER; note = 2'-O-Methyl-adenosine
  modified_base 37: mod_base = OTHER; note = 2'-O-Methyl-uridine
  modified_base 38: mod_base = OTHER; note = 2'-O-Methyl-adenosine
  modified_base 39: mod_base = OTHER; note = 2'-O-Methyl-guanosine
  modified_base 40: mod_base = OTHER; note = 2'-O-Methyl-cytidine
  modified_base 41: mod_base = OTHER; note = 2'-O-Methyl-adenosine
  modified_base 42: mod_base = OTHER; note = 2'-O-Methyl-adenosine
  modified_base 46: mod_base = OTHER; note = 2'-O-Methyl-adenosine
  modified_base 48: mod_base = OTHER; note = 2'-O-Methyl-adenosine
  modified_base 50: mod_base = OTHER; note = 2'-O-Methyl-uridine
  modified_base 52: mod_base = OTHER; note = 2'-O-Methyl-adenosine
  modified_base 53: mod_base = OTHER; note = 2'-O-Methyl-guanosine
  modified_base 54: mod_base = OTHER; note = 2'-O-Methyl-guanosine
  modified_base 55: mod_base = OTHER; note = 2'-O-Methyl-cytidine
  modified_base 56: mod_base = OTHER; note = 2'-O-Methyl-uridine
  modified_base 57: mod_base = OTHER; note = 2'-O-Methyl-adenosine
  modified_base 60: mod_base = OTHER; note = 2'-O-Methyl-cytidine
  modified_base 61: mod_base = OTHER; note = 2'-O-Methyl-cytidine
  modified_base 64: mod_base = OTHER; note = uridine phosphorothioate
  modified_base 66: mod_base = OTHER; note = 2'-O-Methyl-uridine
  modified_base 67: mod_base = OTHER; note = 2'-O-Methyl-cytidine
  modified_base 70: mod_base = OTHER; note = 2'-O-Methyl-cytidine
  modified_base 71: mod_base = OTHER; note = 2'-O-Methyl-uridine
  modified_base 72: mod_base = OTHER; note = 2'-O-Methyl-uridine
  modified_base 74: mod_base = OTHER; note = 2'-O-Methyl-adenosine
  modified_base 75: mod_base = OTHER; note = 2'-O-Methyl-adenosine
  modified_base 76: mod_base = OTHER; note = 2'-O-Methyl-adenosine
  modified_base 77: mod_base = OTHER; note = 2'-O-Methyl-adenosine
  modified_base 78: mod_base = OTHER; note = 2'-O-Methyl-adenosine
  modified_base 79: mod_base = OTHER; note = 2'-O-Methyl-guanosine
  modified_base 80: mod_base = OTHER; note = 2'-O-Methyl-uridine
  modified_base 81: mod_base = OTHER; note = 2'-O-Methyl-guanosine
  modified_base 83: mod_base = OTHER; note = 2'-O-Methyl-cytidine
  modified_base 84: mod_base = OTHER; note = 2'-O-Methyl-adenosine
  modified_base 85: mod_base = OTHER; note = 2'-O-Methyl-cytidine
  modified_base 86: mod_base = OTHER; note = 2'-O-Methyl-cytidine
  modified_base 87: mod_base = OTHER; note = 2'-O-Methyl-guanosine
  modified_base 88: mod_base = OTHER; note = 2'-O-Methyl-adenosine
  modified_base 89: mod_base = OTHER; note = 2'-O-Methyl-guanosine
  modified_base 90: mod_base = OTHER; note = 2'-O-Methyl-uridine
  modified_base 91: mod_base = OTHER; note = 2'-O-Methyl-cytidine
  modified_base 92: mod_base = OTHER; note = 2'-O-Methyl-guanosine
  modified_base 93: mod_base = OTHER; note = 2'-O-Methyl-guanosine
  modified_base 94: mod_base = OTHER; note = 2'-O-Methyl-uridine
  modified_base 95: mod_base = OTHER; note = 2'-O-Methyl-guanosine
  modified_base 96: mod_base = OTHER; note = 2'-O-Methyl-cytidine
  modified_base 97: mod_base = OTHER; note = 2'-O-Methyl-uridine
  modified_base 98: mod_base = OTHER; note = 2'-O-Methyl-uridine phosphorothioate
  modified_base 99: mod_base = OTHER; note = 2'-O-Methyl-uridine phosphorothioate
  modified_base 100: mod_base = OTHER; note = 2'-O-Methyl-uridine

SEQ ID NO: 1683 - RNA, 100 nt, synthetic construct; identical to SEQ ID NO: 422
  source 1..100: mol_type = other RNA; note = Description of Artificial Sequence: Synthetic polynucleotide
  modified_base 1: mod_base = OTHER; note = 2'-O-Methyl-guanosine phosphorothioate
  modified_base 2: mod_base = OTHER; note = 2'-O-Methyl-adenosine phosphorothioate
  modified_base 3: mod_base = OTHER; note = 2'-O-Methyl-guanosine
  modified_base 21: mod_base = OTHER; note = 2'-O-Methyl-guanosine
  modified_base 28: mod_base = OTHER; note = 2'-O-Methyl-adenosine
  modified_base 29: mod_base = OTHER; note = 2'-O-Methyl-guanosine
  modified_base 30: mod_base = OTHER; note = 2'-O-Methyl-cytidine
  modified_base 31: mod_base = OTHER; note = 2'-O-Methyl-uridine
  modified_base 32: mod_base = OTHER; note = 2'-O-Methyl-adenosine
  modified_base 34: mod_base = OTHER; note = 2'-O-Methyl-adenosine
  modified_base 35: mod_base = OTHER; note = 2'-O-Methyl-adenosine
  modified_base 36: mod_base = OTHER; note = 2'-O-Methyl-adenosine
  modified_base 37: mod_base = OTHER; note = 2'-O-Methyl-uridine
  modified_base 38: mod_base = OTHER; note = 2'-O-Methyl-adenosine
  modified_base 39: mod_base = OTHER; note = 2'-O-Methyl-guanosine
  modified_base 40: mod_base = OTHER; note = 2'-O-Methyl-cytidine
  modified_base 41: mod_base = OTHER; note = 2'-O-Methyl-adenosine
  modified_base 42: mod_base = OTHER; note = 2'-O-Methyl-adenosine
  modified_base 46: mod_base = OTHER; note = 2'-O-Methyl-adenosine
  modified_base 48: mod_base = OTHER; note = 2'-O-Methyl-adenosine
  modified_base 50: mod_base = OTHER; note = 2'-O-Methyl-uridine
  modified_base 52: mod_base = OTHER; note = 2'-O-Methyl-adenosine
  modified_base 53: mod_base = OTHER; note = 2'-O-Methyl-guanosine
  modified_base 54: mod_base = OTHER; note = 2'-O-Methyl-guanosine
  modified_base 57: mod_base = OTHER; note = 2'-O-Methyl-adenosine
  modified_base 61: mod_base = OTHER; note = 2'-O-Methyl-cytidine
  modified_base 64: mod_base = OTHER; note = uridine phosphorothioate
  modified_base 66: mod_base = OTHER; note = 2'-O-Methyl-uridine
  modified_base 67: mod_base = OTHER; note = 2'-O-Methyl-cytidine
  modified_base 70: mod_base = OTHER; note = 2'-O-Methyl-cytidine
  modified_base 71: mod_base = OTHER; note = 2'-O-Methyl-uridine
  modified_base 72: mod_base = OTHER; note = 2'-O-Methyl-uridine
  modified_base 74: mod_base = OTHER; note = 2'-O-Methyl-adenosine
  modified_base 75: mod_base = OTHER; note = 2'-O-Methyl-adenosine
  modified_base 76: mod_base = OTHER; note = 2'-O-Methyl-adenosine
  modified_base 77: mod_base = OTHER; note = 2'-O-Methyl-adenosine
  modified_base 78: mod_base = OTHER; note = 2'-O-Methyl-adenosine
  modified_base 79: mod_base = OTHER; note = 2'-O-Methyl-guanosine
  modified_base 80: mod_base = OTHER; note = 2'-O-Methyl-uridine
  modified_base 82: mod_base = OTHER; note = 2'-O-Methyl-guanosine
  modified_base 83: mod_base = OTHER; note = 2'-O-Methyl-cytidine
  modified_base 84: mod_base = OTHER; note = 2'-O-Methyl-adenosine
  modified_base 85: mod_base = OTHER; note = 2'-O-Methyl-cytidine
  modified_base 86: mod_base = OTHER; note = 2'-O-Methyl-cytidine
  modified_base 87: mod_base = OTHER; note = 2'-O-Methyl-guanosine
  modified_base 89: mod_base = OTHER; note = 2'-O-Methyl-guanosine
  modified_base 92: mod_base = OTHER; note = 2'-O-Methyl-guanosine
  modified_base 93: mod_base = OTHER; note = 2'-O-Methyl-guanosine
  modified_base 94: mod_base = OTHER; note = 2'-O-Methyl-uridine
  modified_base 95: mod_base = OTHER; note = 2'-O-Methyl-guanosine
  modified_base 96: mod_base = OTHER; note = 2'-O-Methyl-cytidine
  modified_base 97: mod_base = OTHER; note = 2'-O-Methyl-uridine
  modified_base 98: mod_base = OTHER; note = 2'-O-Methyl-uridine phosphorothioate
  modified_base 99: mod_base = OTHER; note = 2'-O-Methyl-uridine phosphorothioate
  modified_base 100: mod_base = OTHER; note = 2'-O-Methyl-uridine

SEQ ID NO: 1684 - RNA, 100 nt, synthetic construct; identical to SEQ ID NO: 55
  source 1..100: mol_type = other RNA; note = Description of Artificial Sequence: Synthetic polynucleotide
  modified_base 1: mod_base = OTHER; note = 2'-O-Methyl-cytidine phosphorothioate
  modified_base 2: mod_base = OTHER; note = 2'-O-Methyl-adenosine phosphorothioate
  modified_base 3: mod_base = OTHER; note = 2'-O-Methyl-guanosine
  modified_base 21: mod_base = OTHER; note = 2'-O-Methyl-guanosine
  modified_base 28: mod_base = OTHER; note = 2'-O-Methyl-adenosine
  modified_base 29: mod_base = OTHER; note = 2'-O-Methyl-guanosine
  modified_base 30: mod_base = OTHER; note = 2'-O-Methyl-cytidine
  modified_base 31: mod_base = OTHER; note = 2'-O-Methyl-uridine
  modified_base 32: mod_base = OTHER; note = 2'-O-Methyl-adenosine
  modified_base 34: mod_base = OTHER; note = 2'-O-Methyl-adenosine
  modified_base 35: mod_base = OTHER; note = 2'-O-Methyl-adenosine
  modified_base 36: mod_base = OTHER; note = 2'-O-Methyl-adenosine
  modified_base 37: mod_base = OTHER; note = 2'-O-Methyl-uridine
  modified_base 38: mod_base = OTHER; note = 2'-O-Methyl-adenosine
  modified_base 39: mod_base = OTHER; note = 2'-O-Methyl-guanosine
  modified_base 40: mod_base = OTHER; note = 2'-O-Methyl-cytidine
  modified_base 41: mod_base = OTHER; note = 2'-O-Methyl-adenosine
  modified_base 42: mod_base = OTHER; note = 2'-O-Methyl-adenosine
  modified_base 46: mod_base = OTHER; note = 2'-O-Methyl-adenosine
  modified_base 48: mod_base = OTHER; note = 2'-O-Methyl-adenosine
  modified_base 50: mod_base = OTHER; note = 2'-O-Methyl-uridine
  modified_base 52: mod_base = OTHER; note = 2'-O-Methyl-adenosine
  modified_base 53: mod_base = OTHER; note = 2'-O-Methyl-guanosine
  modified_base 54: mod_base = OTHER; note = 2'-O-Methyl-guanosine
  modified_base 55: mod_base = OTHER; note = 2'-O-Methyl-cytidine
  modified_base 56: mod_base = OTHER; note = 2'-O-Methyl-uridine
  modified_base 57: mod_base = OTHER; note = 2'-O-Methyl-adenosine
  modified_base 60: mod_base = OTHER; note = 2'-O-Methyl-cytidine
  modified_base 61: mod_base = OTHER; note = 2'-O-Methyl-cytidine
  modified_base 64: mod_base = OTHER; note = uridine phosphorothioate
  modified_base 66: mod_base = OTHER; note = 2'-O-Methyl-uridine
  modified_base 67: mod_base = OTHER; note = 2'-O-Methyl-cytidine
  modified_base 70: mod_base = OTHER; note = 2'-O-Methyl-cytidine
  modified_base 71: mod_base = OTHER; note = 2'-O-Methyl-uridine
  modified_base 72: mod_base = OTHER; note = 2'-O-Methyl-uridine
  modified_base 74: mod_base = OTHER; note = 2'-O-Methyl-adenosine
  modified_base 75: mod_base = OTHER; note = 2'-O-Methyl-adenosine
  modified_base 76: mod_base = OTHER; note = 2'-O-Methyl-adenosine
  modified_base 77: mod_base = OTHER; note = 2'-O-Methyl-adenosine
  modified_base 78: mod_base = OTHER; note = 2'-O-Methyl-adenosine
  modified_base 79: mod_base = OTHER; note = 2'-O-Methyl-guanosine
  modified_base 80: mod_base = OTHER; note = 2'-O-Methyl-uridine
  modified_base 81: mod_base = OTHER; note = 2'-O-Methyl-guanosine
  modified_base 83: mod_base = OTHER; note = 2'-O-Methyl-cytidine
  modified_base 84: mod_base = OTHER; note = 2'-O-Methyl-adenosine
  modified_base 85: mod_base = OTHER; note = 2'-O-Methyl-cytidine
  modified_base 86: mod_base = OTHER; note = 2'-O-Methyl-cytidine
  modified_base 87: mod_base = OTHER; note = 2'-O-Methyl-guanosine
  modified_base 88: mod_base = OTHER; note = 2'-O-Methyl-adenosine
  modified_base 89: mod_base = OTHER; note = 2'-O-Methyl-guanosine
  modified_base 90: mod_base = OTHER; note = 2'-O-Methyl-uridine
  modified_base 91: mod_base = OTHER; note = 2'-O-Methyl-cytidine
  modified_base 92: mod_base = OTHER; note = 2'-O-Methyl-guanosine
  modified_base 93: mod_base = OTHER; note = 2'-O-Methyl-guanosine
  modified_base 94: mod_base = OTHER; note = 2'-O-Methyl-uridine
  modified_base 95: mod_base = OTHER; note = 2'-O-Methyl-guanosine
  modified_base 96: mod_base = OTHER; note = 2'-O-Methyl-cytidine
  modified_base 97: mod_base = OTHER; note = 2'-O-Methyl-uridine
  modified_base 98: mod_base = OTHER; note = 2'-O-Methyl-uridine phosphorothioate
  modified_base 99: mod_base = OTHER; note = 2'-O-Methyl-uridine phosphorothioate
  modified_base 100: mod_base = OTHER; note = 2'-O-Methyl-uridine

SEQ ID NO: 1685 - RNA, 100 nt, synthetic construct; identical to SEQ ID NO: 421
  source 1..100: mol_type = other RNA; note = Description of Artificial Sequence: Synthetic polynucleotide
  modified_base 1: mod_base = OTHER; note = 2'-O-Methyl-cytidine phosphorothioate
  modified_base 2: mod_base = OTHER; note = 2'-O-Methyl-cytidine phosphorothioate
  modified_base 3: mod_base = OTHER; note = 2'-O-Methyl-cytidine
  modified_base 21: mod_base = OTHER; note = 2'-O-Methyl-guanosine
  modified_base 28: mod_base = OTHER; note = 2'-O-Methyl-adenosine
  modified_base 29: mod_base = OTHER; note = 2'-O-Methyl-guanosine
  modified_base 30: mod_base = OTHER; note = 2'-O-Methyl-cytidine
  modified_base 31: mod_base = OTHER; note = 2'-O-Methyl-uridine
  modified_base 32: mod_base = OTHER; note = 2'-O-Methyl-adenosine
  modified_base 34: mod_base = OTHER; note = 2'-O-Methyl-adenosine
  modified_base 35: mod_base = OTHER; note = 2'-O-Methyl-adenosine
  modified_base 36: mod_base = OTHER; note = 2'-O-Methyl-adenosine
  modified_base 37: mod_base = OTHER; note = 2'-O-Methyl-uridine
  modified_base 38: mod_base = OTHER; note = 2'-O-Methyl-adenosine
  modified_base 39: mod_base = OTHER; note = 2'-O-Methyl-guanosine
  modified_base 40: mod_base = OTHER; note = 2'-O-Methyl-cytidine
  modified_base 41: mod_base = OTHER; note = 2'-O-Methyl-adenosine
  modified_base 42: mod_base = OTHER; note = 2'-O-Methyl-adenosine
  modified_base 45: mod_base = OTHER; note = uridine phosphorothioate
  modified_base 46: mod_base = OTHER; note = 2'-O-Methyl-adenosine
  modified_base 48: mod_base = OTHER; note = 2'-O-Methyl-adenosine
  modified_base 50: mod_base = OTHER; note = 2'-O-Methyl-uridine
  modified_base 52: mod_base = OTHER; note = 2'-O-Methyl-adenosine
  modified_base 53: mod_base = OTHER; note = 2'-O-Methyl-guanosine
  modified_base 54: mod_base = OTHER; note = 2'-O-Methyl-guanosine
  modified_base 57: mod_base = OTHER; note = 2'-O-Methyl-adenosine
  modified_base 61: mod_base = OTHER; note = 2'-O-Methyl-cytidine
  modified_base 66: mod_base = OTHER; note = 2'-O-Methyl-uridine
  modified_base 67: mod_base = OTHER; note = 2'-O-Methyl-cytidine
  modified_base 70: mod_base = OTHER; note = 2'-O-Methyl-cytidine
  modified_base 71: mod_base = OTHER; note = 2'-O-Methyl-uridine
  modified_base 72: mod_base = OTHER; note = 2'-O-Methyl-uridine
  modified_base 74: mod_base = OTHER; note = 2'-O-Methyl-adenosine
  modified_base 75: mod_base = OTHER; note = 2'-O-Methyl-adenosine
  modified_base 76: mod_base = OTHER; note = 2'-O-Methyl-adenosine
  modified_base 77: mod_base = OTHER; note = 2'-O-Methyl-adenosine
  modified_base 78: mod_base = OTHER; note = 2'-O-Methyl-adenosine
  modified_base 79: mod_base = OTHER; note = 2'-O-Methyl-guanosine
  modified_base 80: mod_base = OTHER; note = 2'-O-Methyl-uridine
  modified_base 82: mod_base = OTHER; note = 2'-O-Methyl-guanosine
  modified_base 83: mod_base = OTHER; note = 2'-O-Methyl-cytidine
  modified_base 84: mod_base = OTHER; note = 2'-O-Methyl-adenosine
  modified_base 85: mod_base = OTHER; note = 2'-O-Methyl-cytidine
  modified_base 86: mod_base = OTHER; note = 2'-O-Methyl-cytidine
  modified_base 87: mod_base = OTHER; note = 2'-O-Methyl-guanosine
  modified_base 89: mod_base = OTHER; note = 2'-O-Methyl-guanosine
  modified_base 92: mod_base = OTHER; note = 2'-O-Methyl-guanosine
  modified_base 93: mod_base = OTHER; note = 2'-O-Methyl-guanosine
  modified_base 94: mod_base = OTHER; note = 2'-O-Methyl-uridine
  modified_base 95: mod_base = OTHER; note = 2'-O-Methyl-guanosine
  modified_base 96: mod_base = OTHER; note = 2'-O-Methyl-cytidine
  modified_base 97: mod_base = OTHER; note = 2'-O-Methyl-uridine
  modified_base 98: mod_base = OTHER; note = 2'-O-Methyl-uridine phosphorothioate
  modified_base 99: mod_base = OTHER; note = 2'-O-Methyl-uridine phosphorothioate
  modified_base 100: mod_base = OTHER; note = 2'-O-Methyl-uridine

SEQ ID NO: 1686 - RNA, 100 nt, synthetic construct; identical to SEQ ID NO: 422
  source 1..100: mol_type = other RNA; note = Description of Artificial Sequence: Synthetic polynucleotide
  modified_base 1: mod_base = OTHER; note = 2'-O-Methyl-guanosine phosphorothioate
  modified_base 2: mod_base = OTHER; note = 2'-O-Methyl-adenosine phosphorothioate
  modified_base 3: mod_base = OTHER; note = 2'-O-Methyl-guanosine
  modified_base 21: mod_base = OTHER; note = 2'-O-Methyl-guanosine
  modified_base 28: mod_base = OTHER; note = 2'-O-Methyl-adenosine
  modified_base 29: mod_base = OTHER; note = 2'-O-Methyl-guanosine
  modified_base 30: mod_base = OTHER; note = 2'-O-Methyl-cytidine
  modified_base 31: mod_base = OTHER; note = 2'-O-Methyl-uridine
  modified_base 32: mod_base = OTHER; note = 2'-O-Methyl-adenosine
  modified_base 34: mod_base = OTHER; note = 2'-O-Methyl-adenosine
  modified_base 35: mod_base = OTHER; note = 2'-O-Methyl-adenosine
  modified_base 36: mod_base = OTHER; note = 2'-O-Methyl-adenosine
  modified_base 37: mod_base = OTHER; note = 2'-O-Methyl-uridine
  modified_base 38: mod_base = OTHER; note = 2'-O-Methyl-adenosine
  modified_base 39: mod_base = OTHER; note = 2'-O-Methyl-guanosine
  modified_base 40: mod_base = OTHER; note = 2'-O-Methyl-cytidine
  modified_base 41: mod_base = OTHER; note = 2'-O-Methyl-adenosine
  modified_base 42: mod_base = OTHER; note = 2'-O-Methyl-adenosine
  modified_base 45: mod_base = OTHER; note = uridine phosphorothioate
  modified_base 46: mod_base = OTHER; note = 2'-O-Methyl-adenosine
  modified_base 48: mod_base = OTHER; note = 2'-O-Methyl-adenosine
  modified_base 50: mod_base = OTHER; note = 2'-O-Methyl-uridine
  modified_base 52: mod_base = OTHER; note = 2'-O-Methyl-adenosine
  modified_base 53: mod_base = OTHER; note = 2'-O-Methyl-guanosine
  modified_base 54: mod_base = OTHER; note = 2'-O-Methyl-guanosine
  modified_base 57: mod_base = OTHER; note = 2'-O-Methyl-adenosine
  modified_base 61: mod_base = OTHER; note = 2'-O-Methyl-cytidine
  modified_base 66: mod_base = OTHER; note = 2'-O-Methyl-uridine
  modified_base 67: mod_base = OTHER; note = 2'-O-Methyl-cytidine
  modified_base 70: mod_base = OTHER; note = 2'-O-Methyl-cytidine
  modified_base 71: mod_base = OTHER; note = 2'-O-Methyl-uridine
  modified_base 72: mod_base = OTHER; note = 2'-O-Methyl-uridine
  modified_base 74: mod_base = OTHER; note = 2'-O-Methyl-adenosine
  modified_base 75: mod_base = OTHER; note = 2'-O-Methyl-adenosine
  modified_base 76: mod_base = OTHER; note = 2'-O-Methyl-adenosine
  modified_base 77: mod_base = OTHER; note = 2'-O-Methyl-adenosine
  modified_base 78: mod_base = OTHER; note = 2'-O-Methyl-adenosine
  modified_base 79: mod_base = OTHER; note = 2'-O-Methyl-guanosine
  modified_base 80: mod_base = OTHER; note = 2'-O-Methyl-uridine
  modified_base 82: mod_base = OTHER; note = 2'-O-Methyl-guanosine
  modified_base 83: mod_base = OTHER; note = 2'-O-Methyl-cytidine
  modified_base 84: mod_base = OTHER; note = 2'-O-Methyl-adenosine
  modified_base 85: mod_base = OTHER; note = 2'-O-Methyl-cytidine
  modified_base 86: mod_base = OTHER; note = 2'-O-Methyl-cytidine
  modified_base 87: mod_base = OTHER; note = 2'-O-Methyl-guanosine
  modified_base 89: mod_base = OTHER; note = 2'-O-Methyl-guanosine
  modified_base 92: mod_base = OTHER; note = 2'-O-Methyl-guanosine
  modified_base 93: mod_base = OTHER; note = 2'-O-Methyl-guanosine
  modified_base 94: mod_base = OTHER; note = 2'-O-Methyl-uridine
  modified_base 95: mod_base = OTHER; note = 2'-O-Methyl-guanosine
  modified_base 96: mod_base = OTHER; note = 2'-O-Methyl-cytidine
  modified_base 97: mod_base = OTHER; note = 2'-O-Methyl-uridine
  modified_base 98: mod_base = OTHER; note = 2'-O-Methyl-uridine phosphorothioate
  modified_base 99: mod_base = OTHER; note = 2'-O-Methyl-uridine phosphorothioate
  modified_base 100: mod_base = OTHER; note = 2'-O-Methyl-uridine

SEQ ID NO: 1687 - RNA, 100 nt, synthetic construct; identical to SEQ ID NO: 55
  source 1..100: mol_type = other RNA; note = Description of Artificial Sequence: Synthetic polynucleotide
  modified_base 1: mod_base = OTHER; note = 2'-O-Methyl-cytidine phosphorothioate
  modified_base 2: mod_base = OTHER; note = 2'-O-Methyl-adenosine phosphorothioate
  modified_base 3: mod_base = OTHER; note = 2'-O-Methyl-guanosine
  modified_base 21: mod_base = OTHER; note = 2'-O-Methyl-guanosine
  modified_base 28: mod_base = OTHER; note = 2'-O-Methyl-adenosine
  modified_base 29: mod_base = OTHER; note = 2'-O-Methyl-guanosine
  modified_base 30: mod_base = OTHER; note = 2'-O-Methyl-cytidine
  modified_base 31: mod_base = OTHER; note = 2'-O-Methyl-uridine
  modified_base 32: mod_base = OTHER; note = 2'-O-Methyl-adenosine
  modified_base 34: mod_base = OTHER; note = 2'-O-Methyl-adenosine
  modified_base 35: mod_base = OTHER; note = 2'-O-Methyl-adenosine
  modified_base 36: mod_base = OTHER; note = 2'-O-Methyl-adenosine
  modified_base 37: mod_base = OTHER; note = 2'-O-Methyl-uridine
  modified_base 38: mod_base = OTHER; note = 2'-O-Methyl-adenosine
  modified_base 39: mod_base = OTHER; note = 2'-O-Methyl-guanosine
  modified_base 40: mod_base = OTHER; note = 2'-O-Methyl-cytidine
  modified_base 41: mod_base = OTHER; note = 2'-O-Methyl-adenosine
  modified_base 42: mod_base = OTHER; note = 2'-O-Methyl-adenosine
  modified_base 45: mod_base = OTHER; note = uridine phosphorothioate
  modified_base 46: mod_base = OTHER; note = 2'-O-Methyl-adenosine
  modified_base 48: mod_base = OTHER; note = 2'-O-Methyl-adenosine
  modified_base 50: mod_base = OTHER; note = 2'-O-Methyl-uridine
  modified_base 52: mod_base = OTHER; note = 2'-O-Methyl-adenosine
  modified_base 53: mod_base = OTHER; note = 2'-O-Methyl-guanosine
  modified_base 54: mod_base = OTHER; note = 2'-O-Methyl-guanosine
  modified_base 55: mod_base = OTHER; note = 2'-O-Methyl-cytidine
  modified_base 56: mod_base = OTHER; note = 2'-O-Methyl-uridine
  modified_base 57: mod_base = OTHER; note = 2'-O-Methyl-adenosine
  modified_base 60: mod_base = OTHER; note = 2'-O-Methyl-cytidine
  modified_base 61: mod_base = OTHER; note = 2'-O-Methyl-cytidine
  modified_base 66: mod_base = OTHER; note = 2'-O-Methyl-uridine
  modified_base 67: mod_base = OTHER; note = 2'-O-Methyl-cytidine
  modified_base 70: mod_base = OTHER; note = 2'-O-Methyl-cytidine
  modified_base 71: mod_base = OTHER; note = 2'-O-Methyl-uridine
  modified_base 72: mod_base = OTHER; note = 2'-O-Methyl-uridine
  modified_base 74: mod_base = OTHER; note = 2'-O-Methyl-adenosine
  modified_base 75: mod_base = OTHER; note = 2'-O-Methyl-adenosine
  modified_base 76: mod_base = OTHER; note = 2'-O-Methyl-adenosine
  modified_base 77: mod_base = OTHER; note = 2'-O-Methyl-adenosine
  modified_base 78: mod_base = OTHER; note = 2'-O-Methyl-adenosine
  modified_base 79: mod_base = OTHER; note = 2'-O-Methyl-guanosine
  modified_base 80: mod_base = OTHER; note = 2'-O-Methyl-uridine
  modified_base 81: mod_base = OTHER; note = 2'-O-Methyl-guanosine
  modified_base 83: mod_base = OTHER; note = 2'-O-Methyl-cytidine
  modified_base 84: mod_base = OTHER; note = 2'-O-Methyl-adenosine
  modified_base 85: mod_base = OTHER; note = 2'-O-Methyl-cytidine
  modified_base 86: mod_base = OTHER; note = 2'-O-Methyl-cytidine
  modified_base 87: mod_base = OTHER; note = 2'-O-Methyl-guanosine
  modified_base 88: mod_base = OTHER; note = 2'-O-Methyl-adenosine
  modified_base 89: mod_base = OTHER; note = 2'-O-Methyl-guanosine
  modified_base 90: mod_base = OTHER; note = 2'-O-Methyl-uridine
  modified_base 91: mod_base = OTHER; note = 2'-O-Methyl-cytidine
  modified_base 92: mod_base = OTHER; note = 2'-O-Methyl-guanosine
  modified_base 93: mod_base = OTHER; note = 2'-O-Methyl-guanosine
  modified_base 94: mod_base = OTHER; note = 2'-O-Methyl-uridine
  modified_base 95: mod_base = OTHER; note = 2'-O-Methyl-guanosine
  modified_base 96: mod_base = OTHER; note = 2'-O-Methyl-cytidine
  modified_base 97: mod_base = OTHER; note = 2'-O-Methyl-uridine
  modified_base 98: mod_base = OTHER; note = 2'-O-Methyl-uridine phosphorothioate
  modified_base 99: mod_base = OTHER; note = 2'-O-Methyl-uridine phosphorothioate
  modified_base 100: mod_base = OTHER; note = 2'-O-Methyl-uridine

SEQ ID NO: 1688 - RNA, 100 nt, synthetic construct; identical to SEQ ID NO: 55
  source 1..100: mol_type = other RNA; note = Description of Artificial Sequence: Synthetic polynucleotide
  modified_base 1: mod_base = OTHER; note = 2'-O-Methyl-cytidine phosphorothioate
  modified_base 2: mod_base = OTHER; note = 2'-O-Methyl-adenosine phosphorothioate
  modified_base 3: mod_base = OTHER; note = 2'-O-Methyl-guanosine
  modified_base 21: mod_base = OTHER; note = 2'-O-Methyl-guanosine
  modified_base 28: mod_base = OTHER; note = 2'-O-Methyl-adenosine
  modified_base 29: mod_base = OTHER; note = 2'-O-Methyl-guanosine
  modified_base 30: mod_base = OTHER; note = 2'-O-Methyl-cytidine
  modified_base 31: mod_base = OTHER; note = 2'-O-Methyl-uridine
  modified_base 32: mod_base = OTHER; note = 2'-O-Methyl-adenosine
  modified_base 33: mod_base = OTHER; note = 2'-O-Methyl-guanosine
  modified_base 34: mod_base = OTHER; note = 2'-O-Methyl-adenosine
  modified_base 35: mod_base = OTHER; note = 2'-O-Methyl-adenosine
  modified_base 36: mod_base = OTHER; note = 2'-O-Methyl-adenosine
  modified_base 37: mod_base = OTHER; note = 2'-O-Methyl-uridine
  modified_base 38: mod_base = OTHER; note = 2'-O-Methyl-adenosine
  modified_base 39: mod_base = OTHER; note = 2'-O-Methyl-guanosine
  modified_base 40: mod_base = OTHER; note = 2'-O-Methyl-cytidine
  modified_base 41: mod_base = OTHER; note = 2'-O-Methyl-adenosine
  modified_base 42: mod_base = OTHER; note = 2'-O-Methyl-adenosine
  modified_base 45: mod_base = OTHER; note = uridine phosphorothioate
  modified_base 46: mod_base = OTHER; note = 2'-O-Methyl-adenosine
  modified_base 48: mod_base = OTHER; note = 2'-O-Methyl-adenosine
  modified_base 50: mod_base = OTHER; note = 2'-O-Methyl-uridine
  modified_base 52: mod_base = OTHER; note = 2'-O-Methyl-adenosine
  modified_base 53: mod_base = OTHER; note = 2'-O-Methyl-guanosine
  modified_base 54: mod_base = OTHER; note = 2'-O-Methyl-guanosine
  modified_base 57: mod_base = OTHER; note = 2'-O-Methyl-adenosine
  modified_base 61: mod_base = OTHER; note = 2'-O-Methyl-cytidine
  modified_base 66: mod_base = OTHER; note = 2'-O-Methyl-uridine
  modified_base 67: mod_base = OTHER; note = 2'-O-Methyl-cytidine
  modified_base 70: mod_base = OTHER; note = 2'-O-Methyl-cytidine
  modified_base 71: mod_base = OTHER; note = 2'-O-Methyl-uridine
  modified_base 72: mod_base = OTHER; note = 2'-O-Methyl-uridine
  modified_base 73: mod_base = OTHER; note = 2'-O-Methyl-guanosine
  modified_base 74: mod_base = OTHER; note = 2'-O-Methyl-adenosine
  modified_base 75: mod_base = OTHER; note = 2'-O-Methyl-adenosine
  modified_base 76: mod_base = OTHER; note = 2'-O-Methyl-adenosine
  modified_base 77: mod_base = OTHER; note = 2'-O-Methyl-adenosine
  modified_base 78: mod_base = OTHER; note = 2'-O-Methyl-adenosine
  modified_base 79: mod_base = OTHER; note = 2'-O-Methyl-guanosine
  modified_base 80: mod_base = OTHER; note = 2'-O-Methyl-uridine
  modified_base 82: mod_base = OTHER; note = 2'-O-Methyl-guanosine
  modified_base 83: mod_base = OTHER; note = 2'-O-Methyl-cytidine
  modified_base 84: mod_base = OTHER; note = 2'-O-Methyl-adenosine
  modified_base 85: mod_base = OTHER; note = 2'-O-Methyl-cytidine
  modified_base 86: mod_base = OTHER; note = 2'-O-Methyl-cytidine
  modified_base 87: mod_base = OTHER; note = 2'-O-Methyl-guanosine
  modified_base 89: mod_base = OTHER; note = 2'-O-Methyl-guanosine
  modified_base 92: mod_base = OTHER; note = 2'-O-Methyl-guanosine
  modified_base 93: mod_base = OTHER; note = 2'-O-Methyl-guanosine
  modified_base 94: mod_base = OTHER; note = 2'-O-Methyl-uridine
  modified_base 95: mod_base = OTHER; note = 2'-O-Methyl-guanosine
  modified_base 96: mod_base = OTHER; note = 2'-O-Methyl-cytidine
  modified_base 97: mod_base = OTHER; note = 2'-O-Methyl-uridine phosphorothioate
  modified_base 98: mod_base = OTHER; note = 2'-O-Methyl-uridine phosphorothioate
  modified_base 99: mod_base = OTHER; note = 2'-O-Methyl-uridine phosphorothioate
  modified_base 100: mod_base = OTHER; note = 2'-O-Methyl-uridine

SEQ ID NO: 1689 - RNA, 100 nt, synthetic construct; identical to SEQ ID NO: 421
  source 1..100: mol_type = other RNA; note = Description of Artificial Sequence: Synthetic polynucleotide
  modified_base 1: mod_base = OTHER; note = 2'-O-Methyl-cytidine phosphorothioate
  modified_base 2: mod_base = OTHER; note = 2'-O-Methyl-cytidine phosphorothioate
  modified_base 3: mod_base = OTHER; note = 2'-O-Methyl-cytidine
  modified_base 21: mod_base = OTHER; note = 2'-O-Methyl-guanosine
  modified_base 25: mod_base = OTHER; note = uridine phosphorothioate
  modified_base 28: mod_base = OTHER; note = 2'-O-Methyl-adenosine
  modified_base 29: mod_base = OTHER; note = 2'-O-Methyl-guanosine
  modified_base 30: mod_base = OTHER; note = 2'-O-Methyl-cytidine
  modified_base 31: mod_base = OTHER; note = 2'-O-Methyl-uridine
  modified_base 32: mod_base = OTHER; note = 2'-O-Methyl-adenosine
  modified_base 34: mod_base = OTHER; note = 2'-O-Methyl-adenosine
  modified_base 35: mod_base = OTHER; note = 2'-O-Methyl-adenosine
  modified_base 36: mod_base = OTHER; note = 2'-O-Methyl-adenosine
  modified_base 37: mod_base = OTHER; note = 2'-O-Methyl-uridine
  modified_base 38: mod_base = OTHER; note = 2'-O-Methyl-adenosine
  modified_base 39: mod_base = OTHER; note = 2'-O-Methyl-guanosine
  modified_base 40: mod_base = OTHER; note = 2'-O-Methyl-cytidine
  modified_base 41: mod_base = OTHER; note = 2'-O-Methyl-adenosine
  modified_base 42: mod_base = OTHER; note = 2'-O-Methyl-adenosine
  modified_base 46: mod_base = OTHER; note = 2'-O-Methyl-adenosine
  modified_base 48: mod_base = OTHER; note = 2'-O-Methyl-adenosine
  modified_base 50: mod_base = OTHER; note = 2'-O-Methyl-uridine
  modified_base 52: mod_base = OTHER; note = 2'-O-Methyl-adenosine
  modified_base 53: mod_base = OTHER; note = 2'-O-Methyl-guanosine
  modified_base 54: mod_base = OTHER; note = 2'-O-Methyl-guanosine
  modified_base 57: mod_base = OTHER; note = 2'-O-Methyl-adenosine
  modified_base 61: mod_base = OTHER; note = 2'-O-Methyl-cytidine
  modified_base 66: mod_base = OTHER; note = 2'-O-Methyl-uridine
  modified_base 67: mod_base = OTHER; note = 2'-O-Methyl-cytidine
  modified_base 70: mod_base = OTHER; note = 2'-O-Methyl-cytidine
  modified_base 71: mod_base = OTHER; note = 2'-O-Methyl-uridine
  modified_base 72: mod_base = OTHER; note = 2'-O-Methyl-uridine
  modified_base 74: mod_base = OTHER; note = 2'-O-Methyl-adenosine
  modified_base 75: mod_base = OTHER; note = 2'-O-Methyl-adenosine
  modified_base 76: mod_base = OTHER; note = 2'-O-Methyl-adenosine
  modified_base 77: mod_base = OTHER; note = 2'-O-Methyl-adenosine
  modified_base 78: mod_base = OTHER; note = 2'-O-Methyl-adenosine
  modified_base 79: mod_base = OTHER; note = 2'-O-Methyl-guanosine
  modified_base 80: mod_base = OTHER; note = 2'-O-Methyl-uridine
  modified_base 82: mod_base = OTHER; note = 2'-O-Methyl-guanosine
  modified_base 83: mod_base = OTHER; note = 2'-O-Methyl-cytidine
  modified_base 84: mod_base = OTHER; note = 2'-O-Methyl-adenosine
  modified_base 85: mod_base = OTHER; note = 2'-O-Methyl-cytidine
  modified_base 86: mod_base = OTHER; note = 2'-O-Methyl-cytidine
  modified_base 87: mod_base = OTHER; note = 2'-O-Methyl-guanosine
  modified_base 89: mod_base = OTHER; note = 2'-O-Methyl-guanosine
  modified_base 92: mod_base = OTHER; note = 2'-O-Methyl-guanosine
  modified_base 93: mod_base = OTHER; note = 2'-O-Methyl-guanosine
  modified_base 94: mod_base = OTHER; note = 2'-O-Methyl-uridine
  modified_base 95: mod_base = OTHER; note = 2'-O-Methyl-guanosine
  modified_base 96: mod_base = OTHER; note = 2'-O-Methyl-cytidine
  modified_base 97: mod_base = OTHER; note = 2'-O-Methyl-uridine
  modified_base 98: mod_base = OTHER; note = 2'-O-Methyl-uridine phosphorothioate
  modified_base 99: mod_base = OTHER; note = 2'-O-Methyl-uridine phosphorothioate
  modified_base 100: mod_base = OTHER; note = 2'-O-Methyl-uridine

SEQ ID NO: 1690 - RNA, 100 nt, synthetic construct; identical to SEQ ID NO: 422
  source 1..100: mol_type = other RNA; note = Description of Artificial Sequence: Synthetic polynucleotide
  modified_base 1: mod_base = OTHER; note = 2'-O-Methyl-guanosine phosphorothioate
  modified_base 2: mod_base = OTHER; note = 2'-O-Methyl-adenosine phosphorothioate
  modified_base 3: mod_base = OTHER; note = 2'-O-Methyl-guanosine
  modified_base 21: mod_base = OTHER; note = 2'-O-Methyl-guanosine
  modified_base 25: mod_base = OTHER; note = uridine phosphorothioate
  modified_base 28: mod_base = OTHER; note = 2'-O-Methyl-adenosine
  modified_base 29: mod_base = OTHER; note = 2'-O-Methyl-guanosine
  modified_base 30: mod_base = OTHER; note = 2'-O-Methyl-cytidine
  modified_base 31: mod_base = OTHER; note = 2'-O-Methyl-uridine
  modified_base 32: mod_base = OTHER; note = 2'-O-Methyl-adenosine
  modified_base 34: mod_base = OTHER; note = 2'-O-Methyl-adenosine
  modified_base 35: mod_base = OTHER; note = 2'-O-Methyl-adenosine
  modified_base 36: mod_base = OTHER; note = 2'-O-Methyl-adenosine
  modified_base 37: mod_base = OTHER; note = 2'-O-Methyl-uridine
  modified_base 38: mod_base = OTHER; note = 2'-O-Methyl-adenosine
  modified_base 39: mod_base = OTHER; note = 2'-O-Methyl-guanosine
  modified_base 40: mod_base = OTHER; note = 2'-O-Methyl-cytidine
  modified_base 41: mod_base = OTHER; note = 2'-O-Methyl-adenosine
  modified_base 42: mod_base = OTHER; note = 2'-O-Methyl-adenosine
  modified_base 46: mod_base = OTHER; note = 2'-O-Methyl-adenosine
  modified_base 48: mod_base = OTHER; note = 2'-O-Methyl-adenosine
  modified_base 50: mod_base = OTHER; note = 2'-O-Methyl-uridine
  modified_base 52: mod_base = OTHER; note = 2'-O-Methyl-adenosine
  modified_base 53: mod_base = OTHER; note = 2'-O-Methyl-guanosine
  modified_base 54: mod_base = OTHER; note = 2'-O-Methyl-guanosine
  modified_base 57: mod_base = OTHER; note = 2'-O-Methyl-adenosine
  modified_base 61: mod_base = OTHER; note = 2'-O-Methyl-cytidine
  modified_base 66: mod_base = OTHER; note = 2'-O-Methyl-uridine
  modified_base 67: mod_base = OTHER; note = 2'-O-Methyl-cytidine
  modified_base 70: mod_base = OTHER; note = 2'-O-Methyl-cytidine
  modified_base 71: mod_base = OTHER; note = 2'-O-Methyl-uridine
  modified_base 72: mod_base = OTHER; note = 2'-O-Methyl-uridine
  modified_base 74: mod_base = OTHER; note = 2'-O-Methyl-adenosine
  modified_base 75: mod_base = OTHER; note = 2'-O-Methyl-adenosine
  modified_base 76: mod_base = OTHER; note = 2'-O-Methyl-adenosine
  modified_base 77: mod_base = OTHER; note = 2'-O-Methyl-adenosine
  modified_base 78: mod_base = OTHER; note = 2'-O-Methyl-adenosine
  modified_base 79: mod_base = OTHER; note = 2'-O-Methyl-guanosine
  modified_base 80: mod_base = OTHER; note = 2'-O-Methyl-uridine
  modified_base 82: mod_base = OTHER; note = 2'-O-Methyl-guanosine
  modified_base 83: mod_base = OTHER; note = 2'-O-Methyl-cytidine
  modified_base 84: mod_base = OTHER; note = 2'-O-Methyl-adenosine
  modified_base 85: mod_base = OTHER; note = 2'-O-Methyl-cytidine
  modified_base 86: mod_base = OTHER; note = 2'-O-Methyl-cytidine
  modified_base 87: mod_base = OTHER; note = 2'-O-Methyl-guanosine
  modified_base 89: mod_base = OTHER; note = 2'-O-Methyl-guanosine
  modified_base 92: mod_base = OTHER; note = 2'-O-Methyl-guanosine
  modified_base 93: mod_base = OTHER; note = 2'-O-Methyl-guanosine
  modified_base 94: mod_base = OTHER; note = 2'-O-Methyl-uridine
  modified_base 95: mod_base = OTHER; note = 2'-O-Methyl-guanosine
  modified_base 96: mod_base = OTHER; note = 2'-O-Methyl-cytidine
  modified_base 97: mod_base = OTHER; note = 2'-O-Methyl-uridine
  modified_base 98: mod_base = OTHER; note = 2'-O-Methyl-uridine phosphorothioate
  modified_base 99: mod_base = OTHER; note = 2'-O-Methyl-uridine phosphorothioate
  modified_base 100: mod_base = OTHER; note = 2'-O-Methyl-uridine

SEQ ID NO: 1691 - RNA, 100 nt, synthetic construct; identical to SEQ ID NO: 55
  source 1..100: mol_type = other RNA; note = Description of Artificial Sequence: Synthetic polynucleotide
  modified_base 1: mod_base = OTHER; note = 2'-O-Methyl-cytidine phosphorothioate
  modified_base 2: mod_base = OTHER; note = 2'-O-Methyl-adenosine phosphorothioate
  modified_base 3: mod_base = OTHER; note = 2'-O-Methyl-guanosine
  modified_base 21: mod_base = OTHER; note = 2'-O-Methyl-guanosine
  modified_base 25: mod_base = OTHER; note = uridine phosphorothioate
  modified_base 28: mod_base = OTHER; note = 2'-O-Methyl-adenosine
  modified_base 29: mod_base = OTHER; note = 2'-O-Methyl-guanosine
  modified_base 30: mod_base = OTHER; note = 2'-O-Methyl-cytidine
  modified_base 31: mod_base = OTHER; note = 2'-O-Methyl-uridine
  modified_base 32: mod_base = OTHER; note = 2'-O-Methyl-adenosine
  modified_base 34: mod_base = OTHER; note = 2'-O-Methyl-adenosine
  modified_base 35: mod_base = OTHER; note = 2'-O-Methyl-adenosine
  modified_base 36: mod_base = OTHER; note = 2'-O-Methyl-adenosine
  modified_base 37: mod_base = OTHER; note = 2'-O-Methyl-uridine
  modified_base 38: mod_base = OTHER; note = 2'-O-Methyl-adenosine
  modified_base 39: mod_base = OTHER; note = 2'-O-Methyl-guanosine
  modified_base 40: mod_base = OTHER; note = 2'-O-Methyl-cytidine
  modified_base 41: mod_base = OTHER; note = 2'-O-Methyl-adenosine
  modified_base 42: mod_base = OTHER; note = 2'-O-Methyl-adenosine
  modified_base 46: mod_base = OTHER; note = 2'-O-Methyl-adenosine
  modified_base 48: mod_base = OTHER; note = 2'-O-Methyl-adenosine
  modified_base 50: mod_base = OTHER; note = 2'-O-Methyl-uridine
  modified_base 52: mod_base = OTHER; note = 2'-O-Methyl-adenosine
  modified_base 53: mod_base = OTHER; note = 2'-O-Methyl-guanosine
  modified_base 54: mod_base = OTHER; note = 2'-O-Methyl-guanosine
  modified_base 55: mod_base = OTHER; note = 2'-O-Methyl-cytidine
  modified_base 56: mod_base = OTHER; note = 2'-O-Methyl-uridine
  modified_base 57: mod_base = OTHER; note = 2'-O-Methyl-adenosine
  modified_base 60: mod_base = OTHER; note = 2'-O-Methyl-cytidine
  modified_base 61: mod_base = OTHER; note = 2'-O-Methyl-cytidine
  modified_base 66: mod_base = OTHER; note = 2'-O-Methyl-uridine
  modified_base 67: mod_base = OTHER; note = 2'-O-Methyl-cytidine
  modified_base 70: mod_base = OTHER; note = 2'-O-Methyl-cytidine
  modified_base 71: mod_base = OTHER; note = 2'-O-Methyl-uridine
  modified_base 72: mod_base = OTHER; note = 2'-O-Methyl-uridine
  modified_base 74: mod_base = OTHER; note = 2'-O-Methyl-adenosine
  modified_base 75: mod_base = OTHER; note = 2'-O-Methyl-adenosine
  modified_base 76: mod_base = OTHER; note = 2'-O-Methyl-adenosine
  modified_base 77: mod_base = OTHER; note = 2'-O-Methyl-adenosine
  modified_base 78: mod_base = OTHER; note = 2'-O-Methyl-adenosine
  modified_base 79: mod_base = OTHER; note = 2'-O-Methyl-guanosine
  modified_base 80: mod_base = OTHER; note = 2'-O-Methyl-uridine
  modified_base 81: mod_base = OTHER; note = 2'-O-Methyl-guanosine
  modified_base 83: mod_base = OTHER; note = 2'-O-Methyl-cytidine
  modified_base 84: mod_base = OTHER; note = 2'-O-Methyl-adenosine
  modified_base 85: mod_base = OTHER; note = 2'-O-Methyl-cytidine
  modified_base 86: mod_base = OTHER; note = 2'-O-Methyl-cytidine
  modified_base 87: mod_base = OTHER; note = 2'-O-Methyl-guanosine
  modified_base 88: mod_base = OTHER; note = 2'-O-Methyl-adenosine
  modified_base 89: mod_base = OTHER; note = 2'-O-Methyl-guanosine
  modified_base 90: mod_base = OTHER; note = 2'-O-Methyl-uridine
  modified_base 91: mod_base = OTHER; note = 2'-O-Methyl-cytidine
  modified_base 92: mod_base = OTHER; note = 2'-O-Methyl-guanosine
  modified_base 93: mod_base = OTHER; note = 2'-O-Methyl-guanosine
  modified_base 94: mod_base = OTHER; note = 2'-O-Methyl-uridine
  modified_base 95: mod_base = OTHER; note = 2'-O-Methyl-guanosine
  modified_base 96: mod_base = OTHER; note = 2'-O-Methyl-cytidine
  modified_base 97: mod_base = OTHER; note = 2'-O-Methyl-uridine
  modified_base 98: mod_base = OTHER; note = 2'-O-Methyl-uridine phosphorothioate
  modified_base 99: mod_base = OTHER; note = 2'-O-Methyl-uridine phosphorothioate
  modified_base 100: mod_base = OTHER; note = 2'-O-Methyl-uridine

SEQ ID NO: 1692 - RNA, 100 nt, synthetic construct; identical to SEQ ID NO: 55
  source 1..100: mol_type = other RNA; note = Description of Artificial Sequence: Synthetic polynucleotide
  modified_base 1: mod_base = OTHER; note = 2'-O-Methyl-cytidine phosphorothioate
  modified_base 2: mod_base = OTHER; note = 2'-O-Methyl-adenosine phosphorothioate
  modified_base 3: mod_base = OTHER; note = 2'-O-Methyl-guanosine
  modified_base 21: mod_base = OTHER; note = 2'-O-Methyl-guanosine
  modified_base 25: mod_base = OTHER; note = uridine phosphorothioate
  modified_base 28: mod_base = OTHER; note = 2'-O-Methyl-adenosine
  modified_base 29: mod_base = OTHER; note = 2'-O-Methyl-guanosine
  modified_base 30: mod_base = OTHER; note = 2'-O-Methyl-cytidine
  modified_base 31: mod_base = OTHER; note = 2'-O-Methyl-uridine
  modified_base 32: mod_base = OTHER; note = 2'-O-Methyl-adenosine
  modified_base 34: mod_base = OTHER; note = 2'-O-Methyl-adenosine
  modified_base 35: mod_base = OTHER; note = 2'-O-Methyl-adenosine
  modified_base 36: mod_base = OTHER; note = 2'-O-Methyl-adenosine
  modified_base 37: mod_base = OTHER; note = 2'-O-Methyl-uridine
  modified_base 38: mod_base = OTHER; note = 2'-O-Methyl-adenosine
  modified_base 39: mod_base = OTHER; note = 2'-O-Methyl-guanosine
  modified_base 40: mod_base = OTHER; note = 2'-O-Methyl-cytidine
  modified_base 41: mod_base = OTHER; note = 2'-O-Methyl-adenosine
  modified_base 42: mod_base = OTHER; note = 2'-O-Methyl-adenosine
  modified_base 45: mod_base = OTHER; note = uridine phosphorothioate
  modified_base 46: mod_base = OTHER; note = 2'-O-Methyl-adenosine
  modified_base 48: mod_base = OTHER; note = 2'-O-Methyl-adenosine
  modified_base 50: mod_base = OTHER; note = 2'-O-Methyl-uridine
  modified_base 52: mod_base = OTHER; note = 2'-O-Methyl-adenosine
  modified_base 53: mod_base = OTHER; note = 2'-O-Methyl-guanosine
  modified_base 54: mod_base = OTHER; note = 2'-O-Methyl-guanosine
  modified_base 55: mod_base = OTHER; note = 2'-O-Methyl-cytidine
  modified_base 56: mod_base = OTHER; note = 2'-O-Methyl-uridine
  modified_base 57: mod_base = OTHER; note = 2'-O-Methyl-adenosine
  modified_base 60: mod_base = OTHER; note = 2'-O-Methyl-cytidine
  modified_base 61: mod_base = OTHER; note = 2'-O-Methyl-cytidine
  modified_base 66: mod_base = OTHER; note = 2'-O-Methyl-uridine
  modified_base 67: mod_base = OTHER; note = 2'-O-Methyl-cytidine
  modified_base 70: mod_base = OTHER; note = 2'-O-Methyl-cytidine
  modified_base 71: mod_base = OTHER; note = 2'-O-Methyl-uridine
  modified_base 72: mod_base = OTHER; note = 2'-O-Methyl-uridine
  modified_base 74: mod_base = OTHER; note = 2'-O-Methyl-adenosine
  modified_base 75: mod_base = OTHER; note = 2'-O-Methyl-adenosine
  modified_base 76: mod_base = OTHER; note = 2'-O-Methyl-adenosine
  modified_base 77: mod_base = OTHER; note = 2'-O-Methyl-adenosine
  modified_base 78: mod_base = OTHER; note = 2'-O-Methyl-adenosine
  modified_base 79: mod_base = OTHER; note = 2'-O-Methyl-guanosine
  modified_base 80: mod_base = OTHER; note = 2'-O-Methyl-uridine
  modified_base 82: mod_base = OTHER; note = 2'-O-Methyl-guanosine
  modified_base 83: mod_base = OTHER; note = 2'-O-Methyl-cytidine
  modified_base 84: mod_base = OTHER; note = 2'-O-Methyl-adenosine
  modified_base 85: mod_base = OTHER; note = 2'-O-Methyl-cytidine
  modified_base 86: mod_base = OTHER; note = 2'-O-Methyl-cytidine
  modified_base 87: mod_base = OTHER; note = 2'-O-Methyl-guanosine
  modified_base 89: mod_base = OTHER; note = 2'-O-Methyl-guanosine
  modified_base 92: mod_base = OTHER; note = 2'-O-Methyl-guanosine
  modified_base 93: mod_base = OTHER; note = 2'-O-Methyl-guanosine
  modified_base 94: mod_base = OTHER; note = 2'-O-Methyl-uridine
  modified_base 95: mod_base = OTHER; note = 2'-O-Methyl-guanosine
  modified_base 96: mod_base = OTHER; note = 2'-O-Methyl-cytidine
  modified_base 97: mod_base = OTHER; note = 2'-O-Methyl-uridine
  modified_base 98: mod_base = OTHER; note = 2'-O-Methyl-uridine phosphorothioate
  modified_base 99: mod_base = OTHER; note = 2'-O-Methyl-uridine phosphorothioate
  modified_base 100: mod_base = OTHER; note = 2'-O-Methyl-uridine

SEQ ID NO: 1693 - RNA, 100 nt, synthetic construct; identical to SEQ ID NO: 421
  source 1..100: mol_type = other RNA; note = Description of Artificial Sequence: Synthetic polynucleotide
  modified_base 1: mod_base = OTHER; note = 2'-O-Methyl-cytidine phosphorothioate
  modified_base 2: mod_base = OTHER; note = 2'-O-Methyl-cytidine phosphorothioate
  modified_base 3: mod_base = OTHER; note = 2'-O-Methyl-cytidine
  modified_base 21: mod_base = OTHER; note = 2'-O-Methyl-guanosine
  modified_base 25: mod_base = OTHER; note = uridine phosphorothioate
  modified_base 28: mod_base = OTHER; note = 2'-O-Methyl-adenosine
  modified_base 29: mod_base = OTHER; note = 2'-O-Methyl-guanosine
  modified_base 30: mod_base = OTHER; note = 2'-O-Methyl-cytidine
  modified_base 31: mod_base = OTHER; note = 2'-O-Methyl-uridine
  modified_base 32: mod_base = OTHER; note = 2'-O-Methyl-adenosine
  modified_base 34: mod_base = OTHER; note = 2'-O-Methyl-adenosine
  modified_base 35: mod_base = OTHER; note = 2'-O-Methyl-adenosine
  modified_base 36: mod_base = OTHER; note = 2'-O-Methyl-adenosine
  modified_base 37: mod_base = OTHER; note = 2'-O-Methyl-uridine
  modified_base 38: mod_base = OTHER; note = 2'-O-Methyl-adenosine
  modified_base 39: mod_base = OTHER; note = 2'-O-Methyl-guanosine
  modified_base 40: mod_base = OTHER; note = 2'-O-Methyl-cytidine
  modified_base 41: mod_base = OTHER; note = 2'-O-Methyl-adenosine
  modified_base 42: mod_base = OTHER; note = 2'-O-Methyl-adenosine
  modified_base 46: mod_base = OTHER; note = 2'-O-Methyl-adenosine
  modified_base 48: mod_base = OTHER; note = 2'-O-Methyl-adenosine
  modified_base 50: mod_base = OTHER; note = 2'-O-Methyl-uridine
  modified_base 52: mod_base = OTHER; note = 2'-O-Methyl-adenosine
  modified_base 53: mod_base = OTHER; note = 2'-O-Methyl-guanosine
  modified_base 54: mod_base = OTHER; note = 2'-O-Methyl-guanosine
  modified_base 57: mod_base = OTHER; note = 2'-O-Methyl-adenosine
  modified_base 61: mod_base = OTHER; note = 2'-O-Methyl-cytidine
  modified_base 64: mod_base = OTHER; note = uridine phosphorothioate
  modified_base 66: mod_base = OTHER; note = 2'-O-Methyl-uridine
  modified_base 67: mod_base = OTHER; note = 2'-O-Methyl-cytidine
  modified_base 70: mod_base = OTHER; note = 2'-O-Methyl-cytidine
  modified_base 71: mod_base = OTHER; note = 2'-O-Methyl-uridine
  modified_base 72: mod_base = OTHER; note = 2'-O-Methyl-uridine
  modified_base 74: mod_base = OTHER; note = 2'-O-Methyl-adenosine
  modified_base 75: mod_base = OTHER; note = 2'-O-Methyl-adenosine
  modified_base 76: mod_base = OTHER; note = 2'-O-Methyl-adenosine
  modified_base 77: mod_base = OTHER; note = 2'-O-Methyl-adenosine
  modified_base 78: mod_base = OTHER; note = 2'-O-Methyl-adenosine
  modified_base 79: mod_base = OTHER; note = 2'-O-Methyl-guanosine
  modified_base 80: mod_base = OTHER; note = 2'-O-Methyl-uridine
  modified_base 82: mod_base = OTHER; note = 2'-O-Methyl-guanosine
  modified_base 83: mod_base = OTHER; note = 2'-O-Methyl-cytidine
  modified_base 84: mod_base = OTHER; note = 2'-O-Methyl-adenosine
  modified_base 85: mod_base = OTHER; note = 2'-O-Methyl-cytidine
  modified_base 86: mod_base = OTHER; note = 2'-O-Methyl-cytidine
  modified_base 87: mod_base = OTHER; note = 2'-O-Methyl-guanosine
  modified_base 89: mod_base = OTHER; note = 2'-O-Methyl-guanosine
  modified_base 92: mod_base = OTHER; note = 2'-O-Methyl-guanosine
  modified_base 93: mod_base = OTHER; note = 2'-O-Methyl-guanosine
  modified_base 94: mod_base = OTHER; note = 2'-O-Methyl-uridine
  modified_base 95: mod_base = OTHER; note = 2'-O-Methyl-guanosine
  modified_base 96: mod_base = OTHER; note = 2'-O-Methyl-cytidine
  modified_base 97: mod_base = OTHER; note = 2'-O-Methyl-uridine
  modified_base 98: mod_base = OTHER; note = 2'-O-Methyl-uridine phosphorothioate
  modified_base 99: mod_base = OTHER; note = 2'-O-Methyl-uridine phosphorothioate
  modified_base 100: mod_base = OTHER; note = 2'-O-Methyl-uridine

SEQ ID NO: 1694 - RNA, 100 nt, synthetic construct; identical to SEQ ID NO: 422
  source 1..100: mol_type = other RNA; note = Description of Artificial Sequence: Synthetic polynucleotide
  modified_base 1: mod_base = OTHER; note = 2'-O-Methyl-guanosine phosphorothioate
  modified_base 2: mod_base = OTHER; note = 2'-O-Methyl-adenosine phosphorothioate
  modified_base 3: mod_base = OTHER; note = 2'-O-Methyl-guanosine
  modified_base 21: mod_base = OTHER; note = 2'-O-Methyl-guanosine
  modified_base 25: mod_base = OTHER; note = uridine phosphorothioate
  modified_base 28: mod_base = OTHER; note = 2'-O-Methyl-adenosine
  modified_base 29: mod_base = OTHER; note = 2'-O-Methyl-guanosine
  modified_base 30: mod_base = OTHER; note = 2'-O-Methyl-cytidine
  modified_base 31: mod_base = OTHER; note = 2'-O-Methyl-uridine
  modified_base 32: mod_base = OTHER; note = 2'-O-Methyl-adenosine
  modified_base 34: mod_base = OTHER; note = 2'-O-Methyl-adenosine
  modified_base 35: mod_base = OTHER; note = 2'-O-Methyl-adenosine
  modified_base 36: mod_base = OTHER; note = 2'-O-Methyl-adenosine
  modified_base 37: mod_base = OTHER; note = 2'-O-Methyl-uridine
  modified_base 38: mod_base = OTHER; note = 2'-O-Methyl-adenosine
  modified_base 39: mod_base = OTHER; note = 2'-O-Methyl-guanosine
  modified_base 40: mod_base = OTHER; note = 2'-O-Methyl-cytidine
  modified_base 41: mod_base = OTHER; note = 2'-O-Methyl-adenosine
  modified_base 42: mod_base = OTHER; note = 2'-O-Methyl-adenosine
  modified_base 46: mod_base = OTHER; note = 2'-O-Methyl-adenosine
  modified_base 48: mod_base = OTHER; note = 2'-O-Methyl-adenosine
  modified_base 50: mod_base = OTHER; note = 2'-O-Methyl-uridine
  modified_base 52: mod_base = OTHER; note = 2'-O-Methyl-adenosine
  modified_base 53: mod_base = OTHER; note = 2'-O-Methyl-guanosine
  modified_base 54: mod_base = OTHER; note = 2'-O-Methyl-guanosine
  modified_base 57: mod_base = OTHER; note = 2'-O-Methyl-adenosine
  modified_base 61: mod_base = OTHER; note = 2'-O-Methyl-cytidine
  modified_base 64: mod_base = OTHER; note = uridine phosphorothioate
  modified_base 66: mod_base = OTHER; note = 2'-O-Methyl-uridine
  modified_base 67: mod_base = OTHER; note = 2'-O-Methyl-cytidine
  modified_base 70: mod_base = OTHER; note = 2'-O-Methyl-cytidine
  modified_base 71: mod_base = OTHER; note = 2'-O-Methyl-uridine
  modified_base 72: mod_base = OTHER; note = 2'-O-Methyl-uridine
  modified_base 74: mod_base = OTHER; note = 2'-O-Methyl-adenosine
  modified_base 75: mod_base = OTHER; note = 2'-O-Methyl-adenosine
  modified_base 76: mod_base = OTHER; note = 2'-O-Methyl-adenosine
  modified_base 77: mod_base = OTHER; note = 2'-O-Methyl-adenosine
  modified_base 78: mod_base = OTHER; note = 2'-O-Methyl-adenosine
  modified_base 79: mod_base = OTHER; note = 2'-O-Methyl-guanosine
  modified_base 80: mod_base = OTHER; note = 2'-O-Methyl-uridine
  modified_base 82: mod_base = OTHER; note = 2'-O-Methyl-guanosine
  modified_base 83: mod_base = OTHER; note = 2'-O-Methyl-cytidine
  modified_base 84: mod_base = OTHER; note = 2'-O-Methyl-adenosine
  modified_base 85: mod_base = OTHER; note = 2'-O-Methyl-cytidine
  modified_base 86: mod_base = OTHER; note = 2'-O-Methyl-cytidine
  modified_base 87: mod_base = OTHER; note = 2'-O-Methyl-guanosine
  modified_base 89: mod_base = OTHER; note = 2'-O-Methyl-guanosine
  modified_base 92: mod_base = OTHER; note = 2'-O-Methyl-guanosine
  modified_base 93: mod_base = OTHER; note = 2'-O-Methyl-guanosine
  modified_base 94: mod_base = OTHER; note = 2'-O-Methyl-uridine
  modified_base 95: mod_base = OTHER; note = 2'-O-Methyl-guanosine
  modified_base 96: mod_base = OTHER; note = 2'-O-Methyl-cytidine
  modified_base 97: mod_base = OTHER; note = 2'-O-Methyl-uridine
  modified_base 98: mod_base = OTHER; note = 2'-O-Methyl-uridine phosphorothioate
  modified_base 99: mod_base = OTHER; note = 2'-O-Methyl-uridine phosphorothioate
  modified_base 100: mod_base = OTHER; note = 2'-O-Methyl-uridine

SEQ ID NO: 1695 - RNA, 100 nt, synthetic construct; identical to SEQ ID NO: 55
  source 1..100: mol_type = other RNA; note = Description of Artificial Sequence: Synthetic polynucleotide
  modified_base 1: mod_base = OTHER; note = 2'-O-Methyl-cytidine phosphorothioate
  modified_base 2: mod_base = OTHER; note = 2'-O-Methyl-adenosine phosphorothioate
  modified_base 3: mod_base = OTHER; note = 2'-O-Methyl-guanosine
  modified_base 21: mod_base = OTHER; note = 2'-O-Methyl-guanosine
  modified_base 25: mod_base = OTHER; note = uridine phosphorothioate
  modified_base 28: mod_base = OTHER; note = 2'-O-Methyl-adenosine
  modified_base 29: mod_base = OTHER; note = 2'-O-Methyl-guanosine
  modified_base 30: mod_base = OTHER; note = 2'-O-Methyl-cytidine
  modified_base 31: mod_base = OTHER; note = 2'-O-Methyl-uridine
  modified_base 32: mod_base = OTHER; note = 2'-O-Methyl-adenosine
  modified_base 34: mod_base = OTHER; note = 2'-O-Methyl-adenosine
  modified_base 35: mod_base = OTHER; note = 2'-O-Methyl-adenosine
  modified_base 36: mod_base = OTHER; note = 2'-O-Methyl-adenosine
  modified_base 37: mod_base = OTHER; note = 2'-O-Methyl-uridine
  modified_base 38: mod_base = OTHER; note = 2'-O-Methyl-adenosine
  modified_base 39: mod_base = OTHER; note = 2'-O-Methyl-guanosine
  modified_base 40: mod_base = OTHER; note = 2'-O-Methyl-cytidine
  modified_base 41: mod_base = OTHER; note = 2'-O-Methyl-adenosine
  modified_base 42: mod_base = OTHER; note = 2'-O-Methyl-adenosine
  modified_base 46: mod_base = OTHER; note = 2'-O-Methyl-adenosine
  modified_base 48: mod_base = OTHER; note = 2'-O-Methyl-adenosine
  modified_base 50: mod_base = OTHER; note = 2'-O-Methyl-uridine
  modified_base 52: mod_base = OTHER; note = 2'-O-Methyl-adenosine
  modified_base 53: mod_base = OTHER; note = 2'-O-Methyl-guanosine
  modified_base 54: mod_base = OTHER; note = 2'-O-Methyl-guanosine
  modified_base 55: mod_base = OTHER; note = 2'-O-Methyl-cytidine
  modified_base 56: mod_base = OTHER; note = 2'-O-Methyl-uridine
  modified_base 57: mod_base = OTHER; note = 2'-O-Methyl-adenosine
  modified_base 60: mod_base = OTHER; note = 2'-O-Methyl-cytidine
  modified_base 61: mod_base = OTHER; note = 2'-O-Methyl-cytidine
  modified_base 64: mod_base = OTHER; note = uridine phosphorothioate
  modified_base 66: mod_base = OTHER; note = 2'-O-Methyl-uridine
  modified_base 67: mod_base = OTHER; note = 2'-O-Methyl-cytidine
  modified_base 70: mod_base = OTHER; note = 2'-O-Methyl-cytidine
  modified_base 71: mod_base = OTHER; note = 2'-O-Methyl-uridine
  modified_base 72: mod_base = OTHER; note = 2'-O-Methyl-uridine
  modified_base 74: mod_base = OTHER; note = 2'-O-Methyl-adenosine
  modified_base 75: mod_base = OTHER; note = 2'-O-Methyl-adenosine
  modified_base 76: mod_base = OTHER; note = 2'-O-Methyl-adenosine
  modified_base 77: mod_base = OTHER; note = 2'-O-Methyl-adenosine
  modified_base 78: mod_base = OTHER; note = 2'-O-Methyl-adenosine
  modified_base 79: mod_base = OTHER; note = 2'-O-Methyl-guanosine
  modified_base 80: mod_base = OTHER; note = 2'-O-Methyl-uridine
  modified_base 81: mod_base = OTHER; note = 2'-O-Methyl-guanosine
  modified_base 83: mod_base = OTHER; note = 2'-O-Methyl-cytidine
  modified_base 84: mod_base = OTHER; note = 2'-O-Methyl-adenosine
  modified_base 85: mod_base = OTHER; note = 2'-O-Methyl-cytidine
  modified_base 86: mod_base = OTHER; note = 2'-O-Methyl-cytidine
  modified_base 87: mod_base = OTHER; note = 2'-O-Methyl-guanosine
  modified_base 88: mod_base = OTHER; note = 2'-O-Methyl-adenosine
  modified_base 89: mod_base = OTHER; note = 2'-O-Methyl-guanosine
  modified_base 90: mod_base = OTHER; note = 2'-O-Methyl-uridine
  modified_base 91: mod_base = OTHER; note = 2'-O-Methyl-cytidine
  modified_base 92: mod_base = OTHER; note = 2'-O-Methyl-guanosine
  modified_base 93: mod_base = OTHER; note = 2'-O-Methyl-guanosine
  modified_base 94: mod_base = OTHER; note = 2'-O-Methyl-uridine
  modified_base 95: mod_base = OTHER; note = 2'-O-Methyl-guanosine
  modified_base 96: mod_base = OTHER; note = 2'-O-Methyl-cytidine
  modified_base 97: mod_base = OTHER; note = 2'-O-Methyl-uridine
  modified_base 98: mod_base = OTHER; note = 2'-O-Methyl-uridine phosphorothioate
  modified_base 99: mod_base = OTHER; note = 2'-O-Methyl-uridine phosphorothioate
  modified_base 100: mod_base = OTHER; note = 2'-O-Methyl-uridine

SEQ ID NO: 1696 - RNA, 100 nt, synthetic construct; identical to SEQ ID NO: 421
  source 1..100: mol_type = other RNA; note = Description of Artificial Sequence: Synthetic polynucleotide
  modified_base 1: mod_base = OTHER; note = 2'-O-Methyl-cytidine phosphorothioate
  modified_base 2: mod_base = OTHER; note = 2'-O-Methyl-cytidine phosphorothioate
  modified_base 3: mod_base = OTHER; note = 2'-O-Methyl-cytidine
  modified_base 21: mod_base = OTHER; note = 2'-O-Methyl-guanosine
  modified_base 25: mod_base = OTHER; note = uridine phosphorothioate
  modified_base 28: mod_base = OTHER; note = 2'-O-Methyl-adenosine
  modified_base 29: mod_base = OTHER; note = 2'-O-Methyl-guanosine
  modified_base 30: mod_base = OTHER; note = 2'-O-Methyl-cytidine
  modified_base 31: mod_base = OTHER; note = 2'-O-Methyl-uridine
  modified_base 32: mod_base = OTHER; note = 2'-O-Methyl-adenosine
  modified_base 34: mod_base = OTHER; note = 2'-O-Methyl-adenosine
  modified_base 35: mod_base = OTHER; note = 2'-O-Methyl-adenosine
  modified_base 36: mod_base = OTHER; note = 2'-O-Methyl-adenosine
  modified_base 37: mod_base = OTHER; note = 2'-O-Methyl-uridine
  modified_base 38: mod_base = OTHER; note = 2'-O-Methyl-adenosine
  modified_base 39: mod_base = OTHER; note = 2'-O-Methyl-guanosine
  modified_base 40: mod_base = OTHER; note = 2'-O-Methyl-cytidine
  modified_base 41: mod_base = OTHER; note = 2'-O-Methyl-adenosine
  modified_base 42: mod_base = OTHER; note = 2'-O-Methyl-adenosine
  modified_base 45: mod_base = OTHER; note = uridine phosphorothioate
  modified_base 46: mod_base = OTHER; note = 2'-O-Methyl-adenosine
  modified_base 48: mod_base = OTHER; note = 2'-O-Methyl-adenosine
  modified_base 50: mod_base = OTHER; note = 2'-O-Methyl-uridine
  modified_base 52: mod_base = OTHER; note = 2'-O-Methyl-adenosine
  modified_base 53: mod_base = OTHER; note = 2'-O-Methyl-guanosine
  modified_base 54: mod_base = OTHER; note = 2'-O-Methyl-guanosine
  modified_base 57: mod_base = OTHER; note = 2'-O-Methyl-adenosine
  modified_base 61: mod_base = OTHER; note = 2'-O-Methyl-cytidine
  modified_base 64: mod_base = OTHER; note = uridine phosphorothioate
  modified_base 66: mod_base = OTHER; note = 2'-O-Methyl-uridine
  modified_base 67: mod_base = OTHER; note = 2'-O-Methyl-cytidine
  modified_base 70: mod_base = OTHER; note = 2'-O-Methyl-cytidine
  modified_base 71: mod_base = OTHER; note = 2'-O-Methyl-uridine
  modified_base 72: mod_base = OTHER; note = 2'-O-Methyl-uridine
  modified_base 74: mod_base = OTHER; note = 2'-O-Methyl-adenosine
  modified_base 75: mod_base = OTHER; note = 2'-O-Methyl-adenosine
  modified_base 76: mod_base = OTHER; note = 2'-O-Methyl-adenosine
  modified_base 77: mod_base = OTHER; note = 2'-O-Methyl-adenosine
  modified_base 78: mod_base = OTHER; note = 2'-O-Methyl-adenosine
  modified_base 79: mod_base = OTHER; note = 2'-O-Methyl-guanosine
  modified_base 80: mod_base = OTHER; note = 2'-O-Methyl-uridine
  modified_base 82: mod_base = OTHER; note = 2'-O-Methyl-guanosine
  modified_base 83: mod_base = OTHER; note = 2'-O-Methyl-cytidine
  modified_base 84: mod_base = OTHER; note = 2'-O-Methyl-adenosine
  modified_base 85: mod_base = OTHER; note = 2'-O-Methyl-cytidine
  modified_base 86: mod_base = OTHER; note = 2'-O-Methyl-cytidine
  modified_base 87: mod_base = OTHER; note = 2'-O-Methyl-guanosine
  modified_base 89: mod_base = OTHER; note = 2'-O-Methyl-guanosine
  modified_base 92: mod_base = OTHER; note = 2'-O-Methyl-guanosine
  modified_base 93: mod_base = OTHER; note = 2'-O-Methyl-guanosine
  modified_base 94: mod_base = OTHER; note = 2'-O-Methyl-uridine
  modified_base 95: mod_base = OTHER; note = 2'-O-Methyl-guanosine
  modified_base 96: mod_base = OTHER; note = 2'-O-Methyl-cytidine
  modified_base 97: mod_base = OTHER; note = 2'-O-Methyl-uridine
  modified_base 98: mod_base = OTHER; note = 2'-O-Methyl-uridine phosphorothioate
  modified_base 99: mod_base = OTHER; note = 2'-O-Methyl-uridine phosphorothioate
  modified_base 100: mod_base = OTHER; note = 2'-O-Methyl-uridine

SEQ ID NO: 1697 - RNA, 100 nt, synthetic construct; identical to SEQ ID NO: 422
  source 1..100: mol_type = other RNA; note = Description of Artificial Sequence: Synthetic polynucleotide
  modified_base 1: mod_base = OTHER; note = 2'-O-Methyl-guanosine phosphorothioate
  modified_base 2: mod_base = OTHER; note = 2'-O-Methyl-adenosine phosphorothioate
  modified_base 3: mod_base = OTHER; note = 2'-O-Methyl-guanosine
  modified_base 21: mod_base = OTHER; note = 2'-O-Methyl-guanosine
  modified_base 25: mod_base = OTHER; note = uridine phosphorothioate
  modified_base 28: mod_base = OTHER; note = 2'-O-Methyl-adenosine
  modified_base 29: mod_base = OTHER; note = 2'-O-Methyl-guanosine
  modified_base 30: mod_base = OTHER; note = 2'-O-Methyl-cytidine
  modified_base 31: mod_base = OTHER; note = 2'-O-Methyl-uridine
  modified_base 32: mod_base = OTHER; note = 2'-O-Methyl-adenosine
  modified_base 34: mod_base = OTHER; note = 2'-O-Methyl-adenosine
  modified_base 35: mod_base = OTHER; note = 2'-O-Methyl-adenosine
  modified_base 36: mod_base = OTHER; note = 2'-O-Methyl-adenosine
  modified_base 37: mod_base = OTHER; note = 2'-O-Methyl-uridine
  modified_base 38: mod_base = OTHER; note = 2'-O-Methyl-adenosine
  modified_base 39: mod_base = OTHER; note = 2'-O-Methyl-guanosine
  modified_base 40: mod_base = OTHER; note = 2'-O-Methyl-cytidine
  modified_base 41: mod_base = OTHER; note = 2'-O-Methyl-adenosine
  modified_base 42: mod_base = OTHER; note = 2'-O-Methyl-adenosine
  modified_base 45: mod_base = OTHER; note = uridine phosphorothioate
  modified_base 46: mod_base = OTHER; note = 2'-O-Methyl-adenosine
  modified_base 48: mod_base = OTHER; note = 2'-O-Methyl-adenosine
  modified_base 50: mod_base = OTHER; note = 2'-O-Methyl-uridine
  modified_base 52: mod_base = OTHER; note = 2'-O-Methyl-adenosine
  modified_base 53: mod_base = OTHER; note = 2'-O-Methyl-guanosine
  modified_base 54: mod_base = OTHER; note = 2'-O-Methyl-guanosine
  modified_base 57: mod_base = OTHER; note = 2'-O-Methyl-adenosine
  modified_base 61: mod_base = OTHER; note = 2'-O-Methyl-cytidine
  modified_base 64: mod_base = OTHER; note = uridine phosphorothioate
  modified_base 66: mod_base = OTHER; note = 2'-O-Methyl-uridine
  modified_base 67: mod_base = OTHER; note = 2'-O-Methyl-cytidine
  modified_base 70: mod_base = OTHER; note = 2'-O-Methyl-cytidine
  modified_base 71: mod_base = OTHER; note = 2'-O-Methyl-uridine
  modified_base 72: mod_base = OTHER; note = 2'-O-Methyl-uridine
  modified_base 74: mod_base = OTHER; note = 2'-O-Methyl-adenosine
  modified_base 75: mod_base = OTHER; note = 2'-O-Methyl-adenosine
  modified_base 76: mod_base = OTHER; note = 2'-O-Methyl-adenosine
  modified_base 77: mod_base = OTHER; note = 2'-O-Methyl-adenosine
  modified_base 78: mod_base = OTHER; note = 2'-O-Methyl-adenosine
  modified_base 79: mod_base = OTHER; note = 2'-O-Methyl-guanosine
  modified_base 80: mod_base = OTHER; note = 2'-O-Methyl-uridine
  modified_base 82: mod_base = OTHER; note = 2'-O-Methyl-guanosine
  modified_base 83: mod_base = OTHER; note = 2'-O-Methyl-cytidine
  modified_base 84: mod_base = OTHER; note = 2'-O-Methyl-adenosine
  modified_base 85: mod_base = OTHER; note = 2'-O-Methyl-cytidine
  modified_base 86: mod_base = OTHER; note = 2'-O-Methyl-cytidine
  modified_base 87: mod_base = OTHER; note = 2'-O-Methyl-guanosine
  modified_base 89: mod_base = OTHER; note = 2'-O-Methyl-guanosine
  modified_base 92: mod_base = OTHER; note = 2'-O-Methyl-guanosine
  modified_base 93: mod_base = OTHER; note = 2'-O-Methyl-guanosine
  modified_base 94: mod_base = OTHER; note = 2'-O-Methyl-uridine
  modified_base 95: mod_base = OTHER; note = 2'-O-Methyl-guanosine
  modified_base 96: mod_base = OTHER; note = 2'-O-Methyl-cytidine
  modified_base 97: mod_base = OTHER; note = 2'-O-Methyl-uridine
  modified_base 98: mod_base = OTHER; note = 2'-O-Methyl-uridine phosphorothioate
  modified_base 99: mod_base = OTHER; note = 2'-O-Methyl-uridine phosphorothioate
  modified_base 100: mod_base = OTHER; note = 2'-O-Methyl-uridine

SEQ ID NO: 1698 - RNA, 100 nt, synthetic construct; identical to SEQ ID NO: 55
  source 1..100: mol_type = other RNA; note = Description of Artificial Sequence: Synthetic polynucleotide
  modified_base 1: mod_base = OTHER; note = 2'-O-Methyl-cytidine phosphorothioate
  modified_base 2: mod_base = OTHER; note = 2'-O-Methyl-adenosine phosphorothioate
  modified_base 3: mod_base = OTHER; note = 2'-O-Methyl-guanosine
  modified_base 21: mod_base = OTHER; note = 2'-O-Methyl-guanosine
  modified_base 25: mod_base = OTHER; note = uridine phosphorothioate
  modified_base 28: mod_base = OTHER; note = 2'-O-Methyl-adenosine
  modified_base 29: mod_base = OTHER; note = 2'-O-Methyl-guanosine
  modified_base 30: mod_base = OTHER; note = 2'-O-Methyl-cytidine
  modified_base 31: mod_base = OTHER; note = 2'-O-Methyl-uridine
  modified_base 32: mod_base = OTHER; note = 2'-O-Methyl-adenosine
  modified_base 34: mod_base = OTHER; note = 2'-O-Methyl-adenosine
  modified_base 35: mod_base = OTHER; note = 2'-O-Methyl-adenosine
  modified_base 36: mod_base = OTHER; note = 2'-O-Methyl-adenosine
  modified_base 37: mod_base = OTHER; note = 2'-O-Methyl-uridine
  modified_base 38: mod_base = OTHER; note = 2'-O-Methyl-adenosine
  modified_base 39: mod_base = OTHER; note = 2'-O-Methyl-guanosine
  modified_base 40: mod_base = OTHER; note = 2'-O-Methyl-cytidine
  modified_base 41: mod_base = OTHER; note = 2'-O-Methyl-adenosine
  modified_base 42: mod_base = OTHER; note = 2'-O-Methyl-adenosine
  modified_base 45: mod_base = OTHER; note = uridine phosphorothioate
  modified_base 46: mod_base = OTHER; note = 2'-O-Methyl-adenosine
  modified_base 48: mod_base = OTHER; note = 2'-O-Methyl-adenosine
  modified_base 50: mod_base = OTHER; note = 2'-O-Methyl-uridine
  modified_base 52: mod_base = OTHER; note = 2'-O-Methyl-adenosine
  modified_base 53: mod_base = OTHER; note = 2'-O-Methyl-guanosine
  modified_base 54: mod_base = OTHER; note = 2'-O-Methyl-guanosine
  modified_base 55: mod_base = OTHER; note = 2'-O-Methyl-cytidine
  modified_base 56: mod_base = OTHER; note = 2'-O-Methyl-uridine
  modified_base 57: mod_base = OTHER; note = 2'-O-Methyl-adenosine
  modified_base 60: mod_base = OTHER; note = 2'-O-Methyl-cytidine
  modified_base 61: mod_base = OTHER; note = 2'-O-Methyl-cytidine
  modified_base 64: mod_base = OTHER; note = uridine phosphorothioate
  modified_base 66: mod_base = OTHER; note = 2'-O-Methyl-uridine
  modified_base 67: mod_base = OTHER; note = 2'-O-Methyl-cytidine
  modified_base 70: mod_base = OTHER; note = 2'-O-Methyl-cytidine
  modified_base 71: mod_base = OTHER; note = 2'-O-Methyl-uridine
  modified_base 72: mod_base = OTHER; note = 2'-O-Methyl-uridine
  modified_base 74: mod_base = OTHER; note = 2'-O-Methyl-adenosine
  modified_base 75: mod_base = OTHER; note = 2'-O-Methyl-adenosine
  modified_base 76: mod_base = OTHER; note = 2'-O-Methyl-adenosine
  modified_base 77: mod_base = OTHER; note = 2'-O-Methyl-adenosine
  modified_base 78: mod_base = OTHER; note = 2'-O-Methyl-adenosine
  modified_base 79: mod_base = OTHER; note = 2'-O-Methyl-guanosine
  modified_base 80: mod_base = OTHER; note = 2'-O-Methyl-uridine
  modified_base 81: mod_base = OTHER; note = 2'-O-Methyl-guanosine
  modified_base 83: mod_base = OTHER; note = 2'-O-Methyl-cytidine
  modified_base 84: mod_base = OTHER; note = 2'-O-Methyl-adenosine
  modified_base 85: mod_base = OTHER; note = 2'-O-Methyl-cytidine
  modified_base 86: mod_base = OTHER; note = 2'-O-Methyl-cytidine
  modified_base 87: mod_base = OTHER; note = 2'-O-Methyl-guanosine
  modified_base 88: mod_base = OTHER; note = 2'-O-Methyl-adenosine
  modified_base 89: mod_base = OTHER; note = 2'-O-Methyl-guanosine
  modified_base 90: mod_base = OTHER; note = 2'-O-Methyl-uridine
  modified_base 91: mod_base = OTHER; note = 2'-O-Methyl-cytidine
  modified_base 92: mod_base = OTHER; note = 2'-O-Methyl-guanosine
  modified_base 93: mod_base = OTHER; note = 2'-O-Methyl-guanosine
  modified_base 94: mod_base = OTHER; note = 2'-O-Methyl-uridine
  modified_base 95: mod_base = OTHER; note = 2'-O-Methyl-guanosine
  modified_base 96: mod_base = OTHER; note = 2'-O-Methyl-cytidine
  modified_base 97: mod_base = OTHER; note = 2'-O-Methyl-uridine
  modified_base 98: mod_base = OTHER; note = 2'-O-Methyl-uridine phosphorothioate
  modified_base 99: mod_base = OTHER; note = 2'-O-Methyl-uridine phosphorothioate
  modified_base 100: mod_base = OTHER; note = 2'-O-Methyl-uridine

SEQ ID NO: 1699 - RNA, 103 nt, synthetic construct
  source 1..103: mol_type = other RNA; note = Description of Artificial Sequence: Synthetic polynucleotide
  modified_base 1: mod_base = OTHER; note = 2'-O-Methyl-guanosine phosphorothioate
  modified_base 2: mod_base = OTHER; note = 2'-O-Methyl-adenosine phosphorothioate
  modified_base 3: mod_base = OTHER; note = 2'-O-Methyl-guanosine phosphorothioate
  modified_base 21: mod_base = OTHER; note = 2'-O-Methyl-guanosine
  modified_base 28: mod_base = OTHER; note = 2'-O-Methyl-adenosine
  modified_base 29: mod_base = OTHER; note = 2'-O-Methyl-guanosine
  modified_base 30: mod_base = OTHER; note = 2'-O-Methyl-cytidine
  modified_base 31: mod_base = OTHER; note = 2'-O-Methyl-uridine
  modified_base 32: mod_base = OTHER; note = 2'-O-Methyl-adenosine
  modified_base 34: mod_base = OTHER; note = 2'-O-Methyl-adenosine
  modified_base 35: mod_base = OTHER; note = 2'-O-Methyl-adenosine
  modified_base 36: mod_base = OTHER; note = 2'-O-Methyl-adenosine
  modified_base 37: mod_base = OTHER; note = 2'-O-Methyl-uridine
  modified_base 38: mod_base = OTHER; note = 2'-O-Methyl-adenosine
  modified_base 39: mod_base = OTHER; note = 2'-O-Methyl-guanosine
  modified_base 40: mod_base = OTHER; note = 2'-O-Methyl-cytidine
  modified_base 41: mod_base = OTHER; note = 2'-O-Methyl-adenosine
  modified_base 42: mod_base = OTHER; note = 2'-O-Methyl-adenosine
  modified_base 46: mod_base = OTHER; note = 2'-O-Methyl-adenosine
  modified_base 48: mod_base = OTHER; note = 2'-O-Methyl-adenosine
  modified_base 50: mod_base = OTHER; note = 2'-O-Methyl-uridine
  modified_base 52: mod_base = OTHER; note = 2'-O-Methyl-adenosine
  modified_base 53: mod_base = OTHER; note = 2'-O-Methyl-guanosine
  modified_base 54: mod_base = OTHER; note = 2'-O-Methyl-guanosine
  modified_base 57: mod_base = OTHER; note = 2'-O-Methyl-adenosine
  modified_base 61: mod_base = OTHER; note = 2'-O-Methyl-cytidine
  modified_base 66: mod_base = OTHER; note = 2'-O-Methyl-uridine
  modified_base 67: mod_base = OTHER; note = 2'-O-Methyl-cytidine
  modified_base 70: mod_base = OTHER; note = 2'-O-Methyl-cytidine
  modified_base 71: mod_base = OTHER; note = 2'-O-Methyl-uridine
  modified_base 72: mod_base = OTHER; note = 2'-O-Methyl-uridine
  modified_base 74: mod_base = OTHER; note = 2'-O-Methyl-adenosine
  modified_base 75: mod_base = OTHER; note = 2'-O-Methyl-adenosine
  modified_base 76: mod_base = OTHER; note = 2'-O-Methyl-adenosine
  modified_base 77: mod_base = OTHER; note = 2'-O-Methyl-adenosine
  modified_base 78: mod_base = OTHER; note = 2'-O-Methyl-adenosine
  modified_base 79: mod_base = OTHER; note = 2'-O-Methyl-guanosine
  modified_base 80: mod_base = OTHER; note = 2'-O-Methyl-uridine
  modified_base 82: mod_base = OTHER; note = 2'-O-Methyl-guanosine
  modified_base 83: mod_base = OTHER; note = 2'-O-Methyl-cytidine
  modified_base 84: mod_base = OTHER; note = 2'-O-Methyl-adenosine
  modified_base 85: mod_base = OTHER; note = 2'-O-Methyl-cytidine
  modified_base 86: mod_base = OTHER; note = 2'-O-Methyl-cytidine
  modified_base 87: mod_base = OTHER; note = 2'-O-Methyl-guanosine
  modified_base 89: mod_base = OTHER; note = 2'-O-Methyl-guanosine
  modified_base 92: mod_base = OTHER; note = 2'-O-Methyl-guanosine
  modified_base 93: mod_base = OTHER; note = 2'-O-Methyl-guanosine
  modified_base 94: mod_base = OTHER; note = 2'-O-Methyl-uridine
  modified_base 95: mod_base = OTHER; note = 2'-O-Methyl-guanosine
  modified_base 96: mod_base = OTHER; note = 2'-O-Methyl-cytidine
  modified_base 97: mod_base = OTHER; note = 2'-O-Methyl-uridine phosphorothioate
  modified_base 98: mod_base = OTHER; note = 2'-O-Methyl-uridine phosphorothioate
  modified_base 99: mod_base = OTHER; note = 2'-O-Methyl-uridine phosphorothioate
  modified_base 100: mod_base = OTHER; note = 2'-O-Methyl-uridine
gagatacctgagtaactttcgttttagagctagaaatagcaagttaaaataaggctagtccgttatcaacttgaaaaagtggcaccgagtcggtgcttttttt

SEQ ID NO: 1700 - RNA, 103 nt, synthetic construct
  source 1..103: mol_type = other RNA; note = Description of Artificial Sequence: Synthetic polynucleotide
  modified_base 1: mod_base = OTHER; note = 2'-O-Methyl-cytidine phosphorothioate
  modified_base 2: mod_base = OTHER; note = 2'-O-Methyl-adenosine phosphorothioate
  modified_base 3: mod_base = OTHER; note = 2'-O-Methyl-guanosine phosphorothioate
  modified_base 21: mod_base = OTHER; note = 2'-O-Methyl-guanosine
  modified_base 28: mod_base = OTHER; note = 2'-O-Methyl-adenosine
  modified_base 29: mod_base = OTHER; note = 2'-O-Methyl-guanosine
  modified_base 30: mod_base = OTHER; note = 2'-O-Methyl-cytidine
  modified_base 31: mod_base = OTHER; note = 2'-O-Methyl-uridine
  modified_base 32: mod_base = OTHER; note = 2'-O-Methyl-adenosine
  modified_base 34: mod_base = OTHER; note = 2'-O-Methyl-adenosine
  modified_base 35: mod_base = OTHER; note = 2'-O-Methyl-adenosine
  modified_base 36: mod_base = OTHER; note = 2'-O-Methyl-adenosine
  modified_base 37: mod_base = OTHER; note = 2'-O-Methyl-uridine
  modified_base 38: mod_base = OTHER; note = 2'-O-Methyl-adenosine
  modified_base 39: mod_base = OTHER; note = 2'-O-Methyl-guanosine
  modified_base 40: mod_base = OTHER; note = 2'-O-Methyl-cytidine
  modified_base 41: mod_base = OTHER; note = 2'-O-Methyl-adenosine
  modified_base 42: mod_base = OTHER; note = 2'-O-Methyl-adenosine
  modified_base 46: mod_base = OTHER; note = 2'-O-Methyl-adenosine
  modified_base 48: mod_base = OTHER; note = 2'-O-Methyl-adenosine
  modified_base 50: mod_base = OTHER; note = 2'-O-Methyl-uridine
  modified_base 52: mod_base = OTHER; note = 2'-O-Methyl-adenosine
  modified_base 53: mod_base = OTHER; note = 2'-O-Methyl-guanosine
  modified_base 54: mod_base = OTHER; note = 2'-O-Methyl-guanosine
  modified_base 55: mod_base = OTHER; note = 2'-O-Methyl-cytidine
  modified_base 56: mod_base = OTHER; note = 2'-O-Methyl-uridine
  modified_base 57: mod_base = OTHER; note = 2'-O-Methyl-adenosine
  modified_base 60: mod_base = OTHER; note = 2'-O-Methyl-cytidine
  modified_base 61: mod_base = OTHER; note = 2'-O-Methyl-cytidine
  modified_base 66: mod_base = OTHER; note = 2'-O-Methyl-uridine
  modified_base 67: mod_base = OTHER; note = 2'-O-Methyl-cytidine
  modified_base 70: mod_base = OTHER; note = 2'-O-Methyl-cytidine
  modified_base 71: mod_base = OTHER; note = 2'-O-Methyl-uridine
  modified_base 72: mod_base = OTHER; note = 2'-O-Methyl-uridine
  modified_base 74: mod_base = OTHER; note = 2'-O-Methyl-adenosine
  modified_base 75: mod_base = OTHER; note = 2'-O-Methyl-adenosine
  modified_base 76: mod_base = OTHER; note = 2'-O-Methyl-adenosine
  modified_base 77: mod_base = OTHER; note = 2'-O-Methyl-adenosine
  modified_base 78: mod_base = OTHER; note = 2'-O-Methyl-adenosine
  modified_base 79: mod_base = OTHER; note = 2'-O-Methyl-guanosine
  modified_base 80: mod_base = OTHER; note = 2'-O-Methyl-uridine
  modified_base 81: mod_base = OTHER; note = 2'-O-Methyl-guanosine
  modified_base 83: mod_base = OTHER; note = 2'-O-Methyl-cytidine
  modified_base 84: mod_base = OTHER; note = 2'-O-Methyl-adenosine
  modified_base 85: mod_base = OTHER; note = 2'-O-Methyl-cytidine
  modified_base 86: mod_base = OTHER; note = 2'-O-Methyl-cytidine
  modified_base 87: mod_base = OTHER; note = 2'-O-Methyl-guanosine
  modified_base 88: mod_base = OTHER; note = 2'-O-Methyl-adenosine
  modified_base 89: mod_base = OTHER; note = 2'-O-Methyl-guanosine
  modified_base 90: mod_base = OTHER; note = 2'-O-Methyl-uridine
  modified_base 91: mod_base = OTHER; note = 2'-O-Methyl-cytidine
  modified_base 92: mod_base = OTHER; note = 2'-O-Methyl-guanosine
  modified_base 93: mod_base = OTHER; note = 2'-O-Methyl-guanosine
  modified_base 94: mod_base = OTHER; note = 2'-O-Methyl-uridine
  modified_base 95: mod_base = OTHER; note = 2'-O-Methyl-guanosine
  modified_base 96: mod_base = OTHER; note = 2'-O-Methyl-cytidine
  modified_base 97: mod_base = OTHER; note = 2'-O-Methyl-uridine phosphorothioate
  modified_base 98: mod_base = OTHER; note = 2'-O-Methyl-uridine phosphorothioate
  modified_base 99: mod_base = OTHER; note = 2'-O-Methyl-uridine phosphorothioate
  modified_base 100: mod_base = OTHER; note = 2'-O-Methyl-uridine
caggttccatgggatgctctgttttagagctagaaatagcaagttaaaataaggctagtccgttatcaacttgaaaaagtggcaccgagtcggtgcttttttt

SEQ ID NO: 1701 - RNA, 103 nt, synthetic construct; identical to SEQ ID NO: 1643
  source 1..103: mol_type = other RNA; note = Description of Artificial Sequence: Synthetic polynucleotide
  modified_base 1: mod_base = OTHER; note = 2'-O-Methyl-cytidine phosphorothioate
  modified_base 2: mod_base = OTHER; note = 2'-O-Methyl-cytidine phosphorothioate
  modified_base 3: mod_base = OTHER; note = 2'-O-Methyl-cytidine phosphorothioate
  modified_base 21: mod_base = OTHER; note = 2'-O-Methyl-guanosine
  modified_base 28: mod_base = OTHER; note = 2'-O-Methyl-adenosine
  modified_base 29: mod_base = OTHER; note = 2'-O-Methyl-guanosine
  modified_base 30: mod_base = OTHER; note = 2'-O-Methyl-cytidine
  modified_base 31: mod_base = OTHER; note = 2'-O-Methyl-uridine
  modified_base 32: mod_base = OTHER; note = 2'-O-Methyl-adenosine
  modified_base 34: mod_base = OTHER; note = 2'-O-Methyl-adenosine
  modified_base 35: mod_base = OTHER; note = 2'-O-Methyl-adenosine
  modified_base 36: mod_base = OTHER; note = 2'-O-Methyl-adenosine
  modified_base 37: mod_base = OTHER; note = 2'-O-Methyl-uridine
  modified_base 38: mod_base = OTHER; note = 2'-O-Methyl-adenosine
  modified_base 39: mod_base = OTHER; note = 2'-O-Methyl-guanosine
  modified_base 40: mod_base = OTHER; note = 2'-O-Methyl-cytidine
  modified_base 41: mod_base = OTHER; note = 2'-O-Methyl-adenosine
  modified_base 42: mod_base = OTHER; note = 2'-O-Methyl-adenosine
  modified_base 46: mod_base = OTHER; note = 2'-O-Methyl-adenosine
  modified_base 48: mod_base = OTHER; note = 2'-O-Methyl-adenosine
  modified_base 50: mod_base = OTHER; note = 2'-O-Methyl-uridine
  modified_base 52: mod_base = OTHER; note = 2'-O-Methyl-adenosine
  modified_base 53: mod_base = OTHER; note = 2'-O-Methyl-guanosine
  modified_base 54: mod_base = OTHER; note = 2'-O-Methyl-guanosine
  modified_base 57: mod_base = OTHER; note = 2'-O-Methyl-adenosine
  modified_base 61: mod_base = OTHER; note = 2'-O-Methyl-cytidine
  modified_base 64: mod_base = OTHER; note = uridine phosphorothioate
  modified_base 66: mod_base = OTHER; note = 2'-O-Methyl-uridine
  modified_base 67: mod_base = OTHER; note = 2'-O-Methyl-cytidine
  modified_base 70: mod_base = OTHER; note = 2'-O-Methyl-cytidine
  modified_base 71: mod_base = OTHER; note = 2'-O-Methyl-uridine
  modified_base 72: mod_base = OTHER; note = 2'-O-Methyl-uridine
  modified_base 74: mod_base = OTHER; note = 2'-O-Methyl-adenosine
  modified_base 75: mod_base = OTHER; note = 2'-O-Methyl-adenosine
  modified_base 76: mod_base = OTHER; note = 2'-O-Methyl-adenosine
  modified_base 77: mod_base = OTHER; note = 2'-O-Methyl-adenosine
  modified_base 78: mod_base = OTHER; note = 2'-O-Methyl-adenosine
  modified_base 79: mod_base = OTHER; note = 2'-O-Methyl-guanosine
  modified_base 80: mod_base = OTHER; note = 2'-O-Methyl-uridine
  modified_base 82: mod_base = OTHER; note = 2'-O-Methyl-guanosine
  modified_base 83: mod_base = OTHER; note = 2'-O-Methyl-cytidine
  modified_base 84: mod_base = OTHER; note = 2'-O-Methyl-adenosine
  modified_base 85: mod_base = OTHER; note = 2'-O-Methyl-cytidine
  modified_base 86: mod_base = OTHER; note = 2'-O-Methyl-cytidine
  modified_base 87: mod_base = OTHER; note = 2'-O-Methyl-guanosine
  modified_base 89: mod_base = OTHER; note = 2'-O-Methyl-guanosine
  modified_base 92: mod_base = OTHER; note = 2'-O-Methyl-guanosine
  modified_base 93: mod_base = OTHER; note = 2'-O-Methyl-guanosine
  modified_base 94: mod_base = OTHER; note = 2'-O-Methyl-uridine
  modified_base 95: mod_base = OTHER; note = 2'-O-Methyl-guanosine
  modified_base 96: mod_base = OTHER; note = 2'-O-Methyl-cytidine
  modified_base 97: mod_base = OTHER; note = 2'-O-Methyl-uridine phosphorothioate
  modified_base 98: mod_base = OTHER; note = 2'-O-Methyl-uridine phosphorothioate
  modified_base 99: mod_base = OTHER; note = 2'-O-Methyl-uridine phosphorothioate
  modified_base 100: mod_base = OTHER; note = 2'-O-Methyl-uridine

SEQ ID NO: 1702 - RNA, 103 nt, synthetic construct; identical to SEQ ID NO: 1699
  source 1..103: mol_type = other RNA; note = Description of Artificial Sequence: Synthetic polynucleotide
  modified_base 1: mod_base = OTHER; note = 2'-O-Methyl-guanosine phosphorothioate
  modified_base 2: mod_base = OTHER; note = 2'-O-Methyl-adenosine phosphorothioate
  modified_base 3: mod_base = OTHER; note = 2'-O-Methyl-guanosine phosphorothioate
  modified_base 21: mod_base = OTHER; note = 2'-O-Methyl-guanosine
  modified_base 28: mod_base = OTHER; note = 2'-O-Methyl-adenosine
  modified_base 29: mod_base = OTHER; note = 2'-O-Methyl-guanosine
  modified_base 30: mod_base = OTHER; note = 2'-O-Methyl-cytidine
  modified_base 31: mod_base = OTHER; note = 2'-O-Methyl-uridine
  modified_base 32: mod_base = OTHER; note = 2'-O-Methyl-adenosine
  modified_base 34: mod_base = OTHER; note = 2'-O-Methyl-adenosine
  modified_base 35: mod_base = OTHER; note = 2'-O-Methyl-adenosine
  modified_base 36: mod_base = OTHER; note = 2'-O-Methyl-adenosine
  modified_base 37: mod_base = OTHER; note = 2'-O-Methyl-uridine
  modified_base 38: mod_base = OTHER; note = 2'-O-Methyl-adenosine
  modified_base 39: mod_base = OTHER; note = 2'-O-Methyl-guanosine
  modified_base 40: mod_base = OTHER; note = 2'-O-Methyl-cytidine
  modified_base 41: mod_base = OTHER; note = 2'-O-Methyl-adenosine
  modified_base 42: mod_base = OTHER; note = 2'-O-Methyl-adenosine
  modified_base 46: mod_base = OTHER; note = 2'-O-Methyl-adenosine
  modified_base 48: mod_base = OTHER; note = 2'-O-Methyl-adenosine
  modified_base 50: mod_base = OTHER; note = 2'-O-Methyl-uridine
  modified_base 52: mod_base = OTHER; note = 2'-O-Methyl-adenosine
  modified_base 53: mod_base = OTHER; note = 2'-O-Methyl-guanosine
  modified_base 54: mod_base = OTHER; note = 2'-O-Methyl-guanosine
  modified_base 57: mod_base = OTHER; note = 2'-O-Methyl-adenosine
  modified_base 61: mod_base = OTHER; note = 2'-O-Methyl-cytidine
  modified_base 64: mod_base = OTHER; note = uridine phosphorothioate
  modified_base 66: mod_base = OTHER; note = 2'-O-Methyl-uridine
  modified_base 67: mod_base = OTHER; note = 2'-O-Methyl-cytidine
  modified_base 70: mod_base = OTHER; note = 2'-O-Methyl-cytidine
  modified_base 71: mod_base = OTHER; note = 2'-O-Methyl-uridine
  modified_base 72: mod_base = OTHER; note = 2'-O-Methyl-uridine
  modified_base 74: mod_base = OTHER; note = 2'-O-Methyl-adenosine
  modified_base 75: mod_base = OTHER; note = 2'-O-Methyl-adenosine
  modified_base 76: mod_base = OTHER; note = 2'-O-Methyl-adenosine
  modified_base 77: mod_base = OTHER; note = 2'-O-Methyl-adenosine
  modified_base 78: mod_base = OTHER; note = 2'-O-Methyl-adenosine
  modified_base 79: mod_base = OTHER; note = 2'-O-Methyl-guanosine
  modified_base 80: mod_base = OTHER; note = 2'-O-Methyl-uridine
  modified_base 82: mod_base = OTHER; note = 2'-O-Methyl-guanosine
  modified_base 83: mod_base = OTHER; note = 2'-O-Methyl-cytidine
  modified_base 84: mod_base = OTHER; note = 2'-O-Methyl-adenosine
  modified_base 85: mod_base = OTHER; note = 2'-O-Methyl-cytidine
  modified_base 86: mod_base = OTHER; note = 2'-O-Methyl-cytidine
  modified_base 87: mod_base = OTHER; note = 2'-O-Methyl-guanosine
  modified_base 89: mod_base = OTHER; note = 2'-O-Methyl-guanosine
  modified_base 92: mod_base = OTHER; note = 2'-O-Methyl-guanosine
  modified_base 93: mod_base = OTHER; note = 2'-O-Methyl-guanosine
  modified_base 94: mod_base = OTHER; note = 2'-O-Methyl-uridine
  modified_base 95: mod_base = OTHER; note = 2'-O-Methyl-guanosine
  modified_base 96: mod_base = OTHER; note = 2'-O-Methyl-cytidine
  modified_base 97: mod_base = OTHER; note = 2'-O-Methyl-uridine phosphorothioate
  modified_base 98: mod_base = OTHER; note = 2'-O-Methyl-uridine phosphorothioate
  modified_base 99: mod_base = OTHER; note = 2'-O-Methyl-uridine phosphorothioate
  modified_base 100: mod_base = OTHER; note = 2'-O-Methyl-uridine

SEQ ID NO: 1703 - RNA, 103 nt, synthetic construct; identical to SEQ ID NO: 1700
  source 1..103: mol_type = other RNA; note = Description of Artificial Sequence: Synthetic polynucleotide
  modified_base 1: mod_base = OTHER; note = 2'-O-Methyl-cytidine phosphorothioate
  modified_base 2: mod_base = OTHER; note = 2'-O-Methyl-adenosine phosphorothioate
  modified_base 3: mod_base = OTHER; note = 2'-O-Methyl-guanosine phosphorothioate
  modified_base 21: mod_base = OTHER; note = 2'-O-Methyl-guanosine
  modified_base 28: mod_base = OTHER; note = 2'-O-Methyl-adenosine
  modified_base 29: mod_base = OTHER; note = 2'-O-Methyl-guanosine
  modified_base 30: mod_base = OTHER; note = 2'-O-Methyl-cytidine
  modified_base 31: mod_base = OTHER; note = 2'-O-Methyl-uridine
  modified_base 32: mod_base = OTHER; note = 2'-O-Methyl-adenosine
  modified_base 34: mod_base = OTHER; note = 2'-O-Methyl-adenosine
  modified_base 35: mod_base = OTHER; note = 2'-O-Methyl-adenosine
  modified_base 36: mod_base = OTHER; note = 2'-O-Methyl-adenosine
  modified_base 37: mod_base = OTHER; note = 2'-O-Methyl-uridine
  modified_base 38: mod_base = OTHER; note = 2'-O-Methyl-adenosine
  modified_base 39: mod_base = OTHER; note = 2'-O-Methyl-guanosine
  modified_base 40: mod_base = OTHER; note = 2'-O-Methyl-cytidine
  modified_base 41: mod_base = OTHER; note = 2'-O-Methyl-adenosine
  modified_base 42: mod_base = OTHER; note = 2'-O-Methyl-adenosine
  modified_base 46: mod_base = OTHER; note = 2'-O-Methyl-adenosine
  modified_base 48: mod_base = OTHER; note = 2'-O-Methyl-adenosine
  modified_base 50: mod_base = OTHER; note = 2'-O-Methyl-uridine
  modified_base 52: mod_base = OTHER; note = 2'-O-Methyl-adenosine
  modified_base 53: mod_base = OTHER; note = 2'-O-Methyl-guanosine
  modified_base 54: mod_base = OTHER; note = 2'-O-Methyl-guanosine
  modified_base 55: mod_base = OTHER; note = 2'-O-Methyl-cytidine
  modified_base 56: mod_base = OTHER; note = 2'-O-Methyl-uridine
  modified_base 57: mod_base = OTHER; note = 2'-O-Methyl-adenosine
  modified_base 60: mod_base = OTHER; note = 2'-O-Methyl-cytidine
  modified_base 61: mod_base = OTHER; note = 2'-O-Methyl-cytidine
  modified_base 64: mod_base = OTHER; note = uridine phosphorothioate
  modified_base 66: mod_base = OTHER; note = 2'-O-Methyl-uridine
  modified_base 67: mod_base = OTHER; note = 2'-O-Methyl-cytidine
  modified_base 70: mod_base = OTHER; note = 2'-O-Methyl-cytidine
  modified_base 71: mod_base = OTHER; note = 2'-O-Methyl-uridine
  modified_base 72: mod_base = OTHER; note = 2'-O-Methyl-uridine
  modified_base 74: mod_base = OTHER; note = 2'-O-Methyl-adenosine
  modified_base 75: mod_base = OTHER; note = 2'-O-Methyl-adenosine
  modified_base 76: mod_base = OTHER; note = 2'-O-Methyl-adenosine
  modified_base 77: mod_base = OTHER; note = 2'-O-Methyl-adenosine
  modified_base 78: mod_base = OTHER; note = 2'-O-Methyl-adenosine
  modified_base 79: mod_base = OTHER; note = 2'-O-Methyl-guanosine
  modified_base 80: mod_base = OTHER; note = 2'-O-Methyl-uridine
  modified_base 81: mod_base = OTHER; note = 2'-O-Methyl-guanosine
  modified_base 83: mod_base = OTHER; note = 2'-O-Methyl-cytidine
  modified_base 84: mod_base = OTHER; note = 2'-O-Methyl-adenosine
  modified_base 85: mod_base = OTHER; note = 2'-O-Methyl-cytidine
  modified_base 86: mod_base = OTHER; note = 2'-O-Methyl-cytidine
  modified_base 87: mod_base = OTHER; note = 2'-O-Methyl-guanosine
  modified_base 88: mod_base = OTHER; note = 2'-O-Methyl-adenosine
  modified_base 89: mod_base = OTHER; note = 2'-O-Methyl-guanosine
  modified_base 90: mod_base = OTHER; note = 2'-O-Methyl-uridine
  modified_base 91: mod_base = OTHER; note = 2'-O-Methyl-cytidine
  modified_base 92: mod_base = OTHER; note = 2'-O-Methyl-guanosine
  modified_base 93: mod_base = OTHER; note = 2'-O-Methyl-guanosine
  modified_base 94: mod_base = OTHER; note = 2'-O-Methyl-uridine
  modified_base 95: mod_base = OTHER; note = 2'-O-Methyl-guanosine
  modified_base 96: mod_base = OTHER; note = 2'-O-Methyl-cytidine
  modified_base 97: mod_base = OTHER; note = 2'-O-Methyl-uridine phosphorothioate
  modified_base 98: mod_base = OTHER; note = 2'-O-Methyl-uridine phosphorothioate
  modified_base 99: mod_base = OTHER; note = 2'-O-Methyl-uridine phosphorothioate
  modified_base 100: mod_base = OTHER; note = 2'-O-Methyl-uridine

SEQ ID NO: 1704 - RNA, 103 nt, synthetic construct; identical to SEQ ID NO: 1643
  source 1..103: mol_type = other RNA; note = Description of Artificial Sequence: Synthetic polynucleotide
  modified_base 1: mod_base = OTHER; note = 2'-O-Methyl-cytidine phosphorothioate
  modified_base 2: mod_base = OTHER; note = 2'-O-Methyl-cytidine phosphorothioate
  modified_base 3: mod_base = OTHER; note = 2'-O-Methyl-cytidine phosphorothioate
  modified_base 21: mod_base = OTHER; note = 2'-O-Methyl-guanosine
  modified_base 28: mod_base = OTHER; note = 2'-O-Methyl-adenosine
  modified_base 29: mod_base = OTHER; note = 2'-O-Methyl-guanosine
  modified_base 30: mod_base = OTHER; note = 2'-O-Methyl-cytidine
  modified_base 31: mod_base = OTHER; note = 2'-O-Methyl-uridine
  modified_base 32: mod_base = OTHER; note = 2'-O-Methyl-adenosine
  modified_base 34: mod_base = OTHER; note = 2'-O-Methyl-adenosine
  modified_base 35: mod_base = OTHER; note = 2'-O-Methyl-adenosine
  modified_base 36: mod_base = OTHER; note = 2'-O-Methyl-adenosine
  modified_base 37: mod_base = OTHER; note = 2'-O-Methyl-uridine
  modified_base 38: mod_base = OTHER; note = 2'-O-Methyl-adenosine
  modified_base 39: mod_base = OTHER; note = 2'-O-Methyl-guanosine
  modified_base 40: mod_base = OTHER; note = 2'-O-Methyl-cytidine
  modified_base 41: mod_base = OTHER; note = 2'-O-Methyl-adenosine
  modified_base 42: mod_base = OTHER; note = 2'-O-Methyl-adenosine
  modified_base 45: mod_base = OTHER; note = uridine phosphorothioate
  modified_base 46: mod_base = OTHER; note = 2'-O-Methyl-adenosine
  modified_base 48: mod_base = OTHER; note = 2'-O-Methyl-adenosine
  modified_base 50: mod_base = OTHER; note = 2'-O-Methyl-uridine
  modified_base 52: mod_base = OTHER; note = 2'-O-Methyl-adenosine
  modified_base 53: mod_base = OTHER; note = 2'-O-Methyl-guanosine
  modified_base 54: mod_base = OTHER; note = 2'-O-Methyl-guanosine
  modified_base 57: mod_base = OTHER; note = 2'-O-Methyl-adenosine
  modified_base 61: mod_base = OTHER; note = 2'-O-Methyl-cytidine
  modified_base 66: mod_base = OTHER; note = 2'-O-Methyl-uridine
  modified_base 67: mod_base = OTHER; note = 2'-O-Methyl-cytidine
  modified_base 70: mod_base = OTHER; note = 2'-O-Methyl-cytidine
  modified_base 71: mod_base = OTHER; note = 2'-O-Methyl-uridine
  modified_base 72: mod_base = OTHER; note = 2'-O-Methyl-uridine
  modified_base 74: mod_base = OTHER; note = 2'-O-Methyl-adenosine
  modified_base 75: mod_base = OTHER; note = 2'-O-Methyl-adenosine
  modified_base 76: mod_base = OTHER; note = 2'-O-Methyl-adenosine
  modified_base 77: mod_base = OTHER; note = 2'-O-Methyl-adenosine
  modified_base 78: mod_base = OTHER; note = 2'-O-Methyl-adenosine
  modified_base 79: mod_base = OTHER; note = 2'-O-Methyl-guanosine
  modified_base 80: mod_base = OTHER; note = 2'-O-Methyl-uridine
  modified_base 82: mod_base = OTHER; note = 2'-O-Methyl-guanosine
  modified_base 83: mod_base = OTHER; note = 2'-O-Methyl-cytidine
  modified_base 84: mod_base = OTHER; note = 2'-O-Methyl-adenosine
  modified_base 85: mod_base = OTHER; note = 2'-O-Methyl-cytidine
  modified_base 86: mod_base = OTHER; note = 2'-O-Methyl-cytidine
  modified_base 87: mod_base = OTHER; note = 2'-O-Methyl-guanosine
  modified_base 89: mod_base = OTHER; note = 2'-O-Methyl-guanosine
  modified_base 92: mod_base = OTHER; note = 2'-O-Methyl-guanosine
  modified_base 93: mod_base = OTHER; note = 2'-O-Methyl-guanosine
  modified_base 94: mod_base = OTHER; note = 2'-O-Methyl-uridine
  modified_base 95: mod_base = OTHER; note = 2'-O-Methyl-guanosine
  modified_base 96: mod_base = OTHER; note = 2'-O-Methyl-cytidine
  modified_base 97: mod_base = OTHER; note = 2'-O-Methyl-uridine phosphorothioate
  modified_base 98: mod_base = OTHER; note = 2'-O-Methyl-uridine phosphorothioate
  modified_base 99: mod_base = OTHER; note = 2'-O-Methyl-uridine phosphorothioate
  modified_base 100: mod_base = OTHER; note = 2'-O-Methyl-uridine

SEQ ID NO: 1705 - RNA, 103 nt, synthetic construct; identical to SEQ ID NO: 1699
  source 1..103: mol_type = other RNA; note = Description of Artificial Sequence: Synthetic polynucleotide
  modified_base 1: mod_base = OTHER; note = 2'-O-Methyl-guanosine phosphorothioate
  modified_base 2: mod_base = OTHER; note = 2'-O-Methyl-adenosine phosphorothioate
  modified_base 3: mod_base = OTHER; note = 2'-O-Methyl-guanosine phosphorothioate
  modified_base 21: mod_base = OTHER; note = 2'-O-Methyl-guanosine
  modified_base 28: mod_base = OTHER; note = 2'-O-Methyl-adenosine
  modified_base 29: mod_base = OTHER; note = 2'-O-Methyl-guanosine
  modified_base 30: mod_base = OTHER; note = 2'-O-Methyl-cytidine
  modified_base 31: mod_base = OTHER; note = 2'-O-Methyl-uridine
  modified_base 32: mod_base = OTHER; note = 2'-O-Methyl-adenosine
  modified_base 34: mod_base = OTHER; note = 2'-O-Methyl-adenosine
  modified_base 35: mod_base = OTHER; note = 2'-O-Methyl-adenosine
  modified_base 36: mod_base = OTHER; note = 2'-O-Methyl-adenosine
  modified_base 37: mod_base = OTHER; note = 2'-O-Methyl-uridine
  modified_base 38: mod_base = OTHER; note = 2'-O-Methyl-adenosine
  modified_base 39: mod_base = OTHER; note = 2'-O-Methyl-guanosine
  modified_base 40: mod_base = OTHER; note = 2'-O-Methyl-cytidine
  modified_base 41: mod_base = OTHER; note = 2'-O-Methyl-adenosine
  modified_base 42: mod_base = OTHER; note = 2'-O-Methyl-adenosine
  modified_base 45: mod_base = OTHER; note = uridine phosphorothioate
  modified_base 46: mod_base = OTHER; note = 2'-O-Methyl-adenosine
  modified_base 48: mod_base = OTHER; note = 2'-O-Methyl-adenosine
  modified_base 50: mod_base = OTHER; note = 2'-O-Methyl-uridine
  modified_base 52: mod_base = OTHER; note = 2'-O-Methyl-adenosine
  modified_base 53: mod_base = OTHER; note = 2'-O-Methyl-guanosine
  modified_base 54: mod_base = OTHER; note = 2'-O-Methyl-guanosine
  modified_base 57: mod_base = OTHER; note = 2'-O-Methyl-adenosine
  modified_base 61: mod_base = OTHER; note = 2'-O-Methyl-cytidine
  modified_base 66: mod_base = OTHER; note = 2'-O-Methyl-uridine
  modified_base 67: mod_base = OTHER; note = 2'-O-Methyl-cytidine
  modified_base 70: mod_base = OTHER; note = 2'-O-Methyl-cytidine
  modified_base 71: mod_base = OTHER; note = 2'-O-Methyl-uridine
  modified_base 72: mod_base = OTHER; note = 2'-O-Methyl-uridine
  modified_base 74: mod_base = OTHER; note = 2'-O-Methyl-adenosine
  modified_base 75: mod_base = OTHER; note = 2'-O-Methyl-adenosine
  modified_base 76: mod_base = OTHER; note = 2'-O-Methyl-adenosine
  modified_base 77: mod_base = OTHER; note = 2'-O-Methyl-adenosine
  modified_base 78: mod_base = OTHER; note = 2'-O-Methyl-adenosine
  modified_base 79: mod_base = OTHER; note = 2'-O-Methyl-guanosine
  modified_base 80: mod_base = OTHER; note = 2'-O-Methyl-uridine
  modified_base 82: mod_base = OTHER; note = 2'-O-Methyl-guanosine
  modified_base 83: mod_base = OTHER; note = 2'-O-Methyl-cytidine
  modified_base 84: mod_base = OTHER; note = 2'-O-Methyl-adenosine
  modified_base 85: mod_base = OTHER; note = 2'-O-Methyl-cytidine
  modified_base 86: mod_base = OTHER; note = 2'-O-Methyl-cytidine
  modified_base 87: mod_base = OTHER; note = 2'-O-Methyl-guanosine
  modified_base 89: mod_base = OTHER; note = 2'-O-Methyl-guanosine
  modified_base 92: mod_base = OTHER; note = 2'-O-Methyl-guanosine
  modified_base 93: mod_base = OTHER; note = 2'-O-Methyl-guanosine
  modified_base 94: mod_base = OTHER; note = 2'-O-Methyl-uridine
  modified_base 95: mod_base = OTHER; note = 2'-O-Methyl-guanosine
  modified_base 96: mod_base = OTHER; note = 2'-O-Methyl-cytidine
  modified_base 97: mod_base = OTHER; note = 2'-O-Methyl-uridine phosphorothioate
  modified_base 98: mod_base = OTHER; note = 2'-O-Methyl-uridine phosphorothioate
  modified_base 99: mod_base = OTHER; note = 2'-O-Methyl-uridine phosphorothioate
  modified_base 100: mod_base = OTHER; note = 2'-O-Methyl-uridine

SEQ ID NO: 1706 - RNA, 103 nt, synthetic construct; identical to SEQ ID NO: 1700
  source 1..103: mol_type = other RNA; note = Description of Artificial Sequence: Synthetic polynucleotide
  modified_base 1: mod_base = OTHER; note = 2'-O-Methyl-cytidine phosphorothioate
  modified_base 2: mod_base = OTHER; note = 2'-O-Methyl-adenosine phosphorothioate
  modified_base 3: mod_base = OTHER; note = 2'-O-Methyl-guanosine phosphorothioate
  modified_base 21: mod_base = OTHER; note = 2'-O-Methyl-guanosine
  modified_base 28: mod_base = OTHER; note = 2'-O-Methyl-adenosine
  modified_base 29: mod_base = OTHER; note = 2'-O-Methyl-guanosine
  modified_base 30: mod_base = OTHER; note = 2'-O-Methyl-cytidine
  modified_base 31: mod_base = OTHER; note = 2'-O-Methyl-uridine
  modified_base 32: mod_base = OTHER; note = 2'-O-Methyl-adenosine
  modified_base 34: mod_base = OTHER; note = 2'-O-Methyl-adenosine
  modified_base 35: mod_base = OTHER; note = 2'-O-Methyl-adenosine
  modified_base 36: mod_base = OTHER; note = 2'-O-Methyl-adenosine
  modified_base 37: mod_base = OTHER; note = 2'-O-Methyl-uridine
  modified_base 38: mod_base = OTHER; note = 2'-O-Methyl-adenosine
  modified_base 39: mod_base = OTHER; note = 2'-O-Methyl-guanosine
  modified_base 40: mod_base = OTHER; note = 2'-O-Methyl-cytidine
  modified_base 41: mod_base = OTHER; note = 2'-O-Methyl-adenosine
  modified_base 42: mod_base = OTHER; note = 2'-O-Methyl-adenosine
  modified_base 45: mod_base = OTHER; note = uridine phosphorothioate
  modified_base 46: mod_base = OTHER; note = 2'-O-Methyl-adenosine
  modified_base 48: mod_base = OTHER; note = 2'-O-Methyl-adenosine
  modified_base 50: mod_base = OTHER; note = 2'-O-Methyl-uridine
  modified_base 52: mod_base = OTHER; note = 2'-O-Methyl-adenosine
  modified_base 53: mod_base = OTHER; note = 2'-O-Methyl-guanosine
  modified_base 54: mod_base = OTHER; note = 2'-O-Methyl-guanosine
  modified_base 55: mod_base = OTHER; note = 2'-O-Methyl-cytidine
  modified_base 56: mod_base = OTHER; note = 2'-O-Methyl-uridine
  modified_base 57: mod_base = OTHER; note = 2'-O-Methyl-adenosine
  modified_base 60: mod_base = OTHER; note = 2'-O-Methyl-cytidine
  modified_base 61: mod_base = OTHER; note = 2'-O-Methyl-cytidine
  modified_base 66: mod_base = OTHER; note = 2'-O-Methyl-uridine
  modified_base 67: mod_base = OTHER; note = 2'-O-Methyl-cytidine
  modified_base 70: mod_base = OTHER; note = 2'-O-Methyl-cytidine
  modified_base 71: mod_base = OTHER; note = 2'-O-Methyl-uridine
  modified_base 72: mod_base = OTHER; note = 2'-O-Methyl-uridine
  modified_base 74: mod_base = OTHER; note = 2'-O-Methyl-adenosine
  modified_base 75: mod_base = OTHER; note = 2'-O-Methyl-adenosine
  modified_base 76: mod_base = OTHER; note = 2'-O-Methyl-adenosine
  modified_base 77: mod_base = OTHER; note = 2'-O-Methyl-adenosine
  modified_base 78: mod_base = OTHER; note = 2'-O-Methyl-adenosine
  modified_base 79: mod_base = OTHER; note = 2'-O-Methyl-guanosine
  modified_base 80: mod_base = OTHER; note = 2'-O-Methyl-uridine
  modified_base 81: mod_base = OTHER; note = 2'-O-Methyl-guanosine
  modified_base 83: mod_base = OTHER; note = 2'-O-Methyl-cytidine
  modified_base 84: mod_base = OTHER; note = 2'-O-Methyl-adenosine
  modified_base 85: mod_base = OTHER; note = 2'-O-Methyl-cytidine
  modified_base 86: mod_base = OTHER; note = 2'-O-Methyl-cytidine
  modified_base 87: mod_base = OTHER; note = 2'-O-Methyl-guanosine
  modified_base 88: mod_base = OTHER; note = 2'-O-Methyl-adenosine
  modified_base 89: mod_base = OTHER; note = 2'-O-Methyl-guanosine
  modified_base 90: mod_base = OTHER; note = 2'-O-Methyl-uridine
  modified_base 91: mod_base = OTHER; note = 2'-O-Methyl-cytidine
  modified_base 92: mod_base = OTHER; note = 2'-O-Methyl-guanosine
  modified_base 93: mod_base = OTHER; note = 2'-O-Methyl-guanosine
  modified_base 94: mod_base = OTHER; note = 2'-O-Methyl-uridine
  modified_base 95: mod_base = OTHER; note = 2'-O-Methyl-guanosine
  modified_base 96: mod_base = OTHER; note = 2'-O-Methyl-cytidine
  modified_base 97: mod_base = OTHER; note = 2'-O-Methyl-uridine phosphorothioate
  modified_base 98: mod_base = OTHER; note = 2'-O-Methyl-uridine phosphorothioate
  modified_base 99: mod_base = OTHER; note = 2'-O-Methyl-uridine phosphorothioate
  modified_base 100: mod_base = OTHER; note = 2'-O-Methyl-uridine

SEQ ID NO: 1707 - RNA, 103 nt, synthetic construct; identical to SEQ ID NO: 1643
  source 1..103: mol_type = other RNA; note = Description of Artificial Sequence: Synthetic polynucleotide
  modified_base 1: mod_base = OTHER; note = 2'-O-Methyl-cytidine phosphorothioate
  modified_base 2: mod_base = OTHER; note = 2'-O-Methyl-cytidine phosphorothioate
  modified_base 3: mod_base = OTHER; note = 2'-O-Methyl-cytidine phosphorothioate
  modified_base 21: mod_base = OTHER; note = 2'-O-Methyl-guanosine
  modified_base 25: mod_base = OTHER; note = uridine phosphorothioate
  modified_base 28: mod_base = OTHER; note = 2'-O-Methyl-adenosine
  modified_base 29: mod_base = OTHER; note = 2'-O-Methyl-guanosine
  modified_base 30: mod_base = OTHER; note = 2'-O-Methyl-cytidine
  modified_base 31: mod_base = OTHER; note = 2'-O-Methyl-uridine
  modified_base 32: mod_base = OTHER; note = 2'-O-Methyl-adenosine
  modified_base 34: mod_base = OTHER; note = 2'-O-Methyl-adenosine
  modified_base 35: mod_base = OTHER; note = 2'-O-Methyl-adenosine
  modified_base 36: mod_base = OTHER; note = 2'-O-Methyl-adenosine
  modified_base 37: mod_base = OTHER; note = 2'-O-Methyl-uridine
  modified_base 38: mod_base = OTHER; note = 2'-O-Methyl-adenosine
  modified_base 39: mod_base = OTHER; note = 2'-O-Methyl-guanosine
  modified_base 40: mod_base = OTHER; note = 2'-O-Methyl-cytidine
  modified_base 41: mod_base = OTHER; note = 2'-O-Methyl-adenosine
  modified_base 42: mod_base = OTHER; note = 2'-O-Methyl-adenosine
  modified_base 46: mod_base = OTHER; note = 2'-O-Methyl-adenosine
  modified_base 48: mod_base = OTHER; note = 2'-O-Methyl-adenosine
  modified_base 50: mod_base = OTHER; note = 2'-O-Methyl-uridine
  modified_base 52: mod_base = OTHER; note = 2'-O-Methyl-adenosine
  modified_base 53: mod_base = OTHER; note = 2'-O-Methyl-guanosine
  modified_base 54: mod_base = OTHER; note = 2'-O-Methyl-guanosine
  modified_base 57: mod_base = OTHER; note = 2'-O-Methyl-adenosine
  modified_base 61: mod_base = OTHER; note = 2'-O-Methyl-cytidine
  modified_base 66: mod_base = OTHER; note = 2'-O-Methyl-uridine
  modified_base 67: mod_base = OTHER; note = 2'-O-Methyl-cytidine
  modified_base 70: mod_base = OTHER; note = 2'-O-Methyl-cytidine
  modified_base 71: mod_base = OTHER; note = 2'-O-Methyl-uridine
  modified_base 72: mod_base = OTHER; note = 2'-O-Methyl-uridine
  modified_base 74: mod_base = OTHER; note = 2'-O-Methyl-adenosine
  modified_base 75: mod_base = OTHER; note = 2'-O-Methyl-adenosine
  modified_base 76: mod_base = OTHER; note = 2'-O-Methyl-adenosine
  modified_base 77: mod_base = OTHER; note = 2'-O-Methyl-adenosine
  modified_base 78: mod_base = OTHER; note = 2'-O-Methyl-adenosine
  modified_base 79: mod_base = OTHER; note = 2'-O-Methyl-guanosine
  modified_base 80: mod_base = OTHER; note = 2'-O-Methyl-uridine
  modified_base 82: mod_base = OTHER; note = 2'-O-Methyl-guanosine
  modified_base 83: mod_base = OTHER; note = 2'-O-Methyl-cytidine
  modified_base 84: mod_base = OTHER; note = 2'-O-Methyl-adenosine
  modified_base 85: mod_base = OTHER; note = 2'-O-Methyl-cytidine
  modified_base 86: mod_base = OTHER; note = 2'-O-Methyl-cytidine
  modified_base 87: mod_base = OTHER; note = 2'-O-Methyl-guanosine
  modified_base 89: mod_base = OTHER; note = 2'-O-Methyl-guanosine
  modified_base 92: mod_base = OTHER; note = 2'-O-Methyl-guanosine
  modified_base 93: mod_base = OTHER; note = 2'-O-Methyl-guanosine
  modified_base 94: mod_base = OTHER; note = 2'-O-Methyl-uridine
  modified_base 95: mod_base = OTHER; note = 2'-O-Methyl-guanosine
  modified_base 96: mod_base = OTHER; note = 2'-O-Methyl-cytidine
  modified_base 97: mod_base = OTHER; note = 2'-O-Methyl-uridine phosphorothioate
  modified_base 98: mod_base = OTHER; note = 2'-O-Methyl-uridine phosphorothioate
  modified_base 99: mod_base = OTHER; note = 2'-O-Methyl-uridine phosphorothioate
  modified_base 100: mod_base = OTHER; note = 2'-O-Methyl-uridine

SEQ ID NO: 1708 - RNA, 103 nt, synthetic construct; identical to SEQ ID NO: 1699
  source 1..103: mol_type = other RNA; note = Description of Artificial Sequence: Synthetic polynucleotide
  modified_base 1: mod_base = OTHER; note = 2'-O-Methyl-guanosine phosphorothioate
  modified_base 2: mod_base = OTHER; note = 2'-O-Methyl-adenosine phosphorothioate
  modified_base 3: mod_base = OTHER; note = 2'-O-Methyl-guanosine phosphorothioate
  modified_base 21: mod_base = OTHER; note = 2'-O-Methyl-guanosine
  modified_base 25: mod_base = OTHER; note = uridine phosphorothioate
  modified_base 28: mod_base = OTHER; note = 2'-O-Methyl-adenosine
  modified_base 29: mod_base = OTHER; note = 2'-O-Methyl-guanosine
  modified_base 30: mod_base = OTHER; note = 2'-O-Methyl-cytidine
  modified_base 31: mod_base = OTHER; note = 2'-O-Methyl-uridine
  modified_base 32: mod_base = OTHER; note = 2'-O-Methyl-adenosine
  modified_base 34: mod_base = OTHER; note = 2'-O-Methyl-adenosine
  modified_base 35: mod_base = OTHER; note = 2'-O-Methyl-adenosine
  modified_base 36: mod_base = OTHER; note = 2'-O-Methyl-adenosine
  modified_base 37: mod_base = OTHER; note = 2'-O-Methyl-uridine
  modified_base 38: mod_base = OTHER; note = 2'-O-Methyl-adenosine
  modified_base 39: mod_base = OTHER; note = 2'-O-Methyl-guanosine
  modified_base 40: mod_base = OTHER; note = 2'-O-Methyl-cytidine
  modified_base 41: mod_base = OTHER; note = 2'-O-Methyl-adenosine
  modified_base 42: mod_base = OTHER; note = 2'-O-Methyl-adenosine
  modified_base 46: mod_base = OTHER; note = 2'-O-Methyl-adenosine
  modified_base 48: mod_base = OTHER; note = 2'-O-Methyl-adenosine
  modified_base 50: mod_base = OTHER; note = 2'-O-Methyl-uridine
  modified_base 52: mod_base = OTHER; note = 2'-O-Methyl-adenosine
  modified_base 53: mod_base = OTHER; note = 2'-O-Methyl-guanosine
  modified_base 54: mod_base = OTHER; note = 2'-O-Methyl-guanosine
  modified_base 57: mod_base = OTHER; note = 2'-O-Methyl-adenosine
  modified_base 61: mod_base = OTHER; note = 2'-O-Methyl-cytidine
  modified_base 66: mod_base = OTHER; note = 2'-O-Methyl-uridine
  modified_base 67: mod_base = OTHER; note = 2'-O-Methyl-cytidine
  modified_base 70: mod_base = OTHER; note = 2'-O-Methyl-cytidine
  modified_base 71: mod_base = OTHER; note = 2'-O-Methyl-uridine
  modified_base 72: mod_base = OTHER; note = 2'-O-Methyl-uridine
  modified_base 74: mod_base = OTHER; note = 2'-O-Methyl-adenosine
  modified_base 75: mod_base = OTHER; note = 2'-O-Methyl-adenosine
  modified_base 76: mod_base = OTHER; note = 2'-O-Methyl-adenosine
  modified_base 77: mod_base = OTHER; note = 2'-O-Methyl-adenosine
  modified_base 78: mod_base = OTHER; note = 2'-O-Methyl-adenosine
  modified_base 79: mod_base = OTHER; note = 2'-O-Methyl-guanosine
  modified_base 80: mod_base = OTHER; note = 2'-O-Methyl-uridine
  modified_base 82: mod_base = OTHER; note = 2'-O-Methyl-guanosine
  modified_base 83: mod_base = OTHER; note = 2'-O-Methyl-cytidine
  modified_base 84: mod_base = OTHER; note = 2'-O-Methyl-adenosine
  modified_base 85: mod_base = OTHER; note = 2'-O-Methyl-cytidine
  modified_base 86: mod_base = OTHER; note = 2'-O-Methyl-cytidine
  modified_base 87: mod_base = OTHER; note = 2'-O-Methyl-guanosine
  modified_base 89: mod_base = OTHER; note = 2'-O-Methyl-guanosine
  modified_base 92: mod_base = OTHER; note = 2'-O-Methyl-guanosine
  modified_base 93: mod_base = OTHER; note = 2'-O-Methyl-guanosine
  modified_base 94: mod_base = OTHER; note = 2'-O-Methyl-uridine
  modified_base 95: mod_base = OTHER; note = 2'-O-Methyl-guanosine
  modified_base 96: mod_base = OTHER; note = 2'-O-Methyl-cytidine
  modified_base 97: mod_base = OTHER; note = 2'-O-Methyl-uridine phosphorothioate
  modified_base 98: mod_base = OTHER; note = 2'-O-Methyl-uridine phosphorothioate
  modified_base 99: mod_base = OTHER; note = 2'-O-Methyl-uridine phosphorothioate
  modified_base 100: mod_base = OTHER; note = 2'-O-Methyl-uridine

SEQ ID NO: 1709 - RNA, 103 nt, synthetic construct; identical to SEQ ID NO: 1700
  source 1..103: mol_type = other RNA; note = Description of Artificial Sequence: Synthetic polynucleotide
  modified_base 1: mod_base = OTHER; note = 2'-O-Methyl-cytidine phosphorothioate
  modified_base 2: mod_base = OTHER; note = 2'-O-Methyl-adenosine phosphorothioate
  modified_base 3: mod_base = OTHER; note = 2'-O-Methyl-guanosine phosphorothioate
  modified_base 21: mod_base = OTHER; note = 2'-O-Methyl-guanosine
  modified_base 25: mod_base = OTHER; note = uridine phosphorothioate
  modified_base 28: mod_base = OTHER; note = 2'-O-Methyl-adenosine
  modified_base 29: mod_base = OTHER; note = 2'-O-Methyl-guanosine
  modified_base 30: mod_base = OTHER; note = 2'-O-Methyl-cytidine
  modified_base 31: mod_base = OTHER; note = 2'-O-Methyl-uridine
  modified_base 32: mod_base = OTHER; note = 2'-O-Methyl-adenosine
  modified_base 34: mod_base = OTHER; note = 2'-O-Methyl-adenosine
  modified_base 35: mod_base = OTHER; note = 2'-O-Methyl-adenosine
  modified_base 36: mod_base = OTHER; note = 2'-O-Methyl-adenosine
  modified_base 37: mod_base = OTHER; note = 2'-O-Methyl-uridine
  modified_base 38: mod_base = OTHER; note = 2'-O-Methyl-adenosine
  modified_base 39: mod_base = OTHER; note = 2'-O-Methyl-guanosine
  modified_base 40: mod_base = OTHER; note = 2'-O-Methyl-cytidine
  modified_base 41: mod_base = OTHER; note = 2'-O-Methyl-adenosine
  modified_base 42: mod_base = OTHER; note = 2'-O-Methyl-adenosine
  modified_base 46: mod_base = OTHER; note = 2'-O-Methyl-adenosine
  modified_base 48: mod_base = OTHER; note = 2'-O-Methyl-adenosine
  modified_base 50: mod_base = OTHER; note = 2'-O-Methyl-uridine
  modified_base 52: mod_base = OTHER; note = 2'-O-Methyl-adenosine
  modified_base 53: mod_base = OTHER; note = 2'-O-Methyl-guanosine
  modified_base 54: mod_base = OTHER; note = 2'-O-Methyl-guanosine
  modified_base 55: mod_base = OTHER; note = 2'-O-Methyl-cytidine
  modified_base 56: mod_base = OTHER; note = 2'-O-Methyl-uridine
  modified_base 57: mod_base = OTHER; note = 2'-O-Methyl-adenosine
  modified_base 60: mod_base = OTHER; note = 2'-O-Methyl-cytidine
  modified_base 61: mod_base = OTHER; note = 2'-O-Methyl-cytidine
  modified_base 66: mod_base = OTHER; note = 2'-O-Methyl-uridine
  modified_base 67: mod_base = OTHER; note = 2'-O-Methyl-cytidine
  modified_base 70: mod_base = OTHER; note = 2'-O-Methyl-cytidine
  modified_base 71: mod_base = OTHER; note = 2'-O-Methyl-uridine
  modified_base 72: mod_base = OTHER; note = 2'-O-Methyl-uridine
  modified_base 74: mod_base = OTHER; note = 2'-O-Methyl-adenosine
  modified_base 75: mod_base = OTHER; note = 2'-O-Methyl-adenosine
  modified_base 76: mod_base = OTHER; note = 2'-O-Methyl-adenosine
  modified_base 77: mod_base = OTHER; note = 2'-O-Methyl-adenosine
  modified_base 78: mod_base = OTHER; note = 2'-O-Methyl-adenosine
  modified_base 79: mod_base = OTHER; note = 2'-O-Methyl-guanosine
  modified_base 80: mod_base = OTHER; note = 2'-O-Methyl-uridine
  modified_base 81: mod_base = OTHER; note = 2'-O-Methyl-guanosine
  modified_base 83: mod_base = OTHER; note = 2'-O-Methyl-cytidine
  modified_base 84: mod_base = OTHER; note = 2'-O-Methyl-adenosine
  modified_base 85: mod_base = OTHER; note = 2'-O-Methyl-cytidine
  modified_base 86: mod_base = OTHER; note = 2'-O-Methyl-cytidine
  modified_base 87: mod_base = OTHER; note = 2'-O-Methyl-guanosine
  modified_base 88: mod_base = OTHER; note = 2'-O-Methyl-adenosine
  modified_base 89: mod_base = OTHER; note = 2'-O-Methyl-guanosine
  modified_base 90: mod_base = OTHER; note = 2'-O-Methyl-uridine
  modified_base 91: mod_base = OTHER; note = 2'-O-Methyl-cytidine
  modified_base 92: mod_base = OTHER; note = 2'-O-Methyl-guanosine
  modified_base 93: mod_base = OTHER; note = 2'-O-Methyl-guanosine
  modified_base 94: mod_base = OTHER; note = 2'-O-Methyl-uridine
  modified_base 95: mod_base = OTHER; note = 2'-O-Methyl-guanosine
  modified_base 96: mod_base = OTHER; note = 2'-O-Methyl-cytidine
  modified_base 97: mod_base = OTHER; note = 2'-O-Methyl-uridine phosphorothioate
  modified_base 98: mod_base = OTHER; note = 2'-O-Methyl-uridine phosphorothioate
  modified_base 99: mod_base = OTHER; note = 2'-O-Methyl-uridine phosphorothioate
  modified_base 100: mod_base = OTHER; note = 2'-O-Methyl-uridine

SEQ ID NO: 1710 - RNA, 103 nt, synthetic construct; identical to SEQ ID NO: 1643
  source 1..103: mol_type = other RNA; note = Description of Artificial Sequence: Synthetic polynucleotide
  modified_base 1: mod_base = OTHER; note = 2'-O-Methyl-cytidine phosphorothioate
  modified_base 2: mod_base = OTHER; note = 2'-O-Methyl-cytidine phosphorothioate
  modified_base 3: mod_base = OTHER; note = 2'-O-Methyl-cytidine phosphorothioate
  modified_base 21: mod_base = OTHER; note = 2'-O-Methyl-guanosine
  modified_base 28: mod_base = OTHER; note = 2'-O-Methyl-adenosine
  modified_base 29: mod_base = OTHER; note = 2'-O-Methyl-guanosine
  modified_base 30: mod_base = OTHER; note = 2'-O-Methyl-cytidine
  modified_base 31: mod_base = OTHER; note = 2'-O-Methyl-uridine
  modified_base 32: mod_base = OTHER; note = 2'-O-Methyl-adenosine
  modified_base 34: mod_base = OTHER; note = 2'-O-Methyl-adenosine
  modified_base 35: mod_base = OTHER; note = 2'-O-Methyl-adenosine
  modified_base 36: mod_base = OTHER; note = 2'-O-Methyl-adenosine
  modified_base 37: mod_base = OTHER; note = 2'-O-Methyl-uridine
  modified_base 38: mod_base = OTHER; note = 2'-O-Methyl-adenosine
  modified_base 39: mod_base = OTHER; note = 2'-O-Methyl-guanosine
  modified_base 40: mod_base = OTHER; note = 2'-O-Methyl-cytidine
  modified_base 41: mod_base = OTHER; note = 2'-O-Methyl-adenosine
  modified_base 42: mod_base = OTHER; note = 2'-O-Methyl-adenosine
  modified_base 45: mod_base = OTHER; note = uridine phosphorothioate
  modified_base 46: mod_base = OTHER; note = 2'-O-Methyl-adenosine
  modified_base 48: mod_base = OTHER; note = 2'-O-Methyl-adenosine
  modified_base 50: mod_base = OTHER; note = 2'-O-Methyl-uridine
  modified_base 52: mod_base = OTHER; note = 2'-O-Methyl-adenosine
  modified_base 53: mod_base = OTHER; note = 2'-O-Methyl-guanosine
  modified_base 54: mod_base = OTHER; note = 2'-O-Methyl-guanosine
  modified_base 57: mod_base = OTHER; note = 2'-O-Methyl-adenosine
  modified_base 61: mod_base = OTHER; note = 2'-O-Methyl-cytidine
  modified_base 64: mod_base = OTHER; note = uridine phosphorothioate
  modified_base 66: mod_base = OTHER; note = 2'-O-Methyl-uridine
  modified_base 67: mod_base = OTHER; note = 2'-O-Methyl-cytidine
  modified_base 70: mod_base = OTHER; note = 2'-O-Methyl-cytidine
  modified_base 71: mod_base = OTHER; note = 2'-O-Methyl-uridine
  modified_base 72: mod_base = OTHER; note = 2'-O-Methyl-uridine
  modified_base 74: mod_base = OTHER; note = 2'-O-Methyl-adenosine
  modified_base 75: mod_base = OTHER; note = 2'-O-Methyl-adenosine
  modified_base 76: mod_base = OTHER; note = 2'-O-Methyl-adenosine
  modified_base 77: mod_base = OTHER; note = 2'-O-Methyl-adenosine
  modified_base 78: mod_base = OTHER; note = 2'-O-Methyl-adenosine
  modified_base 79: mod_base = OTHER; note = 2'-O-Methyl-guanosine
  modified_base 80: mod_base = OTHER; note = 2'-O-Methyl-uridine
  modified_base 82: mod_base = OTHER; note = 2'-O-Methyl-guanosine
  modified_base 83: mod_base = OTHER; note = 2'-O-Methyl-cytidine
  modified_base 84: mod_base = OTHER; note = 2'-O-Methyl-adenosine
  modified_base 85: mod_base = OTHER; note = 2'-O-Methyl-cytidine
  modified_base 86: mod_base = OTHER; note = 2'-O-Methyl-cytidine
  modified_base 87: mod_base = OTHER; note = 2'-O-Methyl-guanosine
  modified_base 89: mod_base = OTHER; note = 2'-O-Methyl-guanosine
  modified_base 92: mod_base = OTHER; note = 2'-O-Methyl-guanosine
  modified_base 93: mod_base = OTHER; note = 2'-O-Methyl-guanosine
  modified_base 94: mod_base = OTHER; note = 2'-O-Methyl-uridine
  modified_base 95: mod_base = OTHER; note = 2'-O-Methyl-guanosine
  modified_base 96: mod_base = OTHER; note = 2'-O-Methyl-cytidine
  modified_base 97: mod_base = OTHER; note = 2'-O-Methyl-uridine phosphorothioate
  modified_base 98: mod_base = OTHER; note = 2'-O-Methyl-uridine phosphorothioate
  modified_base 99: mod_base = OTHER; note = 2'-O-Methyl-uridine phosphorothioate
  modified_base 100: mod_base = OTHER; note = 2'-O-Methyl-uridine

SEQ ID NO: 1711 - RNA, 103 nt, synthetic construct; identical to SEQ ID NO: 1699
  source 1..103: mol_type = other RNA; note = Description of Artificial Sequence: Synthetic polynucleotide
  modified_base 1: mod_base = OTHER; note = 2'-O-Methyl-guanosine phosphorothioate
  modified_base 2: mod_base = OTHER; note = 2'-O-Methyl-adenosine phosphorothioate
  modified_base 3: mod_base = OTHER; note = 2'-O-Methyl-guanosine phosphorothioate
  modified_base 21: mod_base = OTHER; note = 2'-O-Methyl-guanosine
  modified_base 28: mod_base = OTHER; note = 2'-O-Methyl-adenosine
  modified_base 29: mod_base = OTHER; note = 2'-O-Methyl-guanosine
  modified_base 30: mod_base = OTHER; note = 2'-O-Methyl-cytidine
  modified_base 31: mod_base = OTHER; note = 2'-O-Methyl-uridine
  modified_base 32: mod_base = OTHER; note = 2'-O-Methyl-adenosine
  modified_base 34: mod_base = OTHER; note = 2'-O-Methyl-adenosine
  modified_base 35: mod_base = OTHER; note = 2'-O-Methyl-adenosine
  modified_base 36: mod_base = OTHER; note = 2'-O-Methyl-adenosine
  modified_base 37: mod_base = OTHER; note = 2'-O-Methyl-uridine
  modified_base 38: mod_base = OTHER; note = 2'-O-Methyl-adenosine
  modified_base 39: mod_base = OTHER; note = 2'-O-Methyl-guanosine
  modified_base 40: mod_base = OTHER; note = 2'-O-Methyl-cytidine
  modified_base 41: mod_base = OTHER; note = 2'-O-Methyl-adenosine
  modified_base 42: mod_base = OTHER; note = 2'-O-Methyl-adenosine
  modified_base 45: mod_base = OTHER; note = uridine phosphorothioate
  modified_base 46: mod_base = OTHER; note = 2'-O-Methyl-adenosine
  modified_base 48: mod_base = OTHER; note = 2'-O-Methyl-adenosine
  modified_base 50: mod_base = OTHER; note = 2'-O-Methyl-uridine
  modified_base 52: mod_base = OTHER; note = 2'-O-Methyl-adenosine
  modified_base 53: mod_base = OTHER; note = 2'-O-Methyl-guanosine
  modified_base 54: mod_base = OTHER; note = 2'-O-Methyl-guanosine
  modified_base 57: mod_base = OTHER; note = 2'-O-Methyl-adenosine
  modified_base 61: mod_base = OTHER; note = 2'-O-Methyl-cytidine
  modified_base 64: mod_base = OTHER; note = uridine phosphorothioate
  modified_base 66: mod_base = OTHER; note = 2'-O-Methyl-uridine
  modified_base 67: mod_base = OTHER; note = 2'-O-Methyl-cytidine
  modified_base 70: mod_base = OTHER; note = 2'-O-Methyl-cytidine
  modified_base 71: mod_base = OTHER; note = 2'-O-Methyl-uridine
  modified_base 72: mod_base = OTHER; note = 2'-O-Methyl-uridine
  modified_base 74: mod_base = OTHER; note = 2'-O-Methyl-adenosine
  modified_base 75: mod_base = OTHER; note = 2'-O-Methyl-adenosine
  modified_base 76: mod_base = OTHER; note = 2'-O-Methyl-adenosine
  modified_base 77: mod_base = OTHER; note = 2'-O-Methyl-adenosine
  modified_base 78: mod_base = OTHER; note = 2'-O-Methyl-adenosine
  modified_base 79: mod_base = OTHER; note = 2'-O-Methyl-guanosine
  modified_base 80: mod_base = OTHER; note = 2'-O-Methyl-uridine
  modified_base 82: mod_base = OTHER; note = 2'-O-Methyl-guanosine
  modified_base 83: mod_base = OTHER; note = 2'-O-Methyl-cytidine
  modified_base 84: mod_base = OTHER; note = 2'-O-Methyl-adenosine
  modified_base 85: mod_base = OTHER; note = 2'-O-Methyl-cytidine
  modified_base 86: mod_base = OTHER; note = 2'-O-Methyl-cytidine
  modified_base 87: mod_base = OTHER; note = 2'-O-Methyl-guanosine
  modified_base 89: mod_base = OTHER; note = 2'-O-Methyl-guanosine
  modified_base 92: mod_base = OTHER; note = 2'-O-Methyl-guanosine
  modified_base 93: mod_base = OTHER; note = 2'-O-Methyl-guanosine
  modified_base 94: mod_base = OTHER; note = 2'-O-Methyl-uridine
  modified_base 95: mod_base = OTHER; note = 2'-O-Methyl-guanosine
  modified_base 96: mod_base = OTHER; note = 2'-O-Methyl-cytidine
  modified_base 97: mod_base = OTHER; note = 2'-O-Methyl-uridine phosphorothioate
  modified_base 98: mod_base = OTHER; note = 2'-O-Methyl-uridine phosphorothioate
  modified_base 99: mod_base = OTHER; note = 2'-O-Methyl-uridine phosphorothioate
  modified_base 100: mod_base = OTHER; note = 2'-O-Methyl-uridine

SEQ ID NO: 1712 - RNA, 103 nt, synthetic construct; identical to SEQ ID NO: 1700
  source 1..103: mol_type = other RNA; note = Description of Artificial Sequence: Synthetic polynucleotide
  modified_base 1: mod_base = OTHER; note = 2'-O-Methyl-cytidine phosphorothioate
  modified_base 2: mod_base = OTHER; note = 2'-O-Methyl-adenosine phosphorothioate
  modified_base 3: mod_base = OTHER; note = 2'-O-Methyl-guanosine phosphorothioate
  modified_base 21: mod_base = OTHER; note = 2'-O-Methyl-guanosine
  modified_base 28: mod_base = OTHER; note = 2'-O-Methyl-adenosine
  modified_base 29: mod_base = OTHER; note = 2'-O-Methyl-guanosine
  modified_base 30: mod_base = OTHER; note = 2'-O-Methyl-cytidine
  modified_base 31: mod_base = OTHER; note = 2'-O-Methyl-uridine
  modified_base 32: mod_base = OTHER; note = 2'-O-Methyl-adenosine
  modified_base 34: mod_base = OTHER; note = 2'-O-Methyl-adenosine
  modified_base 35: mod_base = OTHER; note = 2'-O-Methyl-adenosine
  modified_base 36: mod_base = OTHER; note = 2'-O-Methyl-adenosine
  modified_base 37: mod_base = OTHER; note = 2'-O-Methyl-uridine
  modified_base 38: mod_base = OTHER; note = 2'-O-Methyl-adenosine
  modified_base 39: mod_base = OTHER; note = 2'-O-Methyl-guanosine
  modified_base 40: mod_base = OTHER; note = 2'-O-Methyl-cytidine
  modified_base 41: mod_base = OTHER; note = 2'-O-Methyl-adenosine
  modified_base 42: mod_base = OTHER; note = 2'-O-Methyl-adenosine
  modified_base 45: mod_base = OTHER; note = uridine phosphorothioate
  modified_base 46: mod_base = OTHER; note = 2'-O-Methyl-adenosine
  modified_base 48: mod_base = OTHER; note = 2'-O-Methyl-adenosine
  modified_base 50: mod_base = OTHER; note = 2'-O-Methyl-uridine
  modified_base 52: mod_base = OTHER; note = 2'-O-Methyl-adenosine
  modified_base 53: mod_base = OTHER; note = 2'-O-Methyl-guanosine
  modified_base 54: mod_base = OTHER; note = 2'-O-Methyl-guanosine
  modified_base 55: mod_base = OTHER; note = 2'-O-Methyl-cytidine
  modified_base 56: mod_base = OTHER; note = 2'-O-Methyl-uridine
  modified_base 57: mod_base = OTHER; note = 2'-O-Methyl-adenosine
  modified_base 60: mod_base = OTHER; note = 2'-O-Methyl-cytidine
  modified_base 61: mod_base = OTHER; note = 2'-O-Methyl-cytidine
  modified_base 64: mod_base = OTHER; note = uridine phosphorothioate
  modified_base 66: mod_base = OTHER; note = 2'-O-Methyl-uridine
  modified_base 67: mod_base = OTHER; note = 2'-O-Methyl-cytidine
  modified_base 70: mod_base = OTHER; note = 2'-O-Methyl-cytidine
  modified_base 71: mod_base = OTHER; note = 2'-O-Methyl-uridine
  modified_base 72: mod_base = OTHER; note = 2'-O-Methyl-uridine
  modified_base 74: mod_base = OTHER; note = 2'-O-Methyl-adenosine
  modified_base 75: mod_base = OTHER; note = 2'-O-Methyl-adenosine
  modified_base 76: mod_base = OTHER; note = 2'-O-Methyl-adenosine
  modified_base 77: mod_base = OTHER; note = 2'-O-Methyl-adenosine
  modified_base 78: mod_base = OTHER; note = 2'-O-Methyl-adenosine
  modified_base 79: mod_base = OTHER; note = 2'-O-Methyl-guanosine
  modified_base 80: mod_base = OTHER; note = 2'-O-Methyl-uridine
  modified_base 81: mod_base = OTHER; note = 2'-O-Methyl-guanosine
  modified_base 83: mod_base = OTHER; note = 2'-O-Methyl-cytidine
  modified_base 84: mod_base = OTHER; note = 2'-O-Methyl-adenosine
  modified_base 85: mod_base = OTHER; note = 2'-O-Methyl-cytidine
  modified_base 86: mod_base = OTHER; note = 2'-O-Methyl-cytidine
  modified_base 87: mod_base = OTHER; note = 2'-O-Methyl-guanosine
  modified_base 88: mod_base = OTHER; note = 2'-O-Methyl-adenosine
  modified_base 89: mod_base = OTHER; note = 2'-O-Methyl-guanosine
  modified_base 90: mod_base = OTHER; note = 2'-O-Methyl-uridine
  modified_base 91: mod_base = OTHER; note = 2'-O-Methyl-cytidine
  modified_base 92: mod_base = OTHER; note = 2'-O-Methyl-guanosine
  modified_base 93: mod_base = OTHER; note = 2'-O-Methyl-guanosine
  modified_base 94: mod_base = OTHER; note = 2'-O-Methyl-uridine
  modified_base 95: mod_base = OTHER; note = 2'-O-Methyl-guanosine
  modified_base 96: mod_base = OTHER; note = 2'-O-Methyl-cytidine
  modified_base 97: mod_base = OTHER; note = 2'-O-Methyl-uridine phosphorothioate
  modified_base 98: mod_base = OTHER; note = 2'-O-Methyl-uridine phosphorothioate
  modified_base 99: mod_base = OTHER; note = 2'-O-Methyl-uridine phosphorothioate
  modified_base 100: mod_base = OTHER; note = 2'-O-Methyl-uridine

SEQ ID NO: 1713 - RNA, 103 nt, synthetic construct; identical to SEQ ID NO: 1643
  source 1..103: mol_type = other RNA; note = Description of Artificial Sequence: Synthetic polynucleotide
  modified_base 1: mod_base = OTHER; note = 2'-O-Methyl-cytidine phosphorothioate
  modified_base 2: mod_base = OTHER; note = 2'-O-Methyl-cytidine phosphorothioate
  modified_base 3: mod_base = OTHER; note = 2'-O-Methyl-cytidine phosphorothioate
  modified_base 21: mod_base = OTHER; note = 2'-O-Methyl-guanosine
  modified_base 25: mod_base = OTHER; note = uridine phosphorothioate
  modified_base 28: mod_base = OTHER; note = 2'-O-Methyl-adenosine
  modified_base 29: mod_base = OTHER; note = 2'-O-Methyl-guanosine
  modified_base 30: mod_base = OTHER; note = 2'-O-Methyl-cytidine
  modified_base 31: mod_base = OTHER; note = 2'-O-Methyl-uridine
  modified_base 32: mod_base = OTHER; note = 2'-O-Methyl-adenosine
  modified_base 34: mod_base = OTHER; note = 2'-O-Methyl-adenosine
  modified_base 35: mod_base = OTHER; note = 2'-O-Methyl-adenosine
  modified_base 36: mod_base = OTHER; note = 2'-O-Methyl-adenosine
  modified_base 37: mod_base = OTHER; note = 2'-O-Methyl-uridine
  modified_base 38: mod_base = OTHER; note = 2'-O-Methyl-adenosine
  modified_base 39: mod_base = OTHER; note = 2'-O-Methyl-guanosine
  modified_base 40: mod_base = OTHER; note = 2'-O-Methyl-cytidine
  modified_base 41: mod_base = OTHER; note = 2'-O-Methyl-adenosine
  modified_base 42: mod_base = OTHER; note = 2'-O-Methyl-adenosine
  modified_base 45: mod_base = OTHER; note = uridine phosphorothioate
  modified_base 46: mod_base = OTHER; note = 2'-O-Methyl-adenosine
  modified_base 48: mod_base = OTHER; note = 2'-O-Methyl-adenosine
  modified_base 50: mod_base = OTHER; note = 2'-O-Methyl-uridine
  modified_base 52: mod_base = OTHER; note = 2'-O-Methyl-adenosine
  modified_base 53: mod_base = OTHER; note = 2'-O-Methyl-guanosine
  modified_base 54: mod_base = OTHER; note = 2'-O-Methyl-guanosine
  modified_base 57: mod_base = OTHER; note = 2'-O-Methyl-adenosine
  modified_base 61: mod_base = OTHER; note = 2'-O-Methyl-cytidine
  modified_base 66: mod_base = OTHER; note = 2'-O-Methyl-uridine
  modified_base 67: mod_base = OTHER; note = 2'-O-Methyl-cytidine
  modified_base 70: mod_base = OTHER; note = 2'-O-Methyl-cytidine
  modified_base 71: mod_base = OTHER; note = 2'-O-Methyl-uridine
  modified_base 72: mod_base = OTHER; note = 2'-O-Methyl-uridine
  modified_base 74: mod_base = OTHER; note = 2'-O-Methyl-adenosine
  modified_base 75: mod_base = OTHER; note = 2'-O-Methyl-adenosine
  modified_base 76: mod_base = OTHER; note = 2'-O-Methyl-adenosine
  modified_base 77: mod_base = OTHER; note = 2'-O-Methyl-adenosine
  modified_base 78: mod_base = OTHER; note = 2'-O-Methyl-adenosine
  modified_base 79: mod_base = OTHER; note = 2'-O-Methyl-guanosine
  modified_base 80: mod_base = OTHER; note = 2'-O-Methyl-uridine
  modified_base 82: mod_base = OTHER; note = 2'-O-Methyl-guanosine
  modified_base 83: mod_base = OTHER; note = 2'-O-Methyl-cytidine
  modified_base 84: mod_base = OTHER; note = 2'-O-Methyl-adenosine
  modified_base 85: mod_base = OTHER; note = 2'-O-Methyl-cytidine
  modified_base 86: mod_base = OTHER; note = 2'-O-Methyl-cytidine
  modified_base 87: mod_base = OTHER; note = 2'-O-Methyl-guanosine
  modified_base 89: mod_base = OTHER; note = 2'-O-Methyl-guanosine
  modified_base 92: mod_base = OTHER; note = 2'-O-Methyl-guanosine
  modified_base 93: mod_base = OTHER; note = 2'-O-Methyl-guanosine
  modified_base 94: mod_base = OTHER; note = 2'-O-Methyl-uridine
  modified_base 95: mod_base = OTHER; note = 2'-O-Methyl-guanosine
  modified_base 96: mod_base = OTHER; note = 2'-O-Methyl-cytidine
  modified_base 97: mod_base = OTHER; note = 2'-O-Methyl-uridine phosphorothioate
  modified_base 98: mod_base = OTHER; note = 2'-O-Methyl-uridine phosphorothioate
  modified_base 99: mod_base = OTHER; note = 2'-O-Methyl-uridine phosphorothioate
  modified_base 100: mod_base = OTHER; note = 2'-O-Methyl-uridine

SEQ ID NO: 1714 - RNA, 103 nt, synthetic construct; identical to SEQ ID NO: 1699
  source 1..103: mol_type = other RNA; note = Description of Artificial Sequence: Synthetic polynucleotide
  modified_base 1: mod_base = OTHER; note = 2'-O-Methyl-guanosine phosphorothioate
  modified_base 2: mod_base = OTHER; note = 2'-O-Methyl-adenosine phosphorothioate
  modified_base 3: mod_base = OTHER; note = 2'-O-Methyl-guanosine phosphorothioate
  modified_base 21: mod_base = OTHER; note = 2'-O-Methyl-guanosine
  modified_base 25: mod_base = OTHER; note = uridine phosphorothioate
  modified_base 28: mod_base = OTHER; note = 2'-O-Methyl-adenosine
  modified_base 29: mod_base = OTHER; note = 2'-O-Methyl-guanosine
  modified_base 30: mod_base = OTHER; note = 2'-O-Methyl-cytidine
  modified_base 31: mod_base = OTHER; note = 2'-O-Methyl-uridine
  modified_base 32: mod_base = OTHER; note = 2'-O-Methyl-adenosine
  modified_base 34: mod_base = OTHER; note = 2'-O-Methyl-adenosine
  modified_base 35: mod_base = OTHER; note = 2'-O-Methyl-adenosine
  modified_base 36: mod_base = OTHER; note = 2'-O-Methyl-adenosine
  modified_base 37: mod_base = OTHER; note = 2'-O-Methyl-uridine
  modified_base 38: mod_base = OTHER; note = 2'-O-Methyl-adenosine
  modified_base 39: mod_base = OTHER; note = 2'-O-Methyl-guanosine
  modified_base 40: mod_base = OTHER; note = 2'-O-Methyl-cytidine
  modified_base 41: mod_base = OTHER; note = 2'-O-Methyl-adenosine
  modified_base 42: mod_base = OTHER; note = 2'-O-Methyl-adenosine
  modified_base 45: mod_base = OTHER; note = uridine phosphorothioate
  modified_base 46: mod_base = OTHER; note = 2'-O-Methyl-adenosine
  modified_base 48: mod_base = OTHER; note = 2'-O-Methyl-adenosine
  modified_base 50: mod_base = OTHER; note = 2'-O-Methyl-uridine
  modified_base 52: mod_base = OTHER; note = 2'-O-Methyl-adenosine
  modified_base 53: mod_base = OTHER; note = 2'-O-Methyl-guanosine
  modified_base 54: mod_base = OTHER; note = 2'-O-Methyl-guanosine
  modified_base 57: mod_base = OTHER; note = 2'-O-Methyl-adenosine
  modified_base 61: mod_base = OTHER; note = 2'-O-Methyl-cytidine
  modified_base 66: mod_base = OTHER; note = 2'-O-Methyl-uridine
  modified_base 67: mod_base = OTHER; note = 2'-O-Methyl-cytidine
  modified_base 70: mod_base = OTHER; note = 2'-O-Methyl-cytidine
  modified_base 71: mod_base = OTHER; note = 2'-O-Methyl-uridine
  modified_base 72: mod_base = OTHER; note = 2'-O-Methyl-uridine
  modified_base 74: mod_base = OTHER; note = 2'-O-Methyl-adenosine
  modified_base 75: mod_base = OTHER; note = 2'-O-Methyl-adenosine
  modified_base 76: mod_base = OTHER; note = 2'-O-Methyl-adenosine
  modified_base 77: mod_base = OTHER; note = 2'-O-Methyl-adenosine
  modified_base 78: mod_base = OTHER; note = 2'-O-Methyl-adenosine
  modified_base 79: mod_base = OTHER; note = 2'-O-Methyl-guanosine
  modified_base 80: mod_base = OTHER; note = 2'-O-Methyl-uridine
  modified_base 82: mod_base = OTHER; note = 2'-O-Methyl-guanosine
  modified_base 83: mod_base = OTHER; note = 2'-O-Methyl-cytidine
  modified_base 84: mod_base = OTHER; note = 2'-O-Methyl-adenosine
  modified_base 85: mod_base = OTHER; note = 2'-O-Methyl-cytidine
  modified_base 86: mod_base = OTHER; note = 2'-O-Methyl-cytidine
  modified_base 87: mod_base = OTHER; note = 2'-O-Methyl-guanosine
  modified_base 89: mod_base = OTHER; note = 2'-O-Methyl-guanosine
  modified_base 92: mod_base = OTHER; note = 2'-O-Methyl-guanosine
  modified_base 93: mod_base = OTHER; note = 2'-O-Methyl-guanosine
  modified_base 94: mod_base = OTHER; note = 2'-O-Methyl-uridine
  modified_base 95: mod_base = OTHER; note = 2'-O-Methyl-guanosine
  modified_base 96: mod_base = OTHER; note = 2'-O-Methyl-cytidine
  modified_base 97: mod_base = OTHER; note = 2'-O-Methyl-uridine phosphorothioate
  modified_base 98: mod_base = OTHER; note = 2'-O-Methyl-uridine phosphorothioate
  modified_base 99: mod_base = OTHER; note = 2'-O-Methyl-uridine phosphorothioate
  modified_base 100: mod_base = OTHER; note = 2'-O-Methyl-uridine

SEQ ID NO: 1715 - RNA, 103 nt, synthetic construct; identical to SEQ ID NO: 1700
  source 1..103: mol_type = other RNA; note = Description of Artificial Sequence: Synthetic polynucleotide
  modified_base 1: mod_base = OTHER; note = 2'-O-Methyl-cytidine phosphorothioate
  modified_base 2: mod_base = OTHER; note = 2'-O-Methyl-adenosine phosphorothioate
  modified_base 3: mod_base = OTHER; note = 2'-O-Methyl-guanosine phosphorothioate
  modified_base 21: mod_base = OTHER; note = 2'-O-Methyl-guanosine
  modified_base 25: mod_base = OTHER; note = uridine phosphorothioate
  modified_base 28: mod_base = OTHER; note = 2'-O-Methyl-adenosine
  modified_base 29: mod_base = OTHER; note = 2'-O-Methyl-guanosine
  modified_base 30: mod_base = OTHER; note = 2'-O-Methyl-cytidine
  modified_base 31: mod_base = OTHER; note = 2'-O-Methyl-uridine
  modified_base 32: mod_base = OTHER; note = 2'-O-Methyl-adenosine
  modified_base 34: mod_base = OTHER; note = 2'-O-Methyl-adenosine
  modified_base 35: mod_base = OTHER; note = 2'-O-Methyl-adenosine
  modified_base 36: mod_base = OTHER; note = 2'-O-Methyl-adenosine
  modified_base 37: mod_base = OTHER; note = 2'-O-Methyl-uridine
  modified_base 38: mod_base = OTHER; note = 2'-O-Methyl-adenosine
  modified_base 39: mod_base = OTHER; note = 2'-O-Methyl-guanosine
  modified_base 40: mod_base = OTHER; note = 2'-O-Methyl-cytidine
  modified_base 41: mod_base = OTHER; note = 2'-O-Methyl-adenosine
  modified_base 42: mod_base = OTHER; note = 2'-O-Methyl-adenosine
  modified_base 45: mod_base = OTHER; note = uridine phosphorothioate
  modified_base 46: mod_base = OTHER; note = 2'-O-Methyl-adenosine
  modified_base 48: mod_base = OTHER; note = 2'-O-Methyl-adenosine
  modified_base 50: mod_base = OTHER; note = 2'-O-Methyl-uridine
  modified_base 52: mod_base = OTHER; note = 2'-O-Methyl-adenosine
  modified_base 53: mod_base = OTHER; note = 2'-O-Methyl-guanosine
  modified_base 54: mod_base = OTHER; note = 2'-O-Methyl-guanosine
  modified_base 55: mod_base = OTHER; note = 2'-O-Methyl-cytidine
  modified_base 56: mod_base = OTHER; note = 2'-O-Methyl-uridine
  modified_base 57: mod_base = OTHER; note = 2'-O-Methyl-adenosine
  modified_base 60: mod_base = OTHER; note = 2'-O-Methyl-cytidine
  modified_base 61: mod_base = OTHER; note = 2'-O-Methyl-cytidine
  modified_base 66: mod_base = OTHER; note = 2'-O-Methyl-uridine
  modified_base 67: mod_base = OTHER; note = 2'-O-Methyl-cytidine
  modified_base 70: mod_base = OTHER; note = 2'-O-Methyl-cytidine
  modified_base 71: mod_base = OTHER; note = 2'-O-Methyl-uridine
  modified_base 72: mod_base = OTHER; note = 2'-O-Methyl-uridine
  modified_base 74: mod_base = OTHER; note = 2'-O-Methyl-adenosine
  modified_base 75: mod_base = OTHER; note = 2'-O-Methyl-adenosine
  modified_base 76: mod_base = OTHER; note = 2'-O-Methyl-adenosine
  modified_base 77: mod_base = OTHER; note = 2'-O-Methyl-adenosine
  modified_base 78: mod_base = OTHER; note = 2'-O-Methyl-adenosine
  modified_base 79: mod_base = OTHER; note = 2'-O-Methyl-guanosine
  modified_base 80: mod_base = OTHER; note = 2'-O-Methyl-uridine
  modified_base 81: mod_base = OTHER; note = 2'-O-Methyl-guanosine
  modified_base 83: mod_base = OTHER; note = 2'-O-Methyl-cytidine
  modified_base 84: mod_base = OTHER; note = 2'-O-Methyl-adenosine
  modified_base 85: mod_base = OTHER; note = 2'-O-Methyl-cytidine
  modified_base 86: mod_base = OTHER; note = 2'-O-Methyl-cytidine
  modified_base 87: mod_base = OTHER; note = 2'-O-Methyl-guanosine
  modified_base 88: mod_base = OTHER; note = 2'-O-Methyl-adenosine
  modified_base 89: mod_base = OTHER; note = 2'-O-Methyl-guanosine
  modified_base 90: mod_base = OTHER; note = 2'-O-Methyl-uridine
  modified_base 91: mod_base = OTHER; note = 2'-O-Methyl-cytidine
  modified_base 92: mod_base = OTHER; note = 2'-O-Methyl-guanosine
  modified_base 93: mod_base = OTHER; note = 2'-O-Methyl-guanosine
  modified_base 94: mod_base = OTHER; note = 2'-O-Methyl-uridine
  modified_base 95: mod_base = OTHER; note = 2'-O-Methyl-guanosine
  modified_base 96: mod_base = OTHER; note = 2'-O-Methyl-cytidine
  modified_base 97: mod_base = OTHER; note = 2'-O-Methyl-uridine phosphorothioate
  modified_base 98: mod_base = OTHER; note = 2'-O-Methyl-uridine phosphorothioate
  modified_base 99: mod_base = OTHER; note = 2'-O-Methyl-uridine phosphorothioate
  modified_base 100: mod_base = OTHER; note = 2'-O-Methyl-uridine

SEQ ID NO: 1716 - RNA, 103 nt, synthetic construct; identical to SEQ ID NO: 1643
  source 1..103: mol_type = other RNA; note = Description of Artificial Sequence: Synthetic polynucleotide
  modified_base 1: mod_base = OTHER; note = 2'-O-Methyl-cytidine phosphorothioate
  modified_base 2: mod_base = OTHER; note = 2'-O-Methyl-cytidine phosphorothioate
  modified_base 3: mod_base = OTHER; note = 2'-O-Methyl-cytidine phosphorothioate
  modified_base 21: mod_base = OTHER; note = 2'-O-Methyl-guanosine
  modified_base 25: mod_base = OTHER; note = uridine phosphorothioate
  modified_base 28: mod_base = OTHER; note = 2'-O-Methyl-adenosine
  modified_base 29: mod_base = OTHER; note = 2'-O-Methyl-guanosine
  modified_base 30: mod_base = OTHER; note = 2'-O-Methyl-cytidine
  modified_base 31: mod_base = OTHER; note = 2'-O-Methyl-uridine
  modified_base 32: mod_base = OTHER; note = 2'-O-Methyl-adenosine
  modified_base 34: mod_base = OTHER; note = 2'-O-Methyl-adenosine
  modified_base 35: mod_base = OTHER; note = 2'-O-Methyl-adenosine
  modified_base 36: mod_base = OTHER; note = 2'-O-Methyl-adenosine
  modified_base 37: mod_base = OTHER; note = 2'-O-Methyl-uridine
  modified_base 38: mod_base = OTHER; note = 2'-O-Methyl-adenosine
  modified_base 39: mod_base = OTHER; note = 2'-O-Methyl-guanosine
  modified_base 40: mod_base = OTHER; note = 2'-O-Methyl-cytidine
  modified_base 41: mod_base = OTHER; note = 2'-O-Methyl-adenosine
  modified_base 42: mod_base = OTHER; note = 2'-O-Methyl-adenosine
  modified_base 46: mod_base = OTHER; note = 2'-O-Methyl-adenosine
  modified_base 48: mod_base = OTHER; note = 2'-O-Methyl-adenosine
  modified_base 50: mod_base = OTHER; note = 2'-O-Methyl-uridine
  modified_base 52: mod_base = OTHER; note = 2'-O-Methyl-adenosine
  modified_base 53: mod_base = OTHER; note = 2'-O-Methyl-guanosine
  modified_base 54: mod_base = OTHER; note = 2'-O-Methyl-guanosine
  modified_base 57: mod_base = OTHER; note = 2'-O-Methyl-adenosine
  modified_base 61: mod_base = OTHER; note = 2'-O-Methyl-cytidine
  modified_base 64: mod_base = OTHER; note = uridine phosphorothioate
  modified_base 66: mod_base = OTHER; note = 2'-O-Methyl-uridine
  modified_base 67: mod_base = OTHER; note = 2'-O-Methyl-cytidine
  modified_base 70: mod_base = OTHER; note = 2'-O-Methyl-cytidine
  modified_base 71: mod_base = OTHER; note = 2'-O-Methyl-uridine
  modified_base 72: mod_base = OTHER; note = 2'-O-Methyl-uridine
  modified_base 74: mod_base = OTHER; note = 2'-O-Methyl-adenosine
  modified_base 75: mod_base = OTHER; note = 2'-O-Methyl-adenosine
  modified_base 76: mod_base = OTHER; note = 2'-O-Methyl-adenosine
  modified_base 77: mod_base = OTHER; note = 2'-O-Methyl-adenosine
  modified_base 78: mod_base = OTHER; note = 2'-O-Methyl-adenosine
  modified_base 79: mod_base = OTHER; note = 2'-O-Methyl-guanosine
  modified_base 80: mod_base = OTHER; note = 2'-O-Methyl-uridine
  modified_base 82: mod_base = OTHER; note = 2'-O-Methyl-guanosine
  modified_base 83: mod_base = OTHER; note = 2'-O-Methyl-cytidine
  modified_base 84: mod_base = OTHER; note = 2'-O-Methyl-adenosine
  modified_base 85: mod_base = OTHER; note = 2'-O-Methyl-cytidine
  modified_base 86: mod_base = OTHER; note = 2'-O-Methyl-cytidine
  modified_base 87: mod_base = OTHER; note = 2'-O-Methyl-guanosine
  modified_base 89: mod_base = OTHER; note = 2'-O-Methyl-guanosine
  modified_base 92: mod_base = OTHER; note = 2'-O-Methyl-guanosine
  modified_base 93: mod_base = OTHER; note = 2'-O-Methyl-guanosine
  modified_base 94: mod_base = OTHER; note = 2'-O-Methyl-uridine
  modified_base 95: mod_base = OTHER; note = 2'-O-Methyl-guanosine
  modified_base 96: mod_base = OTHER; note = 2'-O-Methyl-cytidine
  modified_base 97: mod_base = OTHER; note = 2'-O-Methyl-uridine phosphorothioate
  modified_base 98: mod_base = OTHER; note = 2'-O-Methyl-uridine phosphorothioate
  modified_base 99: mod_base = OTHER; note = 2'-O-Methyl-uridine phosphorothioate
  modified_base 100: mod_base = OTHER; note = 2'-O-Methyl-uridine

SEQ ID NO: 1717 - RNA, 103 nt, synthetic construct; identical to SEQ ID NO: 1699
  source 1..103: mol_type = other RNA; note = Description of Artificial Sequence: Synthetic polynucleotide
  modified_base 1: mod_base = OTHER; note = 2'-O-Methyl-guanosine phosphorothioate
  modified_base 2: mod_base = OTHER; note = 2'-O-Methyl-adenosine phosphorothioate
  modified_base 3: mod_base = OTHER; note = 2'-O-Methyl-guanosine phosphorothioate
  modified_base 21: mod_base = OTHER; note = 2'-O-Methyl-guanosine
  modified_base 25: mod_base = OTHER; note = uridine phosphorothioate
  modified_base 28: mod_base = OTHER; note = 2'-O-Methyl-adenosine
  modified_base 29: mod_base = OTHER; note = 2'-O-Methyl-guanosine
  modified_base 30: mod_base = OTHER; note = 2'-O-Methyl-cytidine
  modified_base 31: mod_base = OTHER; note = 2'-O-Methyl-uridine
  modified_base 32: mod_base = OTHER; note = 2'-O-Methyl-adenosine
  modified_base 34: mod_base = OTHER; note = 2'-O-Methyl-adenosine
  modified_base 35: mod_base = OTHER; note = 2'-O-Methyl-adenosine
  modified_base 36: mod_base = OTHER; note = 2'-O-Methyl-adenosine
  modified_base 37: mod_base = OTHER; note = 2'-O-Methyl-uridine
  modified_base 38: mod_base = OTHER; note = 2'-O-Methyl-adenosine
  modified_base 39: mod_base = OTHER; note = 2'-O-Methyl-guanosine
  modified_base 40: mod_base = OTHER; note = 2'-O-Methyl-cytidine
  modified_base 41: mod_base = OTHER; note = 2'-O-Methyl-adenosine
  modified_base 42: mod_base = OTHER; note = 2'-O-Methyl-adenosine
  modified_base 46: mod_base = OTHER; note = 2'-O-Methyl-adenosine
  modified_base 48: mod_base = OTHER; note = 2'-O-Methyl-adenosine
  modified_base 50: mod_base = OTHER; note = 2'-O-Methyl-uridine
  modified_base 52: mod_base = OTHER; note = 2'-O-Methyl-adenosine
  modified_base 53: mod_base = OTHER; note = 2'-O-Methyl-guanosine
  modified_base 54: mod_base = OTHER; note = 2'-O-Methyl-guanosine
  modified_base 57: mod_base = OTHER; note = 2'-O-Methyl-adenosine
  modified_base 61: mod_base = OTHER; note = 2'-O-Methyl-cytidine
  modified_base 64: mod_base = OTHER; note = uridine phosphorothioate
  modified_base 66: mod_base = OTHER; note = 2'-O-Methyl-uridine
  modified_base 67: mod_base = OTHER; note = 2'-O-Methyl-cytidine
  modified_base 70: mod_base = OTHER; note = 2'-O-Methyl-cytidine
  modified_base 71: mod_base = OTHER; note = 2'-O-Methyl-uridine
  modified_base 72: mod_base = OTHER; note = 2'-O-Methyl-uridine
  modified_base 74: mod_base = OTHER; note = 2'-O-Methyl-adenosine
  modified_base 75: mod_base = OTHER; note = 2'-O-Methyl-adenosine
  modified_base 76: mod_base = OTHER; note = 2'-O-Methyl-adenosine
  modified_base 77: mod_base = OTHER; note = 2'-O-Methyl-adenosine
  modified_base 78: mod_base = OTHER; note = 2'-O-Methyl-adenosine
  modified_base 79: mod_base = OTHER; note = 2'-O-Methyl-guanosine
  modified_base 80: mod_base = OTHER; note = 2'-O-Methyl-uridine
  modified_base 82: mod_base = OTHER; note = 2'-O-Methyl-guanosine
  modified_base 83: mod_base = OTHER; note = 2'-O-Methyl-cytidine
  modified_base 84: mod_base = OTHER; note = 2'-O-Methyl-adenosine
  modified_base 85: mod_base = OTHER; note = 2'-O-Methyl-cytidine
  modified_base 86: mod_base = OTHER; note = 2'-O-Methyl-cytidine
  modified_base 87: mod_base = OTHER; note = 2'-O-Methyl-guanosine
  modified_base 89: mod_base = OTHER; note = 2'-O-Methyl-guanosine
  modified_base 92: mod_base = OTHER; note = 2'-O-Methyl-guanosine
  modified_base 93: mod_base = OTHER; note = 2'-O-Methyl-guanosine
  modified_base 94: mod_base = OTHER; note = 2'-O-Methyl-uridine
  modified_base 95: mod_base = OTHER; note = 2'-O-Methyl-guanosine
  modified_base 96: mod_base = OTHER; note = 2'-O-Methyl-cytidine
  modified_base 97: mod_base = OTHER; note = 2'-O-Methyl-uridine phosphorothioate
  modified_base 98: mod_base = OTHER; note = 2'-O-Methyl-uridine phosphorothioate
  modified_base 99: mod_base = OTHER; note = 2'-O-Methyl-uridine phosphorothioate
  modified_base 100: mod_base = OTHER; note = 2'-O-Methyl-uridine

SEQ ID NO: 1718 - RNA, 103 nt, synthetic construct; identical to SEQ ID NO: 1700
  source 1..103: mol_type = other RNA; note = Description of Artificial Sequence: Synthetic polynucleotide
  modified_base 1: mod_base = OTHER; note = 2'-O-Methyl-cytidine phosphorothioate
  modified_base 2: mod_base = OTHER; note = 2'-O-Methyl-adenosine phosphorothioate
  modified_base 3: mod_base = OTHER; note = 2'-O-Methyl-guanosine phosphorothioate
  modified_base 21: mod_base = OTHER; note = 2'-O-Methyl-guanosine
  modified_base 25: mod_base = OTHER; note = uridine phosphorothioate
  modified_base 28: mod_base = OTHER; note = 2'-O-Methyl-adenosine
  modified_base 29: mod_base = OTHER; note = 2'-O-Methyl-guanosine
  modified_base 30: mod_base = OTHER; note = 2'-O-Methyl-cytidine
  modified_base 31: mod_base = OTHER; note = 2'-O-Methyl-uridine
  modified_base 32: mod_base = OTHER; note = 2'-O-Methyl-adenosine
  modified_base 34: mod_base = OTHER; note = 2'-O-Methyl-adenosine
  modified_base 35: mod_base = OTHER; note = 2'-O-Methyl-adenosine
  modified_base 36: mod_base = OTHER; note = 2'-O-Methyl-adenosine
  modified_base 37: mod_base = OTHER; note = 2'-O-Methyl-uridine
  modified_base 38: mod_base = OTHER; note = 2'-O-Methyl-adenosine
  modified_base 39: mod_base = OTHER; note = 2'-O-Methyl-guanosine
  modified_base 40: mod_base = OTHER; note = 2'-O-Methyl-cytidine
  modified_base 41: mod_base = OTHER; note = 2'-O-Methyl-adenosine
  modified_base 42: mod_base = OTHER; note = 2'-O-Methyl-adenosine
  modified_base 46: mod_base = OTHER; note = 2'-O-Methyl-adenosine
  modified_base 48: mod_base = OTHER; note = 2'-O-Methyl-adenosine
  modified_base 50: mod_base = OTHER; note = 2'-O-Methyl-uridine
  modified_base 52: mod_base = OTHER; note = 2'-O-Methyl-adenosine
  modified_base 53: mod_base = OTHER; note = 2'-O-Methyl-guanosine
  modified_base 54: mod_base = OTHER; note = 2'-O-Methyl-guanosine
  modified_base 55: mod_base = OTHER; note = 2'-O-Methyl-cytidine
  modified_base 56: mod_base = OTHER; note = 2'-O-Methyl-uridine
  modified_base 57: mod_base = OTHER; note = 2'-O-Methyl-adenosine
  modified_base 60: mod_base = OTHER; note = 2'-O-Methyl-cytidine
  modified_base 61: mod_base = OTHER; note = 2'-O-Methyl-cytidine
  modified_base 64: mod_base = OTHER; note = uridine phosphorothioate
  modified_base 66: mod_base = OTHER; note = 2'-O-Methyl-uridine
  modified_base 67: mod_base = OTHER; note = 2'-O-Methyl-cytidine
  modified_base 70: mod_base = OTHER; note = 2'-O-Methyl-cytidine
  modified_base 71: mod_base = OTHER; note = 2'-O-Methyl-uridine
  modified_base 72: mod_base = OTHER; note = 2'-O-Methyl-uridine
  modified_base 74: mod_base = OTHER; note = 2'-O-Methyl-adenosine
  modified_base 75: mod_base = OTHER; note = 2'-O-Methyl-adenosine
  modified_base 76: mod_base = OTHER; note = 2'-O-Methyl-adenosine
  modified_base 77: mod_base = OTHER; note = 2'-O-Methyl-adenosine
  modified_base 78: mod_base = OTHER; note = 2'-O-Methyl-adenosine
  modified_base 79: mod_base = OTHER; note = 2'-O-Methyl-guanosine
  modified_base 80: mod_base = OTHER; note = 2'-O-Methyl-uridine
  modified_base 81: mod_base = OTHER; note = 2'-O-Methyl-guanosine
  modified_base 83: mod_base = OTHER; note = 2'-O-Methyl-cytidine
  modified_base 84: mod_base = OTHER; note = 2'-O-Methyl-adenosine
  modified_base 85: mod_base = OTHER; note = 2'-O-Methyl-cytidine
  modified_base 86: mod_base = OTHER; note = 2'-O-Methyl-cytidine
  modified_base 87: mod_base = OTHER; note = 2'-O-Methyl-guanosine
  modified_base 88: mod_base = OTHER; note = 2'-O-Methyl-adenosine
  modified_base 89: mod_base = OTHER; note = 2'-O-Methyl-guanosine
  modified_base 90: mod_base = OTHER; note = 2'-O-Methyl-uridine
  modified_base 91: mod_base = OTHER; note = 2'-O-Methyl-cytidine
  modified_base 92: mod_base = OTHER; note = 2'-O-Methyl-guanosine
  modified_base 93: mod_base = OTHER; note = 2'-O-Methyl-guanosine
  modified_base 94: mod_base = OTHER; note = 2'-O-Methyl-uridine
  modified_base 95: mod_base = OTHER; note = 2'-O-Methyl-guanosine
  modified_base 96: mod_base = OTHER; note = 2'-O-Methyl-cytidine
  modified_base 97: mod_base = OTHER; note = 2'-O-Methyl-uridine phosphorothioate
  modified_base 98: mod_base = OTHER; note = 2'-O-Methyl-uridine phosphorothioate
  modified_base 99: mod_base = OTHER; note = 2'-O-Methyl-uridine phosphorothioate
  modified_base 100: mod_base = OTHER; note = 2'-O-Methyl-uridine

SEQ ID NO: 1719 - RNA, 103 nt, synthetic construct; identical to SEQ ID NO: 1643
  source 1..103: mol_type = other RNA; note = Description of Artificial Sequence: Synthetic polynucleotide
  modified_base 1: mod_base = OTHER; note = 2'-O-Methyl-cytidine phosphorothioate
  modified_base 2: mod_base = OTHER; note = 2'-O-Methyl-cytidine phosphorothioate
  modified_base 3: mod_base = OTHER; note = 2'-O-Methyl-cytidine phosphorothioate
  modified_base 21: mod_base = OTHER; note = 2'-O-Methyl-guanosine
  modified_base 25: mod_base = OTHER; note = uridine phosphorothioate
  modified_base 28: mod_base = OTHER; note = 2'-O-Methyl-adenosine
  modified_base 29: mod_base = OTHER; note = 2'-O-Methyl-guanosine
  modified_base 30: mod_base = OTHER; note = 2'-O-Methyl-cytidine
  modified_base 31: mod_base = OTHER; note = 2'-O-Methyl-uridine
  modified_base 32: mod_base = OTHER; note = 2'-O-Methyl-adenosine
  modified_base 34: mod_base = OTHER; note = 2'-O-Methyl-adenosine
  modified_base 35: mod_base = OTHER; note = 2'-O-Methyl-adenosine
  modified_base 36: mod_base = OTHER; note = 2'-O-Methyl-adenosine
  modified_base 37: mod_base = OTHER; note = 2'-O-Methyl-uridine
  modified_base 38: mod_base = OTHER; note = 2'-O-Methyl-adenosine
  modified_base 39: mod_base = OTHER; note = 2'-O-Methyl-guanosine
  modified_base 40: mod_base = OTHER; note = 2'-O-Methyl-cytidine
  modified_base 41: mod_base = OTHER; note = 2'-O-Methyl-adenosine
  modified_base 42: mod_base = OTHER; note = 2'-O-Methyl-adenosine
  modified_base 45: mod_base = OTHER; note = uridine phosphorothioate
  modified_base 46: mod_base = OTHER; note = 2'-O-Methyl-adenosine
  modified_base 48: mod_base = OTHER; note = 2'-O-Methyl-adenosine
  modified_base 50: mod_base = OTHER; note = 2'-O-Methyl-uridine
  modified_base 52: mod_base = OTHER; note = 2'-O-Methyl-adenosine
  modified_base 53: mod_base = OTHER; note = 2'-O-Methyl-guanosine
  modified_base 54: mod_base = OTHER; note = 2'-O-Methyl-guanosine
  modified_base 57: mod_base = OTHER; note = 2'-O-Methyl-adenosine
  modified_base 61: mod_base = OTHER; note = 2'-O-Methyl-cytidine
  modified_base 64: mod_base = OTHER; note = uridine phosphorothioate
  modified_base 66: mod_base = OTHER; note = 2'-O-Methyl-uridine
  modified_base 67: mod_base = OTHER; note = 2'-O-Methyl-cytidine
  modified_base 70: mod_base = OTHER; note = 2'-O-Methyl-cytidine
  modified_base 71: mod_base = OTHER; note = 2'-O-Methyl-uridine
  modified_base 72: mod_base = OTHER; note = 2'-O-Methyl-uridine
  modified_base 74: mod_base = OTHER; note = 2'-O-Methyl-adenosine
  modified_base 75: mod_base = OTHER; note = 2'-O-Methyl-adenosine
  modified_base 76: mod_base = OTHER; note = 2'-O-Methyl-adenosine
  modified_base 77: mod_base = OTHER; note = 2'-O-Methyl-adenosine
  modified_base 78: mod_base = OTHER; note = 2'-O-Methyl-adenosine
  modified_base 79: mod_base = OTHER; note = 2'-O-Methyl-guanosine
  modified_base 80: mod_base = OTHER; note = 2'-O-Methyl-uridine
  modified_base 82: mod_base = OTHER; note = 2'-O-Methyl-guanosine
  modified_base 83: mod_base = OTHER; note = 2'-O-Methyl-cytidine
  modified_base 84: mod_base = OTHER; note = 2'-O-Methyl-adenosine
  modified_base 85: mod_base = OTHER; note = 2'-O-Methyl-cytidine
  modified_base 86: mod_base = OTHER; note = 2'-O-Methyl-cytidine
  modified_base 87: mod_base = OTHER; note = 2'-O-Methyl-guanosine
  modified_base 89: mod_base = OTHER; note = 2'-O-Methyl-guanosine
  modified_base 92: mod_base = OTHER; note = 2'-O-Methyl-guanosine
  modified_base 93: mod_base = OTHER; note = 2'-O-Methyl-guanosine
  modified_base 94: mod_base = OTHER; note = 2'-O-Methyl-uridine
  modified_base 95: mod_base = OTHER; note = 2'-O-Methyl-guanosine
  modified_base 96: mod_base = OTHER; note = 2'-O-Methyl-cytidine
  modified_base 97: mod_base = OTHER; note = 2'-O-Methyl-uridine phosphorothioate
  modified_base 98: mod_base = OTHER; note = 2'-O-Methyl-uridine phosphorothioate
  modified_base 99: mod_base = OTHER; note = 2'-O-Methyl-uridine phosphorothioate
  modified_base 100: mod_base = OTHER; note = 2'-O-Methyl-uridine

SEQ ID NO: 1720 - RNA, 103 nt, synthetic construct; identical to SEQ ID NO: 1699
  source 1..103: mol_type = other RNA; note = Description of Artificial Sequence: Synthetic polynucleotide
  modified_base 1: mod_base = OTHER; note = 2'-O-Methyl-guanosine phosphorothioate
  modified_base 2: mod_base = OTHER; note = 2'-O-Methyl-adenosine phosphorothioate
  modified_base 3: mod_base = OTHER; note = 2'-O-Methyl-guanosine phosphorothioate
  modified_base 21: mod_base = OTHER; note = 2'-O-Methyl-guanosine
  modified_base 25: mod_base = OTHER; note = uridine phosphorothioate
  modified_base 28: mod_base = OTHER; note = 2'-O-Methyl-adenosine
  modified_base 29: mod_base = OTHER; note = 2'-O-Methyl-guanosine
  modified_base 30: mod_base = OTHER; note = 2'-O-Methyl-cytidine
  modified_base 31: mod_base = OTHER; note = 2'-O-Methyl-uridine
  modified_base 32: mod_base = OTHER; note = 2'-O-Methyl-adenosine
  modified_base 34: mod_base = OTHER; note = 2'-O-Methyl-adenosine
  modified_base 35: mod_base = OTHER; note = 2'-O-Methyl-adenosine
  modified_base 36: mod_base = OTHER; note = 2'-O-Methyl-adenosine
  modified_base 37: mod_base = OTHER; note = 2'-O-Methyl-uridine
  modified_base 38: mod_base = OTHER; note = 2'-O-Methyl-adenosine
  modified_base 39: mod_base = OTHER; note = 2'-O-Methyl-guanosine
  modified_base 40: mod_base = OTHER; note = 2'-O-Methyl-cytidine
  modified_base 41: mod_base = OTHER; note = 2'-O-Methyl-adenosine
  modified_base 42: mod_base = OTHER; note = 2'-O-Methyl-adenosine
  modified_base 45: mod_base = OTHER; note = uridine phosphorothioate
  modified_base 46: mod_base = OTHER; note = 2'-O-Methyl-adenosine
  modified_base 48: mod_base = OTHER; note = 2'-O-Methyl-adenosine
  modified_base 50: mod_base = OTHER; note = 2'-O-Methyl-uridine
  modified_base 52: mod_base = OTHER; note = 2'-O-Methyl-adenosine
  modified_base 53: mod_base = OTHER; note = 2'-O-Methyl-guanosine
  modified_base 54: mod_base = OTHER; note = 2'-O-Methyl-guanosine
  modified_base 57: mod_base = OTHER; note = 2'-O-Methyl-adenosine
  modified_base 61: mod_base = OTHER; note = 2'-O-Methyl-cytidine
  modified_base 64: mod_base = OTHER; note = uridine phosphorothioate
  modified_base 66: mod_base = OTHER; note = 2'-O-Methyl-uridine
  modified_base 67: mod_base = OTHER; note = 2'-O-Methyl-cytidine
  modified_base 70: mod_base = OTHER; note = 2'-O-Methyl-cytidine
  modified_base 71: mod_base = OTHER; note = 2'-O-Methyl-uridine
  modified_base 72: mod_base = OTHER; note = 2'-O-Methyl-uridine
  modified_base 74: mod_base = OTHER; note = 2'-O-Methyl-adenosine
  modified_base 75: mod_base = OTHER; note = 2'-O-Methyl-adenosine
  modified_base 76: mod_base = OTHER; note = 2'-O-Methyl-adenosine
  modified_base 77: mod_base = OTHER; note = 2'-O-Methyl-adenosine
  modified_base 78: mod_base = OTHER; note = 2'-O-Methyl-adenosine
  modified_base 79: mod_base = OTHER; note = 2'-O-Methyl-guanosine
  modified_base 80: mod_base = OTHER; note = 2'-O-Methyl-uridine
  modified_base 82: mod_base = OTHER; note = 2'-O-Methyl-guanosine
  modified_base 83: mod_base = OTHER; note = 2'-O-Methyl-cytidine
  modified_base 84: mod_base = OTHER; note = 2'-O-Methyl-adenosine
  modified_base 85: mod_base = OTHER; note = 2'-O-Methyl-cytidine
  modified_base 86: mod_base = OTHER; note = 2'-O-Methyl-cytidine
  modified_base 87: mod_base = OTHER; note = 2'-O-Methyl-guanosine
  modified_base 89: mod_base = OTHER; note = 2'-O-Methyl-guanosine
  modified_base 92: mod_base = OTHER; note = 2'-O-Methyl-guanosine
  modified_base 93: mod_base = OTHER; note = 2'-O-Methyl-guanosine
  modified_base 94: mod_base = OTHER; note = 2'-O-Methyl-uridine
  modified_base 95: mod_base = OTHER; note = 2'-O-Methyl-guanosine
  modified_base 96: mod_base = OTHER; note = 2'-O-Methyl-cytidine
  modified_base 97: mod_base = OTHER; note = 2'-O-Methyl-uridine phosphorothioate
  modified_base 98: mod_base = OTHER; note = 2'-O-Methyl-uridine phosphorothioate
  modified_base 99: mod_base = OTHER; note = 2'-O-Methyl-uridine phosphorothioate
  modified_base 100: mod_base = OTHER; note = 2'-O-Methyl-uridine

SEQ ID NO: 1721 - RNA, 103 nt, synthetic construct; identical to SEQ ID NO: 1700
  source 1..103: mol_type = other RNA; note = Description of Artificial Sequence: Synthetic polynucleotide
  modified_base 1: mod_base = OTHER; note = 2'-O-Methyl-cytidine phosphorothioate
  modified_base 2: mod_base = OTHER; note = 2'-O-Methyl-adenosine phosphorothioate
  modified_base 3: mod_base = OTHER; note = 2'-O-Methyl-guanosine phosphorothioate
  modified_base 21: mod_base = OTHER; note = 2'-O-Methyl-guanosine
  modified_base 25: mod_base = OTHER; note = uridine phosphorothioate
  modified_base 28: mod_base = OTHER; note = 2'-O-Methyl-adenosine
  modified_base 29: mod_base = OTHER; note = 2'-O-Methyl-guanosine
  modified_base 30: mod_base = OTHER; note = 2'-O-Methyl-cytidine
  modified_base 31: mod_base = OTHER; note = 2'-O-Methyl-uridine
  modified_base 32: mod_base = OTHER; note = 2'-O-Methyl-adenosine
  modified_base 34: mod_base = OTHER; note = 2'-O-Methyl-adenosine
  modified_base 35: mod_base = OTHER; note = 2'-O-Methyl-adenosine
  modified_base 36: mod_base = OTHER; note = 2'-O-Methyl-adenosine
  modified_base 37: mod_base = OTHER; note = 2'-O-Methyl-uridine
  modified_base 38: mod_base = OTHER; note = 2'-O-Methyl-adenosine
  modified_base 39: mod_base = OTHER; note = 2'-O-Methyl-guanosine
  modified_base 40: mod_base = OTHER; note = 2'-O-Methyl-cytidine
  modified_base 41: mod_base = OTHER; note = 2'-O-Methyl-adenosine
  modified_base 42: mod_base = OTHER; note = 2'-O-Methyl-adenosine
  modified_base 45: mod_base = OTHER; note = uridine phosphorothioate
  modified_base 46: mod_base = OTHER; note = 2'-O-Methyl-adenosine
  modified_base 48: mod_base = OTHER; note = 2'-O-Methyl-adenosine
  modified_base 50: mod_base = OTHER; note = 2'-O-Methyl-uridine
  modified_base 52: mod_base = OTHER; note = 2'-O-Methyl-adenosine
  modified_base 53: mod_base = OTHER; note = 2'-O-Methyl-guanosine
  modified_base 54: mod_base = OTHER; note = 2'-O-Methyl-guanosine
  modified_base 55: mod_base = OTHER; note = 2'-O-Methyl-cytidine
  modified_base 56: mod_base = OTHER; note = 2'-O-Methyl-uridine
  modified_base 57: mod_base = OTHER; note = 2'-O-Methyl-adenosine
  modified_base 60: mod_base = OTHER; note = 2'-O-Methyl-cytidine
  modified_base 61: mod_base = OTHER; note = 2'-O-Methyl-cytidine
  modified_base 64: mod_base = OTHER; note = uridine phosphorothioate
  modified_base 66: mod_base = OTHER; note = 2'-O-Methyl-uridine
  modified_base 67: mod_base = OTHER; note = 2'-O-Methyl-cytidine
  modified_base 70: mod_base = OTHER; note = 2'-O-Methyl-cytidine
  modified_base 71: mod_base = OTHER; note = 2'-O-Methyl-uridine
  modified_base 72: mod_base = OTHER; note = 2'-O-Methyl-uridine
  modified_base 74: mod_base = OTHER; note = 2'-O-Methyl-adenosine
  modified_base 75: mod_base = OTHER; note = 2'-O-Methyl-adenosine
  modified_base 76: mod_base = OTHER; note = 2'-O-Methyl-adenosine
  modified_base 77: mod_base = OTHER; note = 2'-O-Methyl-adenosine
  modified_base 78: mod_base = OTHER; note = 2'-O-Methyl-adenosine
  modified_base 79: mod_base = OTHER; note = 2'-O-Methyl-guanosine
  modified_base 80: mod_base = OTHER; note = 2'-O-Methyl-uridine
  modified_base 81: mod_base = OTHER; note = 2'-O-Methyl-guanosine
  modified_base 83: mod_base = OTHER; note = 2'-O-Methyl-cytidine
  modified_base 84: mod_base = OTHER; note = 2'-O-Methyl-adenosine
  modified_base 85: mod_base = OTHER; note = 2'-O-Methyl-cytidine
  modified_base 86: mod_base = OTHER; note = 2'-O-Methyl-cytidine
  modified_base 87: mod_base = OTHER; note = 2'-O-Methyl-guanosine
  modified_base 88: mod_base = OTHER; note = 2'-O-Methyl-adenosine
  modified_base 89: mod_base = OTHER; note = 2'-O-Methyl-guanosine
  modified_base 90: mod_base = OTHER; note = 2'-O-Methyl-uridine
  modified_base 91: mod_base = OTHER; note = 2'-O-Methyl-cytidine
  modified_base 92: mod_base = OTHER; note = 2'-O-Methyl-guanosine
  modified_base 93: mod_base = OTHER; note = 2'-O-Methyl-guanosine
  modified_base 94: mod_base = OTHER; note = 2'-O-Methyl-uridine
  modified_base 95: mod_base = OTHER; note = 2'-O-Methyl-guanosine
  modified_base 96: mod_base = OTHER; note = 2'-O-Methyl-cytidine
  modified_base 97: mod_base = OTHER; note = 2'-O-Methyl-uridine phosphorothioate
  modified_base 98: mod_base = OTHER; note = 2'-O-Methyl-uridine phosphorothioate
  modified_base 99: mod_base = OTHER; note = 2'-O-Methyl-uridine phosphorothioate
  modified_base 100: mod_base = OTHER; note = 2'-O-Methyl-uridine

SEQ ID NO: 1722 - RNA, 103 nt, synthetic construct; identical to SEQ ID NO: 1700
  source 1..103: mol_type = other RNA; note = Description of Artificial Sequence: Synthetic polynucleotide
  modified_base 1: mod_base = OTHER; note = 2'-O-Methyl-cytidine phosphorothioate
  modified_base 2: mod_base = OTHER; note = 2'-O-Methyl-adenosine phosphorothioate
  modified_base 3: mod_base = OTHER; note = 2'-O-Methyl-guanosine
  modified_base 21: mod_base = OTHER; note = 2'-O-Methyl-guanosine
  modified_base 28: mod_base = OTHER; note = 2'-O-Methyl-adenosine
  modified_base 29: mod_base = OTHER; note = 2'-O-Methyl-guanosine
  modified_base 30: mod_base = OTHER; note = 2'-O-Methyl-cytidine
  modified_base 31: mod_base = OTHER; note = 2'-O-Methyl-uridine
  modified_base 32: mod_base = OTHER; note = 2'-O-Methyl-adenosine
  modified_base 34: mod_base = OTHER; note = 2'-O-Methyl-adenosine
  modified_base 35: mod_base = OTHER; note = 2'-O-Methyl-adenosine
  modified_base 36: mod_base = OTHER; note = 2'-O-Methyl-adenosine
  modified_base 37: mod_base = OTHER; note = 2'-O-Methyl-uridine
  modified_base 38: mod_base = OTHER; note = 2'-O-Methyl-adenosine
  modified_base 39: mod_base = OTHER; note = 2'-O-Methyl-guanosine
  modified_base 40: mod_base = OTHER; note = 2'-O-Methyl-cytidine
  modified_base 41: mod_base = OTHER; note = 2'-O-Methyl-adenosine
  modified_base 42: mod_base = OTHER; note = 2'-O-Methyl-adenosine
  modified_base 46: mod_base = OTHER; note = 2'-O-Methyl-adenosine
  modified_base 48: mod_base = OTHER; note = 2'-O-Methyl-adenosine
  modified_base 50: mod_base = OTHER; note = 2'-O-Methyl-uridine
  modified_base 52: mod_base = OTHER; note = 2'-O-Methyl-adenosine
  modified_base 53: mod_base = OTHER; note = 2'-O-Methyl-guanosine
  modified_base 54: mod_base = OTHER; note = 2'-O-Methyl-guanosine
  modified_base 57: mod_base = OTHER; note = 2'-O-Methyl-adenosine
  modified_base 61: mod_base = OTHER; note = 2'-O-Methyl-cytidine
  modified_base 66: mod_base = OTHER; note = 2'-O-Methyl-uridine
  modified_base 67: mod_base = OTHER; note = 2'-O-Methyl-cytidine
  modified_base 70: mod_base = OTHER; note = 2'-O-Methyl-cytidine
  modified_base 71: mod_base = OTHER; note = 2'-O-Methyl-uridine
  modified_base 72: mod_base = OTHER; note = 2'-O-Methyl-uridine
  modified_base 74: mod_base = OTHER; note = 2'-O-Methyl-adenosine
  modified_base 75: mod_base = OTHER; note = 2'-O-Methyl-adenosine
  modified_base 76: mod_base = OTHER; note = 2'-O-Methyl-adenosine
  modified_base 77: mod_base = OTHER; note = 2'-O-Methyl-adenosine
  modified_base 78: mod_base = OTHER; note = 2'-O-Methyl-adenosine
  modified_base 79: mod_base = OTHER; note = 2'-O-Methyl-guanosine
  modified_base 80: mod_base = OTHER; note = 2'-O-Methyl-uridine
  modified_base 82: mod_base = OTHER; note = 2'-O-Methyl-guanosine
  modified_base 83: mod_base = OTHER; note = 2'-O-Methyl-cytidine
  modified_base 84: mod_base = OTHER; note = 2'-O-Methyl-adenosine
  modified_base 85: mod_base = OTHER; note = 2'-O-Methyl-cytidine
  modified_base 86: mod_base = OTHER; note = 2'-O-Methyl-cytidine
  modified_base 87: mod_base = OTHER; note = 2'-O-Methyl-guanosine
  modified_base 89: mod_base = OTHER; note = 2'-O-Methyl-guanosine
  modified_base 92: mod_base = OTHER; note = 2'-O-Methyl-guanosine
  modified_base 93: mod_base = OTHER; note = 2'-O-Methyl-guanosine
  modified_base 94: mod_base = OTHER; note = 2'-O-Methyl-uridine
  modified_base 95: mod_base = OTHER; note = 2'-O-Methyl-guanosine
  modified_base 96: mod_base = OTHER; note = 2'-O-Methyl-cytidine
  modified_base 97: mod_base = OTHER; note = 2'-O-Methyl-uridine phosphorothioate
  modified_base 98: mod_base = OTHER; note = 2'-O-Methyl-uridine phosphorothioate
  modified_base 99: mod_base = OTHER; note = 2'-O-Methyl-uridine phosphorothioate
  modified_base 100: mod_base = OTHER; note = 2'-O-Methyl-uridine

SEQ ID NO: 1723 - RNA, 103 nt, synthetic construct; identical to SEQ ID NO: 1643
  source 1..103: mol_type = other RNA; note = Description of Artificial Sequence: Synthetic polynucleotide
  modified_base 1: mod_base = OTHER; note = 2'-O-Methyl-cytidine phosphorothioate
  modified_base 2: mod_base = OTHER; note = 2'-O-Methyl-cytidine phosphorothioate
  modified_base 3: mod_base = OTHER; note = 2'-O-Methyl-cytidine
  modified_base 21: mod_base = OTHER; note = 2'-O-Methyl-guanosine
  modified_base 28: mod_base = OTHER; note = 2'-O-Methyl-adenosine
  modified_base 29: mod_base = OTHER; note = 2'-O-Methyl-guanosine
  modified_base 30: mod_base = OTHER; note = 2'-O-Methyl-cytidine
  modified_base 31: mod_base = OTHER; note = 2'-O-Methyl-uridine
  modified_base 32: mod_base = OTHER; note = 2'-O-Methyl-adenosine
  modified_base 34: mod_base = OTHER; note = 2'-O-Methyl-adenosine
  modified_base 35: mod_base = OTHER; note = 2'-O-Methyl-adenosine
  modified_base 36: mod_base = OTHER; note = 2'-O-Methyl-adenosine
  modified_base 37: mod_base = OTHER; note = 2'-O-Methyl-uridine
  modified_base 38: mod_base = OTHER; note = 2'-O-Methyl-adenosine
  modified_base 39: mod_base = OTHER; note = 2'-O-Methyl-guanosine
  modified_base 40: mod_base = OTHER; note = 2'-O-Methyl-cytidine
  modified_base 41: mod_base = OTHER; note = 2'-O-Methyl-adenosine
  modified_base 42: mod_base = OTHER; note = 2'-O-Methyl-adenosine
  modified_base 46: mod_base = OTHER; note = 2'-O-Methyl-adenosine
  modified_base 48: mod_base = OTHER; note = 2'-O-Methyl-adenosine
  modified_base 50: mod_base = OTHER; note = 2'-O-Methyl-uridine
  modified_base 52: mod_base = OTHER; note = 2'-O-Methyl-adenosine
  modified_base 53: mod_base = OTHER; note = 2'-O-Methyl-guanosine
  modified_base 54: mod_base = OTHER; note = 2'-O-Methyl-guanosine
  modified_base 57: mod_base = OTHER; note = 2'-O-Methyl-adenosine
  modified_base 61: mod_base = OTHER; note = 2'-O-Methyl-cytidine
  modified_base 66: mod_base = OTHER; note = 2'-O-Methyl-uridine
  modified_base 67: mod_base = OTHER; note = 2'-O-Methyl-cytidine
  modified_base 70: mod_base = OTHER; note = 2'-O-Methyl-cytidine
  modified_base 71: mod_base = OTHER; note = 2'-O-Methyl-uridine
  modified_base 72: mod_base = OTHER; note = 2'-O-Methyl-uridine
  modified_base 74: mod_base = OTHER; note = 2'-O-Methyl-adenosine
  modified_base 75: mod_base = OTHER; note = 2'-O-Methyl-adenosine
  modified_base 76: mod_base = OTHER; note = 2'-O-Methyl-adenosine
  modified_base 77: mod_base = OTHER; note = 2'-O-Methyl-adenosine
  modified_base 78: mod_base = OTHER; note = 2'-O-Methyl-adenosine
  modified_base 79: mod_base = OTHER; note = 2'-O-Methyl-guanosine
  modified_base 80: mod_base = OTHER; note = 2'-O-Methyl-uridine
  modified_base 82: mod_base = OTHER; note = 2'-O-Methyl-guanosine
  modified_base 83: mod_base = OTHER; note = 2'-O-Methyl-cytidine
  modified_base 84: mod_base = OTHER; note = 2'-O-Methyl-adenosine
  modified_base 85: mod_base = OTHER; note = 2'-O-Methyl-cytidine
  modified_base 86: mod_base = OTHER; note = 2'-O-Methyl-cytidine
  modified_base 87: mod_base = OTHER; note = 2'-O-Methyl-guanosine
  modified_base 89: mod_base = OTHER; note = 2'-O-Methyl-guanosine
  modified_base 92: mod_base = OTHER; note = 2'-O-Methyl-guanosine
  modified_base 93: mod_base = OTHER; note = 2'-O-Methyl-guanosine
  modified_base 94: mod_base = OTHER; note = 2'-O-Methyl-uridine
  modified_base 95: mod_base = OTHER; note = 2'-O-Methyl-guanosine
  modified_base 96: mod_base = OTHER; note = 2'-O-Methyl-cytidine
  modified_base 97: mod_base = OTHER; note = 2'-O-Methyl-uridine phosphorothioate
  modified_base 98: mod_base = OTHER; note = 2'-O-Methyl-uridine phosphorothioate
  modified_base 99: mod_base = OTHER; note = 2'-O-Methyl-uridine phosphorothioate
  modified_base 100: mod_base = OTHER; note = 2'-O-Methyl-uridine

SEQ ID NO: 1724 - RNA, 103 nt, synthetic construct; identical to SEQ ID NO: 1699
  source 1..103: mol_type = other RNA; note = Description of Artificial Sequence: Synthetic polynucleotide
  modified_base 1: mod_base = OTHER; note = 2'-O-Methyl-guanosine phosphorothioate
  modified_base 2: mod_base = OTHER; note = 2'-O-Methyl-adenosine phosphorothioate
  modified_base 3: mod_base = OTHER; note = 2'-O-Methyl-guanosine
  modified_base 21: mod_base = OTHER; note = 2'-O-Methyl-guanosine
  modified_base 28: mod_base = OTHER; note = 2'-O-Methyl-adenosine
  modified_base 29: mod_base = OTHER; note = 2'-O-Methyl-guanosine
  modified_base 30: mod_base = OTHER; note = 2'-O-Methyl-cytidine
  modified_base 31: mod_base = OTHER; note = 2'-O-Methyl-uridine
  modified_base 32: mod_base = OTHER; note = 2'-O-Methyl-adenosine
  modified_base 34: mod_base = OTHER; note = 2'-O-Methyl-adenosine
  modified_base 35: mod_base = OTHER; note = 2'-O-Methyl-adenosine
  modified_base 36: mod_base = OTHER; note = 2'-O-Methyl-adenosine
  modified_base 37: mod_base = OTHER; note = 2'-O-Methyl-uridine
  modified_base 38: mod_base = OTHER; note = 2'-O-Methyl-adenosine
  modified_base 39: mod_base = OTHER; note = 2'-O-Methyl-guanosine
  modified_base 40: mod_base = OTHER; note = 2'-O-Methyl-cytidine
  modified_base 41: mod_base = OTHER; note = 2'-O-Methyl-adenosine
  modified_base 42: mod_base = OTHER; note = 2'-O-Methyl-adenosine
  modified_base 46: mod_base = OTHER; note = 2'-O-Methyl-adenosine
  modified_base 48: mod_base = OTHER; note = 2'-O-Methyl-adenosine
  modified_base 50: mod_base = OTHER; note = 2'-O-Methyl-uridine
  modified_base 52: mod_base = OTHER; note = 2'-O-Methyl-adenosine
  modified_base 53: mod_base = OTHER; note = 2'-O-Methyl-guanosine
  modified_base 54: mod_base = OTHER; note = 2'-O-Methyl-guanosine
  modified_base 57: mod_base = OTHER; note = 2'-O-Methyl-adenosine
  modified_base 61: mod_base = OTHER; note = 2'-O-Methyl-cytidine
  modified_base 66: mod_base = OTHER; note = 2'-O-Methyl-uridine
  modified_base 67: mod_base = OTHER; note = 2'-O-Methyl-cytidine
  modified_base 70: mod_base = OTHER; note = 2'-O-Methyl-cytidine
  modified_base 71: mod_base = OTHER; note = 2'-O-Methyl-uridine
  modified_base 72: mod_base = OTHER; note = 2'-O-Methyl-uridine
  modified_base 74: mod_base = OTHER; note = 2'-O-Methyl-adenosine
  modified_base 75: mod_base = OTHER; note = 2'-O-Methyl-adenosine
  modified_base 76: mod_base = OTHER; note = 2'-O-Methyl-adenosine
  modified_base 77: mod_base = OTHER; note = 2'-O-Methyl-adenosine
  modified_base 78: mod_base = OTHER; note = 2'-O-Methyl-adenosine
  modified_base 79: mod_base = OTHER; note = 2'-O-Methyl-guanosine
  modified_base 80: mod_base = OTHER; note = 2'-O-Methyl-uridine
  modified_base 82: mod_base = OTHER; note = 2'-O-Methyl-guanosine
  modified_base 83: mod_base = OTHER; note = 2'-O-Methyl-cytidine
  modified_base 84: mod_base = OTHER; note = 2'-O-Methyl-adenosine
  modified_base 85: mod_base = OTHER; note = 2'-O-Methyl-cytidine
  modified_base 86: mod_base = OTHER; note = 2'-O-Methyl-cytidine
  modified_base 87: mod_base = OTHER; note = 2'-O-Methyl-guanosine
  modified_base 89: mod_base = OTHER; note = 2'-O-Methyl-guanosine
  modified_base 92: mod_base = OTHER; note = 2'-O-Methyl-guanosine
  modified_base 93: mod_base = OTHER; note = 2'-O-Methyl-guanosine
  modified_base 94: mod_base = OTHER; note = 2'-O-Methyl-uridine
  modified_base 95: mod_base = OTHER; note = 2'-O-Methyl-guanosine
  modified_base 96: mod_base = OTHER; note = 2'-O-Methyl-cytidine
  modified_base 97: mod_base = OTHER; note = 2'-O-Methyl-uridine phosphorothioate
  modified_base 98: mod_base = OTHER; note = 2'-O-Methyl-uridine phosphorothioate
  modified_base 99: mod_base = OTHER; note = 2'-O-Methyl-uridine phosphorothioate
  modified_base 100: mod_base = OTHER; note = 2'-O-Methyl-uridine

SEQ ID NO: 1725 - RNA, 103 nt, synthetic construct; identical to SEQ ID NO: 1700
  source 1..103: mol_type = other RNA; note = Description of Artificial Sequence: Synthetic polynucleotide
  modified_base 1: mod_base = OTHER; note = 2'-O-Methyl-cytidine phosphorothioate
  modified_base 2: mod_base = OTHER; note = 2'-O-Methyl-adenosine phosphorothioate
  modified_base 3: mod_base = OTHER; note = 2'-O-Methyl-guanosine
  modified_base 21: mod_base = OTHER; note = 2'-O-Methyl-guanosine
  modified_base 28: mod_base = OTHER; note = 2'-O-Methyl-adenosine
  modified_base 29: mod_base = OTHER; note = 2'-O-Methyl-guanosine
  modified_base 30: mod_base = OTHER; note = 2'-O-Methyl-cytidine
  modified_base 31: mod_base = OTHER; note = 2'-O-Methyl-uridine
  modified_base 32: mod_base = OTHER; note = 2'-O-Methyl-adenosine
  modified_base 33: mod_base = OTHER; note = 2'-O-Methyl-guanosine
  modified_base 34: mod_base = OTHER; note = 2'-O-Methyl-adenosine
  modified_base 35: mod_base = OTHER; note = 2'-O-Methyl-adenosine
  modified_base 36: mod_base = OTHER; note = 2'-O-Methyl-adenosine
  modified_base 37: mod_base = OTHER; note = 2'-O-Methyl-uridine
  modified_base 38: mod_base = OTHER; note = 2'-O-Methyl-adenosine
  modified_base 39: mod_base = OTHER; note = 2'-O-Methyl-guanosine
  modified_base 40: mod_base = OTHER; note = 2'-O-Methyl-cytidine
  modified_base 41: mod_base = OTHER; note = 2'-O-Methyl-adenosine
  modified_base 42: mod_base = OTHER; note = 2'-O-Methyl-adenosine
  modified_base 46: mod_base = OTHER; note = 2'-O-Methyl-adenosine
  modified_base 48: mod_base = OTHER; note = 2'-O-Methyl-adenosine
  modified_base 50: mod_base = OTHER; note = 2'-O-Methyl-uridine
  modified_base 52: mod_base = OTHER; note = 2'-O-Methyl-adenosine
  modified_base 53: mod_base = OTHER; note = 2'-O-Methyl-guanosine
  modified_base 54: mod_base = OTHER; note = 2'-O-Methyl-guanosine
  modified_base 57: mod_base = OTHER; note = 2'-O-Methyl-adenosine
  modified_base 61: mod_base = OTHER; note = 2'-O-Methyl-cytidine
  modified_base 66: mod_base = OTHER; note = 2'-O-Methyl-uridine
  modified_base 67: mod_base = OTHER; note = 2'-O-Methyl-cytidine
  modified_base 70: mod_base = OTHER; note = 2'-O-Methyl-cytidine
  modified_base 71: mod_base = OTHER; note = 2'-O-Methyl-uridine
  modified_base 72: mod_base = OTHER; note = 2'-O-Methyl-uridine
  modified_base 73: mod_base = OTHER; note = 2'-O-Methyl-guanosine
  modified_base 74: mod_base = OTHER; note = 2'-O-Methyl-adenosine
  modified_base 75: mod_base = OTHER; note = 2'-O-Methyl-adenosine
  modified_base 76: mod_base = OTHER; note = 2'-O-Methyl-adenosine
  modified_base 77: mod_base = OTHER; note = 2'-O-Methyl-adenosine
  modified_base 78: mod_base = OTHER; note = 2'-O-Methyl-adenosine
  modified_base 79: mod_base = OTHER; note = 2'-O-Methyl-guanosine
  modified_base 80: mod_base = OTHER; note = 2'-O-Methyl-uridine
  modified_base 82: mod_base = OTHER; note = 2'-O-Methyl-guanosine
  modified_base 83: mod_base = OTHER; note = 2'-O-Methyl-cytidine
  modified_base 84: mod_base = OTHER; note = 2'-O-Methyl-adenosine
  modified_base 85: mod_base = OTHER; note = 2'-O-Methyl-cytidine
  modified_base 86: mod_base = OTHER; note = 2'-O-Methyl-cytidine
  modified_base 87: mod_base = OTHER; note = 2'-O-Methyl-guanosine
  modified_base 89: mod_base = OTHER; note = 2'-O-Methyl-guanosine
  modified_base 91: mod_base = OTHER; note = 2'-O-Methyl-cytidine
  modified_base 92: mod_base = OTHER; note = 2'-O-Methyl-guanosine
  modified_base 93: mod_base = OTHER; note = 2'-O-Methyl-guanosine
  modified_base 94: mod_base = OTHER; note = 2'-O-Methyl-uridine
  modified_base 95: mod_base = OTHER; note = 2'-O-Methyl-guanosine
  modified_base 96: mod_base = OTHER; note = 2'-O-Methyl-cytidine
  modified_base 97: mod_base = OTHER; note = 2'-O-Methyl-uridine phosphorothioate
  modified_base 98: mod_base = OTHER; note = 2'-O-Methyl-uridine phosphorothioate
  modified_base 99: mod_base = OTHER; note = 2'-O-Methyl-uridine phosphorothioate
  modified_base 100: mod_base = OTHER; note = 2'-O-Methyl-uridine

SEQ ID NO: 1726 - RNA, 103 nt, synthetic construct; identical to SEQ ID NO: 1643
  source 1..103: mol_type = other RNA; note = Description of Artificial Sequence: Synthetic polynucleotide
  modified_base 1: mod_base = OTHER; note = 2'-O-Methyl-cytidine phosphorothioate
  modified_base 2: mod_base = OTHER; note = 2'-O-Methyl-cytidine phosphorothioate
  modified_base 3: mod_base = OTHER; note = 2'-O-Methyl-cytidine
  modified_base 21: mod_base = OTHER; note = 2'-O-Methyl-guanosine
  modified_base 28: mod_base = OTHER; note = 2'-O-Methyl-adenosine
  modified_base 29: mod_base = OTHER; note = 2'-O-Methyl-guanosine
  modified_base 30: mod_base = OTHER; note = 2'-O-Methyl-cytidine
  modified_base 31: mod_base = OTHER; note = 2'-O-Methyl-uridine
  modified_base 32: mod_base = OTHER; note = 2'-O-Methyl-adenosine
  modified_base 34: mod_base = OTHER; note = 2'-O-Methyl-adenosine
  modified_base 35: mod_base = OTHER; note = 2'-O-Methyl-adenosine
  modified_base 36: mod_base = OTHER; note = 2'-O-Methyl-adenosine
  modified_base 37: mod_base = OTHER; note = 2'-O-Methyl-uridine
  modified_base 38: mod_base = OTHER; note = 2'-O-Methyl-adenosine
  modified_base 39: mod_base = OTHER; note = 2'-O-Methyl-guanosine
  modified_base 40: mod_base = OTHER; note = 2'-O-Methyl-cytidine
  modified_base 41: mod_base = OTHER; note = 2'-O-Methyl-adenosine
  modified_base 42: mod_base = OTHER; note = 2'-O-Methyl-adenosine
  modified_base 46: mod_base = OTHER; note = 2'-O-Methyl-adenosine
  modified_base 48: mod_base = OTHER; note = 2'-O-Methyl-adenosine
  modified_base 50: mod_base = OTHER; note = 2'-O-Methyl-uridine
  modified_base 52: mod_base = OTHER; note = 2'-O-Methyl-adenosine
  modified_base 53: mod_base = OTHER; note = 2'-O-Methyl-guanosine
  modified_base 54: mod_base = OTHER; note = 2'-O-Methyl-guanosine
  modified_base 57: mod_base = OTHER; note = 2'-O-Methyl-adenosine
  modified_base 61: mod_base = OTHER; note = 2'-O-Methyl-cytidine
  modified_base 64: mod_base = OTHER; note = uridine phosphorothioate
  modified_base 66: mod_base = OTHER; note = 2'-O-Methyl-uridine
  modified_base 67: mod_base = OTHER; note = 2'-O-Methyl-cytidine
  modified_base 70: mod_base = OTHER; note = 2'-O-Methyl-cytidine
  modified_base 71: mod_base = OTHER; note = 2'-O-Methyl-uridine
  modified_base 72: mod_base = OTHER; note = 2'-O-Methyl-uridine
  modified_base 74: mod_base = OTHER; note = 2'-O-Methyl-adenosine
  modified_base 75: mod_base = OTHER; note = 2'-O-Methyl-adenosine
  modified_base 76: mod_base = OTHER; note = 2'-O-Methyl-adenosine
  modified_base 77: mod_base = OTHER; note = 2'-O-Methyl-adenosine
  modified_base 78: mod_base = OTHER; note = 2'-O-Methyl-adenosine
  modified_base 79: mod_base = OTHER; note = 2'-O-Methyl-guanosine
  modified_base 80: mod_base = OTHER; note = 2'-O-Methyl-uridine
  modified_base 82: mod_base = OTHER; note = 2'-O-Methyl-guanosine
  modified_base 83: mod_base = OTHER; note = 2'-O-Methyl-cytidine
  modified_base 84: mod_base = OTHER; note = 2'-O-Methyl-adenosine
  modified_base 85: mod_base = OTHER; note = 2'-O-Methyl-cytidine
  modified_base 86: mod_base = OTHER; note = 2'-O-Methyl-cytidine
  modified_base 87: mod_base = OTHER; note = 2'-O-Methyl-guanosine
  modified_base 89: mod_base = OTHER; note = 2'-O-Methyl-guanosine
  modified_base 92: mod_base = OTHER; note = 2'-O-Methyl-guanosine
  modified_base 93: mod_base = OTHER; note = 2'-O-Methyl-guanosine
  modified_base 94: mod_base = OTHER; note = 2'-O-Methyl-uridine
  modified_base 95: mod_base = OTHER; note = 2'-O-Methyl-guanosine
  modified_base 96: mod_base = OTHER; note = 2'-O-Methyl-cytidine
  modified_base 97: mod_base = OTHER; note = 2'-O-Methyl-uridine phosphorothioate
  modified_base 98: mod_base = OTHER; note = 2'-O-Methyl-uridine phosphorothioate
  modified_base 99: mod_base = OTHER; note = 2'-O-Methyl-uridine phosphorothioate
  modified_base 100: mod_base = OTHER; note = 2'-O-Methyl-uridine

SEQ ID NO: 1727 - RNA, 103 nt, synthetic construct; identical to SEQ ID NO: 1699
  source 1..103: mol_type = other RNA; note = Description of Artificial Sequence: Synthetic polynucleotide
  modified_base 1: mod_base = OTHER; note = 2'-O-Methyl-guanosine phosphorothioate
  modified_base 2: mod_base = OTHER; note = 2'-O-Methyl-adenosine phosphorothioate
  modified_base 3: mod_base = OTHER; note = 2'-O-Methyl-guanosine
  modified_base 21: mod_base = OTHER; note = 2'-O-Methyl-guanosine
  modified_base 28: mod_base = OTHER; note = 2'-O-Methyl-adenosine
  modified_base 29: mod_base = OTHER; note = 2'-O-Methyl-guanosine
  modified_base 30: mod_base = OTHER; note = 2'-O-Methyl-cytidine
  modified_base 31: mod_base = OTHER; note = 2'-O-Methyl-uridine
  modified_base 32: mod_base = OTHER; note = 2'-O-Methyl-adenosine
  modified_base 34: mod_base = OTHER; note = 2'-O-Methyl-adenosine
  modified_base 35: mod_base = OTHER; note = 2'-O-Methyl-adenosine
  modified_base 36: mod_base = OTHER; note = 2'-O-Methyl-adenosine
  modified_base 37: mod_base = OTHER; note = 2'-O-Methyl-uridine
  modified_base 38: mod_base = OTHER; note = 2'-O-Methyl-adenosine
  modified_base 39: mod_base = OTHER; note = 2'-O-Methyl-guanosine
  modified_base 40: mod_base = OTHER; note = 2'-O-Methyl-cytidine
  modified_base 41: mod_base = OTHER; note = 2'-O-Methyl-adenosine
  modified_base 42: mod_base = OTHER; note = 2'-O-Methyl-adenosine
  modified_base 46: mod_base = OTHER; note = 2'-O-Methyl-adenosine
  modified_base 48: mod_base = OTHER; note = 2'-O-Methyl-adenosine
  modified_base 50: mod_base = OTHER; note = 2'-O-Methyl-uridine
  modified_base 52: mod_base = OTHER; note = 2'-O-Methyl-adenosine
  modified_base 53: mod_base = OTHER; note = 2'-O-Methyl-guanosine
  modified_base 54: mod_base = OTHER; note = 2'-O-Methyl-guanosine
  modified_base 57: mod_base = OTHER; note = 2'-O-Methyl-adenosine
  modified_base 61: mod_base = OTHER; note = 2'-O-Methyl-cytidine
  modified_base 64: mod_base = OTHER; note = uridine phosphorothioate
  modified_base 66: mod_base = OTHER; note = 2'-O-Methyl-uridine
  modified_base 67: mod_base = OTHER; note = 2'-O-Methyl-cytidine
  modified_base 70: mod_base = OTHER; note = 2'-O-Methyl-cytidine
  modified_base 71: mod_base = OTHER; note = 2'-O-Methyl-uridine
  modified_base 72: mod_base = OTHER; note = 2'-O-Methyl-uridine
  modified_base 74: mod_base = OTHER; note = 2'-O-Methyl-adenosine
  modified_base 75: mod_base = OTHER; note = 2'-O-Methyl-adenosine
  modified_base 76: mod_base = OTHER; note = 2'-O-Methyl-adenosine
  modified_base 77: mod_base = OTHER; note = 2'-O-Methyl-adenosine
  modified_base 78: mod_base = OTHER; note = 2'-O-Methyl-adenosine
  modified_base 79: mod_base = OTHER; note = 2'-O-Methyl-guanosine
  modified_base 80: mod_base = OTHER; note = 2'-O-Methyl-uridine
  modified_base 82: mod_base = OTHER; note = 2'-O-Methyl-guanosine
  modified_base 83: mod_base = OTHER; note = 2'-O-Methyl-cytidine
  modified_base 84: mod_base = OTHER; note = 2'-O-Methyl-adenosine
  modified_base 85: mod_base = OTHER; note = 2'-O-Methyl-cytidine
  modified_base 86: mod_base = OTHER; note = 2'-O-Methyl-cytidine
  modified_base 87: mod_base = OTHER; note = 2'-O-Methyl-guanosine
  modified_base 89: mod_base = OTHER; note = 2'-O-Methyl-guanosine
  modified_base 92: mod_base = OTHER; note = 2'-O-Methyl-guanosine
  modified_base 93: mod_base = OTHER; note = 2'-O-Methyl-guanosine
  modified_base 94: mod_base = OTHER; note = 2'-O-Methyl-uridine
  modified_base 95: mod_base = OTHER; note = 2'-O-Methyl-guanosine
  modified_base 96: mod_base = OTHER; note = 2'-O-Methyl-cytidine
  modified_base 97: mod_base = OTHER; note = 2'-O-Methyl-uridine phosphorothioate
  modified_base 98: mod_base = OTHER; note = 2'-O-Methyl-uridine phosphorothioate
  modified_base 99: mod_base = OTHER; note = 2'-O-Methyl-uridine phosphorothioate
  modified_base 100: mod_base = OTHER; note = 2'-O-Methyl-uridine

SEQ ID NO: 1728 - RNA, 103 nt, synthetic construct; identical to SEQ ID NO: 1700
  source 1..103: mol_type = other RNA; note = Description of Artificial Sequence: Synthetic polynucleotide
  modified_base 1: mod_base = OTHER; note = 2'-O-Methyl-cytidine phosphorothioate
  modified_base 2: mod_base = OTHER; note = 2'-O-Methyl-adenosine phosphorothioate
  modified_base 3: mod_base = OTHER; note = 2'-O-Methyl-guanosine
  modified_base 21: mod_base = OTHER; note = 2'-O-Methyl-guanosine
  modified_base 28: mod_base = OTHER; note = 2'-O-Methyl-adenosine
  modified_base 29: mod_base = OTHER; note = 2'-O-Methyl-guanosine
  modified_base 30: mod_base = OTHER; note = 2'-O-Methyl-cytidine
  modified_base 31: mod_base = OTHER; note = 2'-O-Methyl-uridine
  modified_base 32: mod_base = OTHER; note = 2'-O-Methyl-adenosine
  modified_base 34: mod_base = OTHER; note = 2'-O-Methyl-adenosine
  modified_base 35: mod_base = OTHER; note = 2'-O-Methyl-adenosine
  modified_base 36: mod_base = OTHER; note = 2'-O-Methyl-adenosine
  modified_base 37: mod_base = OTHER; note = 2'-O-Methyl-uridine
  modified_base 38: mod_base = OTHER; note = 2'-O-Methyl-adenosine
  modified_base 39: mod_base = OTHER; note = 2'-O-Methyl-guanosine
  modified_base 40: mod_base = OTHER; note = 2'-O-Methyl-cytidine
  modified_base 41: mod_base = OTHER; note = 2'-O-Methyl-adenosine
  modified_base 42: mod_base = OTHER; note = 2'-O-Methyl-adenosine
  modified_base 46: mod_base = OTHER; note = 2'-O-Methyl-adenosine
  modified_base 48: mod_base = OTHER; note = 2'-O-Methyl-adenosine
  modified_base 50: mod_base = OTHER; note = 2'-O-Methyl-uridine
  modified_base 52: mod_base = OTHER; note = 2'-O-Methyl-adenosine
  modified_base 53: mod_base = OTHER; note = 2'-O-Methyl-guanosine
  modified_base 54: mod_base = OTHER; note = 2'-O-Methyl-guanosine
  modified_base 55: mod_base = OTHER; note = 2'-O-Methyl-cytidine
  modified_base 56: mod_base = OTHER; note = 2'-O-Methyl-uridine
  modified_base 57: mod_base = OTHER; note = 2'-O-Methyl-adenosine
  modified_base 60: mod_base = OTHER; note = 2'-O-Methyl-cytidine
  modified_base 61: mod_base = OTHER; note = 2'-O-Methyl-cytidine
  modified_base 64: mod_base = OTHER; note = uridine phosphorothioate
  modified_base 66: mod_base = OTHER; note = 2'-O-Methyl-uridine
  modified_base 67: mod_base = OTHER; note = 2'-O-Methyl-cytidine
  modified_base 70: mod_base = OTHER; note = 2'-O-Methyl-cytidine
  modified_base 71: mod_base = OTHER; note = 2'-O-Methyl-uridine
  modified_base 72: mod_base = OTHER; note = 2'-O-Methyl-uridine
  modified_base 74: mod_base = OTHER; note = 2'-O-Methyl-adenosine
  modified_base 75: mod_base = OTHER; note = 2'-O-Methyl-adenosine
  modified_base 76: mod_base = OTHER; note = 2'-O-Methyl-adenosine
  modified_base 77: mod_base = OTHER; note = 2'-O-Methyl-adenosine
  modified_base 78: mod_base = OTHER; note = 2'-O-Methyl-adenosine
  modified_base 79: mod_base = OTHER; note = 2'-O-Methyl-guanosine
  modified_base 80: mod_base = OTHER; note = 2'-O-Methyl-uridine
  modified_base 81: mod_base = OTHER; note = 2'-O-Methyl-guanosine
  modified_base 83: mod_base = OTHER; note = 2'-O-Methyl-cytidine
  modified_base 84: mod_base = OTHER; note = 2'-O-Methyl-adenosine
  modified_base 85: mod_base = OTHER; note = 2'-O-Methyl-cytidine
  modified_base 86: mod_base = OTHER; note = 2'-O-Methyl-cytidine
  modified_base 87: mod_base = OTHER; note = 2'-O-Methyl-guanosine
  modified_base 88: mod_base = OTHER; note = 2'-O-Methyl-adenosine
  modified_base 89: mod_base = OTHER; note = 2'-O-Methyl-guanosine
  modified_base 90: mod_base = OTHER; note = 2'-O-Methyl-uridine
  modified_base 91: mod_base = OTHER; note = 2'-O-Methyl-cytidine
  modified_base 92: mod_base = OTHER; note = 2'-O-Methyl-guanosine
  modified_base 93: mod_base = OTHER; note = 2'-O-Methyl-guanosine
  modified_base 94: mod_base = OTHER; note = 2'-O-Methyl-uridine
  modified_base 95: mod_base = OTHER; note = 2'-O-Methyl-guanosine
  modified_base 96: mod_base = OTHER; note = 2'-O-Methyl-cytidine
  modified_base 97: mod_base = OTHER; note = 2'-O-Methyl-uridine phosphorothioate
  modified_base 98: mod_base = OTHER; note = 2'-O-Methyl-uridine phosphorothioate
  modified_base 99: mod_base = OTHER; note = 2'-O-Methyl-uridine phosphorothioate
  modified_base 100: mod_base = OTHER; note = 2'-O-Methyl-uridine

SEQ ID NO: 1729 - RNA, 103 nt, synthetic construct; identical to SEQ ID NO: 1643
  source 1..103: mol_type = other RNA; note = Description of Artificial Sequence: Synthetic polynucleotide
  modified_base 1: mod_base = OTHER; note = 2'-O-Methyl-cytidine phosphorothioate
  modified_base 2: mod_base = OTHER; note = 2'-O-Methyl-cytidine phosphorothioate
  modified_base 3: mod_base = OTHER; note = 2'-O-Methyl-cytidine
  modified_base 21: mod_base = OTHER; note = 2'-O-Methyl-guanosine
  modified_base 28: mod_base = OTHER; note = 2'-O-Methyl-adenosine
  modified_base 29: mod_base = OTHER; note = 2'-O-Methyl-guanosine
  modified_base 30: mod_base = OTHER; note = 2'-O-Methyl-cytidine
  modified_base 31: mod_base = OTHER; note = 2'-O-Methyl-uridine
  modified_base 32: mod_base = OTHER; note = 2'-O-Methyl-adenosine
  modified_base 34: mod_base = OTHER; note = 2'-O-Methyl-adenosine
  modified_base 35: mod_base = OTHER; note = 2'-O-Methyl-adenosine
  modified_base 36: mod_base = OTHER; note = 2'-O-Methyl-adenosine
  modified_base 37: mod_base = OTHER; note = 2'-O-Methyl-uridine
  modified_base 38: mod_base = OTHER; note = 2'-O-Methyl-adenosine
  modified_base 39: mod_base = OTHER; note = 2'-O-Methyl-guanosine
  modified_base 40: mod_base = OTHER; note = 2'-O-Methyl-cytidine
  modified_base 41: mod_base = OTHER; note = 2'-O-Methyl-adenosine
  modified_base 42: mod_base = OTHER; note = 2'-O-Methyl-adenosine
  modified_base 45: mod_base = OTHER; note = uridine phosphorothioate
  modified_base 46: mod_base = OTHER; note = 2'-O-Methyl-adenosine
  modified_base 48: mod_base = OTHER; note = 2'-O-Methyl-adenosine
  modified_base 50: mod_base = OTHER; note = 2'-O-Methyl-uridine
  modified_base 52: mod_base = OTHER; note = 2'-O-Methyl-adenosine
  modified_base 53: mod_base = OTHER; note = 2'-O-Methyl-guanosine
  modified_base 54: mod_base = OTHER; note = 2'-O-Methyl-guanosine
  modified_base 57: mod_base = OTHER; note = 2'-O-Methyl-adenosine
  modified_base 61: mod_base = OTHER; note = 2'-O-Methyl-cytidine
  modified_base 66: mod_base = OTHER; note = 2'-O-Methyl-uridine
  modified_base 67: mod_base = OTHER; note = 2'-O-Methyl-cytidine
  modified_base 70: mod_base = OTHER; note = 2'-O-Methyl-cytidine
  modified_base 71: mod_base = OTHER; note = 2'-O-Methyl-uridine
  modified_base 72: mod_base = OTHER; note = 2'-O-Methyl-uridine
  modified_base 74: mod_base = OTHER; note = 2'-O-Methyl-adenosine
  modified_base 75: mod_base = OTHER; note = 2'-O-Methyl-adenosine
  modified_base 76: mod_base = OTHER; note = 2'-O-Methyl-adenosine
  modified_base 77: mod_base = OTHER; note = 2'-O-Methyl-adenosine
  modified_base 78: mod_base = OTHER; note = 2'-O-Methyl-adenosine
  modified_base 79: mod_base = OTHER; note = 2'-O-Methyl-guanosine
  modified_base 80: mod_base = OTHER; note = 2'-O-Methyl-uridine
  modified_base 82: mod_base = OTHER; note = 2'-O-Methyl-guanosine
  modified_base 83: mod_base = OTHER; note = 2'-O-Methyl-cytidine
  modified_base 84: mod_base = OTHER; note = 2'-O-Methyl-adenosine
  modified_base 85: mod_base = OTHER; note = 2'-O-Methyl-cytidine
  modified_base 86: mod_base = OTHER; note = 2'-O-Methyl-cytidine
  modified_base 87: mod_base = OTHER; note = 2'-O-Methyl-guanosine
  modified_base 89: mod_base = OTHER; note = 2'-O-Methyl-guanosine
  modified_base 92: mod_base = OTHER; note = 2'-O-Methyl-guanosine
  modified_base 93: mod_base = OTHER; note = 2'-O-Methyl-guanosine
  modified_base 94: mod_base = OTHER; note = 2'-O-Methyl-uridine
  modified_base 95: mod_base = OTHER; note = 2'-O-Methyl-guanosine
  modified_base 96: mod_base = OTHER; note = 2'-O-Methyl-cytidine
  modified_base 97: mod_base = OTHER; note = 2'-O-Methyl-uridine phosphorothioate
  modified_base 98: mod_base = OTHER; note = 2'-O-Methyl-uridine phosphorothioate
  modified_base 99: mod_base = OTHER; note = 2'-O-Methyl-uridine phosphorothioate
  modified_base 100: mod_base = OTHER; note = 2'-O-Methyl-uridine

SEQ ID NO: 1730 - RNA, 103 nt, synthetic construct; identical to SEQ ID NO: 1699
  source 1..103: mol_type = other RNA; note = Description of Artificial Sequence: Synthetic polynucleotide
  modified_base 1: mod_base = OTHER; note = 2'-O-Methyl-guanosine phosphorothioate
  modified_base 2: mod_base = OTHER; note = 2'-O-Methyl-adenosine phosphorothioate
  modified_base 3: mod_base = OTHER; note = 2'-O-Methyl-guanosine
  modified_base 21: mod_base = OTHER; note = 2'-O-Methyl-guanosine
  modified_base 28: mod_base = OTHER; note = 2'-O-Methyl-adenosine
  modified_base 29: mod_base = OTHER; note = 2'-O-Methyl-guanosine
  modified_base 30: mod_base = OTHER; note = 2'-O-Methyl-cytidine
  modified_base 31: mod_base = OTHER; note = 2'-O-Methyl-uridine
  modified_base 32: mod_base = OTHER; note = 2'-O-Methyl-adenosine
  modified_base 34: mod_base = OTHER; note = 2'-O-Methyl-adenosine
  modified_base 35: mod_base = OTHER; note = 2'-O-Methyl-adenosine
  modified_base 36: mod_base = OTHER; note = 2'-O-Methyl-adenosine
  modified_base 37: mod_base = OTHER; note = 2'-O-Methyl-uridine
  modified_base 38: mod_base = OTHER; note = 2'-O-Methyl-adenosine
  modified_base 39: mod_base = OTHER; note = 2'-O-Methyl-guanosine
  modified_base 40: mod_base = OTHER; note = 2'-O-Methyl-cytidine
  modified_base 41: mod_base = OTHER; note = 2'-O-Methyl-adenosine
  modified_base 42: mod_base = OTHER; note = 2'-O-Methyl-adenosine
  modified_base 45: mod_base = OTHER; note = uridine phosphorothioate
  modified_base 46: mod_base = OTHER; note = 2'-O-Methyl-adenosine
  modified_base 48: mod_base = OTHER; note = 2'-O-Methyl-adenosine
  modified_base 50: mod_base = OTHER; note = 2'-O-Methyl-uridine
  modified_base 52: mod_base = OTHER; note = 2'-O-Methyl-adenosine
  modified_base 53: mod_base = OTHER; note = 2'-O-Methyl-guanosine
  modified_base 54: mod_base = OTHER; note = 2'-O-Methyl-guanosine
  modified_base 57: mod_base = OTHER; note = 2'-O-Methyl-adenosine
  modified_base 61: mod_base = OTHER; note = 2'-O-Methyl-cytidine
  modified_base 66: mod_base = OTHER; note = 2'-O-Methyl-uridine
  modified_base 67: mod_base = OTHER; note = 2'-O-Methyl-cytidine
  modified_base 70: mod_base = OTHER; note = 2'-O-Methyl-cytidine
  modified_base 71: mod_base = OTHER; note = 2'-O-Methyl-uridine
  modified_base 72: mod_base = OTHER; note = 2'-O-Methyl-uridine
  modified_base 74: mod_base = OTHER; note = 2'-O-Methyl-adenosine
  modified_base 75: mod_base = OTHER; note = 2'-O-Methyl-adenosine
  modified_base 76: mod_base = OTHER; note = 2'-O-Methyl-adenosine
  modified_base 77: mod_base = OTHER; note = 2'-O-Methyl-adenosine
  modified_base 78: mod_base = OTHER; note = 2'-O-Methyl-adenosine
  modified_base 79: mod_base = OTHER; note = 2'-O-Methyl-guanosine
  modified_base 80: mod_base = OTHER; note = 2'-O-Methyl-uridine
  modified_base 82: mod_base = OTHER; note = 2'-O-Methyl-guanosine
  modified_base 83: mod_base = OTHER; note = 2'-O-Methyl-cytidine
  modified_base 84: mod_base = OTHER; note = 2'-O-Methyl-adenosine
  modified_base 85: mod_base = OTHER; note = 2'-O-Methyl-cytidine
  modified_base 86: mod_base = OTHER; note = 2'-O-Methyl-cytidine
  modified_base 87: mod_base = OTHER; note = 2'-O-Methyl-guanosine
  modified_base 89: mod_base = OTHER; note = 2'-O-Methyl-guanosine
  modified_base 92: mod_base = OTHER; note = 2'-O-Methyl-guanosine
  modified_base 93: mod_base = OTHER; note = 2'-O-Methyl-guanosine
  modified_base 94: mod_base = OTHER; note = 2'-O-Methyl-uridine
  modified_base 95: mod_base = OTHER; note = 2'-O-Methyl-guanosine
  modified_base 96: mod_base = OTHER; note = 2'-O-Methyl-cytidine
  modified_base 97: mod_base = OTHER; note = 2'-O-Methyl-uridine phosphorothioate
  modified_base 98: mod_base = OTHER; note = 2'-O-Methyl-uridine phosphorothioate
  modified_base 99: mod_base = OTHER; note = 2'-O-Methyl-uridine phosphorothioate
  modified_base 100: mod_base = OTHER; note = 2'-O-Methyl-uridine

SEQ ID NO: 1731 - RNA, 103 nt, synthetic construct; identical to SEQ ID NO: 1700
  source 1..103: mol_type = other RNA; note = Description of Artificial Sequence: Synthetic polynucleotide
  modified_base 1: mod_base = OTHER; note = 2'-O-Methyl-cytidine phosphorothioate
  modified_base 2: mod_base = OTHER; note = 2'-O-Methyl-adenosine phosphorothioate
  modified_base 3: mod_base = OTHER; note = 2'-O-Methyl-guanosine
  modified_base 21: mod_base = OTHER; note = 2'-O-Methyl-guanosine
  modified_base 28: mod_base = OTHER; note = 2'-O-Methyl-adenosine
  modified_base 29: mod_base = OTHER; note = 2'-O-Methyl-guanosine
  modified_base 30: mod_base = OTHER; note = 2'-O-Methyl-cytidine
  modified_base 31: mod_base = OTHER; note = 2'-O-Methyl-uridine
  modified_base 32: mod_base = OTHER; note = 2'-O-Methyl-adenosine
  modified_base 34: mod_base = OTHER; note = 2'-O-Methyl-adenosine
  modified_base 35: mod_base = OTHER; note = 2'-O-Methyl-adenosine
  modified_base 36: mod_base = OTHER; note = 2'-O-Methyl-adenosine
  modified_base 37: mod_base = OTHER; note = 2'-O-Methyl-uridine
  modified_base 38: mod_base = OTHER; note = 2'-O-Methyl-adenosine
  modified_base 39: mod_base = OTHER; note = 2'-O-Methyl-guanosine
  modified_base 40: mod_base = OTHER; note = 2'-O-Methyl-cytidine
  modified_base 41: mod_base = OTHER; note = 2'-O-Methyl-adenosine
  modified_base 42: mod_base = OTHER; note = 2'-O-Methyl-adenosine
  modified_base 45: mod_base = OTHER; note = uridine phosphorothioate
  modified_base 46: mod_base = OTHER; note = 2'-O-Methyl-adenosine
  modified_base 48: mod_base = OTHER; note = 2'-O-Methyl-adenosine
  modified_base 50: mod_base = OTHER; note = 2'-O-Methyl-uridine
  modified_base 52: mod_base = OTHER; note = 2'-O-Methyl-adenosine
  modified_base 53: mod_base = OTHER; note = 2'-O-Methyl-guanosine
  modified_base 54: mod_base = OTHER; note = 2'-O-Methyl-guanosine
  modified_base 55: mod_base = OTHER; note = 2'-O-Methyl-cytidine
  modified_base 56: mod_base = OTHER; note = 2'-O-Methyl-uridine
  modified_base 57: mod_base = OTHER; note = 2'-O-Methyl-adenosine
  modified_base 60: mod_base = OTHER; note = 2'-O-Methyl-cytidine
  modified_base 61: mod_base = OTHER; note = 2'-O-Methyl-cytidine
  modified_base 66: mod_base = OTHER; note = 2'-O-Methyl-uridine
  modified_base 67: mod_base = OTHER; note = 2'-O-Methyl-cytidine
  modified_base 70: mod_base = OTHER; note = 2'-O-Methyl-cytidine
  modified_base 71: mod_base = OTHER; note = 2'-O-Methyl-uridine
  modified_base 72: mod_base = OTHER; note = 2'-O-Methyl-uridine
  modified_base 74: mod_base = OTHER; note = 2'-O-Methyl-adenosine
  modified_base 75: mod_base = OTHER; note = 2'-O-Methyl-adenosine
  modified_base 76: mod_base = OTHER; note = 2'-O-Methyl-adenosine
  modified_base 77: mod_base = OTHER; note = 2'-O-Methyl-adenosine
  modified_base 78: mod_base = OTHER; note = 2'-O-Methyl-adenosine
  modified_base 79: mod_base = OTHER; note = 2'-O-Methyl-guanosine
  modified_base 80: mod_base = OTHER; note = 2'-O-Methyl-uridine
  modified_base 81: mod_base = OTHER; note = 2'-O-Methyl-guanosine
  modified_base 83: mod_base = OTHER; note = 2'-O-Methyl-cytidine
  modified_base 84: mod_base = OTHER; note = 2'-O-Methyl-adenosine
  modified_base 85: mod_base = OTHER; note = 2'-O-Methyl-cytidine
  modified_base 86: mod_base = OTHER; note = 2'-O-Methyl-cytidine
  modified_base 87: mod_base = OTHER; note = 2'-O-Methyl-guanosine
  modified_base 88: mod_base = OTHER; note = 2'-O-Methyl-adenosine
  modified_base 89: mod_base = OTHER; note = 2'-O-Methyl-guanosine
  modified_base 90: mod_base = OTHER; note = 2'-O-Methyl-uridine
  modified_base 91: mod_base = OTHER; note = 2'-O-Methyl-cytidine
  modified_base 92: mod_base = OTHER; note = 2'-O-Methyl-guanosine
  modified_base 93: mod_base = OTHER; note = 2'-O-Methyl-guanosine
  modified_base 94: mod_base = OTHER; note = 2'-O-Methyl-uridine
  modified_base 95: mod_base = OTHER; note = 2'-O-Methyl-guanosine
  modified_base 96: mod_base = OTHER; note = 2'-O-Methyl-cytidine
  modified_base 97: mod_base = OTHER; note = 2'-O-Methyl-uridine phosphorothioate
  modified_base 98: mod_base = OTHER; note = 2'-O-Methyl-uridine phosphorothioate
  modified_base 99: mod_base = OTHER; note = 2'-O-Methyl-uridine phosphorothioate
  modified_base 100: mod_base = OTHER; note = 2'-O-Methyl-uridine

SEQ ID NO: 1732 - RNA, 103 nt, synthetic construct; identical to SEQ ID NO: 1643
  source 1..103: mol_type = other RNA; note = Description of Artificial Sequence: Synthetic polynucleotide
  modified_base 1: mod_base = OTHER; note = 2'-O-Methyl-cytidine phosphorothioate
  modified_base 2: mod_base = OTHER; note = 2'-O-Methyl-cytidine phosphorothioate
  modified_base 3: mod_base = OTHER; note = 2'-O-Methyl-cytidine
  modified_base 21: mod_base = OTHER; note = 2'-O-Methyl-guanosine
  modified_base 25: mod_base = OTHER; note = uridine phosphorothioate
  modified_base 28: mod_base = OTHER; note = 2'-O-Methyl-adenosine
  modified_base 29: mod_base = OTHER; note = 2'-O-Methyl-guanosine
  modified_base 30: mod_base = OTHER; note = 2'-O-Methyl-cytidine
  modified_base 31: mod_base = OTHER; note = 2'-O-Methyl-uridine
  modified_base 32: mod_base = OTHER; note = 2'-O-Methyl-adenosine
  modified_base 34: mod_base = OTHER; note = 2'-O-Methyl-adenosine
  modified_base 35: mod_base = OTHER; note = 2'-O-Methyl-adenosine
  modified_base 36: mod_base = OTHER; note = 2'-O-Methyl-adenosine
  modified_base 37: mod_base = OTHER; note = 2'-O-Methyl-uridine
  modified_base 38: mod_base = OTHER; note = 2'-O-Methyl-adenosine
  modified_base 39: mod_base = OTHER; note = 2'-O-Methyl-guanosine
  modified_base 40: mod_base = OTHER; note = 2'-O-Methyl-cytidine
  modified_base 41: mod_base = OTHER; note = 2'-O-Methyl-adenosine
  modified_base 42: mod_base = OTHER; note = 2'-O-Methyl-adenosine
  modified_base 46: mod_base = OTHER; note = 2'-O-Methyl-adenosine
  modified_base 48: mod_base = OTHER; note = 2'-O-Methyl-adenosine
  modified_base 50: mod_base = OTHER; note = 2'-O-Methyl-uridine
  modified_base 52: mod_base = OTHER; note = 2'-O-Methyl-adenosine
  modified_base 53: mod_base = OTHER; note = 2'-O-Methyl-guanosine
  modified_base 54: mod_base = OTHER; note = 2'-O-Methyl-guanosine
  modified_base 57: mod_base = OTHER; note = 2'-O-Methyl-adenosine
  modified_base 61: mod_base = OTHER; note = 2'-O-Methyl-cytidine
  modified_base 66: mod_base = OTHER; note = 2'-O-Methyl-uridine
  modified_base 67: mod_base = OTHER; note = 2'-O-Methyl-cytidine
  modified_base 70: mod_base = OTHER; note = 2'-O-Methyl-cytidine
  modified_base 71: mod_base = OTHER; note = 2'-O-Methyl-uridine
  modified_base 72: mod_base = OTHER; note = 2'-O-Methyl-uridine
  modified_base 74: mod_base = OTHER; note = 2'-O-Methyl-adenosine
  modified_base 75: mod_base = OTHER; note = 2'-O-Methyl-adenosine
  modified_base 76: mod_base = OTHER; note = 2'-O-Methyl-adenosine
  modified_base 77: mod_base = OTHER; note = 2'-O-Methyl-adenosine
  modified_base 78: mod_base = OTHER; note = 2'-O-Methyl-adenosine
  modified_base 79: mod_base = OTHER; note = 2'-O-Methyl-guanosine
  modified_base 80: mod_base = OTHER; note = 2'-O-Methyl-uridine
  modified_base 82: mod_base = OTHER; note = 2'-O-Methyl-guanosine
  modified_base 83: mod_base = OTHER; note = 2'-O-Methyl-cytidine
  modified_base 84: mod_base = OTHER; note = 2'-O-Methyl-adenosine
  modified_base 85: mod_base = OTHER; note = 2'-O-Methyl-cytidine
  modified_base 86: mod_base = OTHER; note = 2'-O-Methyl-cytidine
  modified_base 87: mod_base = OTHER; note = 2'-O-Methyl-guanosine
  modified_base 89: mod_base = OTHER; note = 2'-O-Methyl-guanosine
  modified_base 92: mod_base = OTHER; note = 2'-O-Methyl-guanosine
  modified_base 93: mod_base = OTHER; note = 2'-O-Methyl-guanosine
  modified_base 94: mod_base = OTHER; note = 2'-O-Methyl-uridine
  modified_base 95: mod_base = OTHER; note = 2'-O-Methyl-guanosine
  modified_base 96: mod_base = OTHER; note = 2'-O-Methyl-cytidine
  modified_base 97: mod_base = OTHER; note = 2'-O-Methyl-uridine phosphorothioate
  modified_base 98: mod_base = OTHER; note = 2'-O-Methyl-uridine phosphorothioate
  modified_base 99: mod_base = OTHER; note = 2'-O-Methyl-uridine phosphorothioate
  modified_base 100: mod_base = OTHER; note = 2'-O-Methyl-uridine

SEQ ID NO: 1733 - RNA, 103 nt, synthetic construct; identical to SEQ ID NO: 1699
  source 1..103: mol_type = other RNA; note = Description of Artificial Sequence: Synthetic polynucleotide
  modified_base 1: mod_base = OTHER; note = 2'-O-Methyl-guanosine phosphorothioate
  modified_base 2: mod_base = OTHER; note = 2'-O-Methyl-adenosine phosphorothioate
  modified_base 3: mod_base = OTHER; note = 2'-O-Methyl-guanosine
  modified_base 21: mod_base = OTHER; note = 2'-O-Methyl-guanosine
  modified_base 25: mod_base = OTHER; note = uridine phosphorothioate
  modified_base 28: mod_base = OTHER; note = 2'-O-Methyl-adenosine
  modified_base 29: mod_base = OTHER; note = 2'-O-Methyl-guanosine
  modified_base 30: mod_base = OTHER; note = 2'-O-Methyl-cytidine
  modified_base 31: mod_base = OTHER; note = 2'-O-Methyl-uridine
  modified_base 32: mod_base = OTHER; note = 2'-O-Methyl-adenosine
  modified_base 34: mod_base = OTHER; note = 2'-O-Methyl-adenosine
  modified_base 35: mod_base = OTHER; note = 2'-O-Methyl-adenosine
  modified_base 36: mod_base = OTHER; note = 2'-O-Methyl-adenosine
  modified_base 37: mod_base = OTHER; note = 2'-O-Methyl-uridine
  modified_base 38: mod_base = OTHER; note = 2'-O-Methyl-adenosine
  modified_base 39: mod_base = OTHER; note = 2'-O-Methyl-guanosine
  modified_base 40: mod_base = OTHER; note = 2'-O-Methyl-cytidine
  modified_base 41: mod_base = OTHER; note = 2'-O-Methyl-adenosine
  modified_base 42: mod_base = OTHER; note = 2'-O-Methyl-adenosine
  modified_base 46: mod_base = OTHER; note = 2'-O-Methyl-adenosine
  modified_base 48: mod_base = OTHER; note = 2'-O-Methyl-adenosine
  modified_base 50: mod_base = OTHER; note = 2'-O-Methyl-uridine
  modified_base 52: mod_base = OTHER; note = 2'-O-Methyl-adenosine
  modified_base 53: mod_base = OTHER; note = 2'-O-Methyl-guanosine
  modified_base 54: mod_base = OTHER; note = 2'-O-Methyl-guanosine
  modified_base 57: mod_base = OTHER; note = 2'-O-Methyl-adenosine
  modified_base 61: mod_base = OTHER; note = 2'-O-Methyl-cytidine
  modified_base 66: mod_base = OTHER; note = 2'-O-Methyl-uridine
  modified_base 67: mod_base = OTHER; note = 2'-O-Methyl-cytidine
  modified_base 70: mod_base = OTHER; note = 2'-O-Methyl-cytidine
  modified_base 71: mod_base = OTHER; note = 2'-O-Methyl-uridine
  modified_base 72: mod_base = OTHER; note = 2'-O-Methyl-uridine
  modified_base 74: mod_base = OTHER; note = 2'-O-Methyl-adenosine
  modified_base 75: mod_base = OTHER; note = 2'-O-Methyl-adenosine
  modified_base 76: mod_base = OTHER; note = 2'-O-Methyl-adenosine
  modified_base 77: mod_base = OTHER; note = 2'-O-Methyl-adenosine
  modified_base 78: mod_base = OTHER; note = 2'-O-Methyl-adenosine
  modified_base 79: mod_base = OTHER; note = 2'-O-Methyl-guanosine
  modified_base 80: mod_base = OTHER; note = 2'-O-Methyl-uridine
  modified_base 82: mod_base = OTHER; note = 2'-O-Methyl-guanosine
  modified_base 83: mod_base = OTHER; note = 2'-O-Methyl-cytidine
  modified_base 84: mod_base = OTHER; note = 2'-O-Methyl-adenosine
  modified_base 85: mod_base = OTHER; note = 2'-O-Methyl-cytidine
  modified_base 86: mod_base = OTHER; note = 2'-O-Methyl-cytidine
  modified_base 87: mod_base = OTHER; note = 2'-O-Methyl-guanosine
  modified_base 89: mod_base = OTHER; note = 2'-O-Methyl-guanosine
  modified_base 92: mod_base = OTHER; note = 2'-O-Methyl-guanosine
  modified_base 93: mod_base = OTHER; note = 2'-O-Methyl-guanosine
  modified_base 94: mod_base = OTHER; note = 2'-O-Methyl-uridine
  modified_base 95: mod_base = OTHER; note = 2'-O-Methyl-guanosine
  modified_base 96: mod_base = OTHER; note = 2'-O-Methyl-cytidine
  modified_base 97: mod_base = OTHER; note = 2'-O-Methyl-uridine phosphorothioate
  modified_base 98: mod_base = OTHER; note = 2'-O-Methyl-uridine phosphorothioate
  modified_base 99: mod_base = OTHER; note = 2'-O-Methyl-uridine phosphorothioate
  modified_base 100: mod_base = OTHER; note = 2'-O-Methyl-uridine

SEQ ID NO: 1734 - RNA, 103 nt, synthetic construct; identical to SEQ ID NO: 1700
  source 1..103: mol_type = other RNA; note = Description of Artificial Sequence: Synthetic polynucleotide
  modified_base 1: mod_base = OTHER; note = 2'-O-Methyl-cytidine phosphorothioate
  modified_base 2: mod_base = OTHER; note = 2'-O-Methyl-adenosine phosphorothioate
  modified_base 3: mod_base = OTHER; note = 2'-O-Methyl-guanosine
  modified_base 21: mod_base = OTHER; note = 2'-O-Methyl-guanosine
  modified_base 25: mod_base = OTHER; note = uridine phosphorothioate
  modified_base 28: mod_base = OTHER; note = 2'-O-Methyl-adenosine
  modified_base 29: mod_base = OTHER; note = 2'-O-Methyl-guanosine
  modified_base 30: mod_base = OTHER; note = 2'-O-Methyl-cytidine
  modified_base 31: mod_base = OTHER; note = 2'-O-Methyl-uridine
  modified_base 32: mod_base = OTHER; note = 2'-O-Methyl-adenosine
  modified_base 34: mod_base = OTHER; note = 2'-O-Methyl-adenosine
  modified_base 35: mod_base = OTHER; note = 2'-O-Methyl-adenosine
  modified_base 36: mod_base = OTHER; note = 2'-O-Methyl-adenosine
  modified_base 37: mod_base = OTHER; note = 2'-O-Methyl-uridine
  modified_base 38: mod_base = OTHER; note = 2'-O-Methyl-adenosine
  modified_base 39: mod_base = OTHER; note = 2'-O-Methyl-guanosine
  modified_base 40: mod_base = OTHER; note = 2'-O-Methyl-cytidine
  modified_base 41: mod_base = OTHER; note = 2'-O-Methyl-adenosine
  modified_base 42: mod_base = OTHER; note = 2'-O-Methyl-adenosine
  modified_base 46: mod_base = OTHER; note = 2'-O-Methyl-adenosine
  modified_base 48: mod_base = OTHER; note = 2'-O-Methyl-adenosine
  modified_base 50: mod_base = OTHER; note = 2'-O-Methyl-uridine
  modified_base 52: mod_base = OTHER; note = 2'-O-Methyl-adenosine
  modified_base 53: mod_base = OTHER; note = 2'-O-Methyl-guanosine
  modified_base 54: mod_base = OTHER; note = 2'-O-Methyl-guanosine
  modified_base 55: mod_base = OTHER; note = 2'-O-Methyl-cytidine
  modified_base 56: mod_base = OTHER; note = 2'-O-Methyl-uridine
  modified_base 57: mod_base = OTHER; note = 2'-O-Methyl-adenosine
  modified_base 60: mod_base = OTHER; note = 2'-O-Methyl-cytidine
  modified_base 61: mod_base = OTHER; note = 2'-O-Methyl-cytidine
  modified_base 66: mod_base = OTHER; note = 2'-O-Methyl-uridine
  modified_base 67: mod_base = OTHER; note = 2'-O-Methyl-cytidine
  modified_base 70: mod_base = OTHER; note = 2'-O-Methyl-cytidine
  modified_base 71: mod_base = OTHER; note = 2'-O-Methyl-uridine
  modified_base 72: mod_base = OTHER; note = 2'-O-Methyl-uridine
  modified_base 74: mod_base = OTHER; note = 2'-O-Methyl-adenosine
  modified_base 75: mod_base = OTHER; note = 2'-O-Methyl-adenosine
  modified_base 76: mod_base = OTHER; note = 2'-O-Methyl-adenosine
  modified_base 77: mod_base = OTHER; note = 2'-O-Methyl-adenosine
  modified_base 78: mod_base = OTHER; note = 2'-O-Methyl-adenosine
  modified_base 79: mod_base = OTHER; note = 2'-O-Methyl-guanosine
  modified_base 80: mod_base = OTHER; note = 2'-O-Methyl-uridine
  modified_base 81: mod_base = OTHER; note = 2'-O-Methyl-guanosine
  modified_base 83: mod_base = OTHER; note = 2'-O-Methyl-cytidine
  modified_base 84: mod_base = OTHER; note = 2'-O-Methyl-adenosine
  modified_base 85: mod_base = OTHER; note = 2'-O-Methyl-cytidine
  modified_base 86: mod_base = OTHER; note = 2'-O-Methyl-cytidine
  modified_base 87: mod_base = OTHER; note = 2'-O-Methyl-guanosine
  modified_base 88: mod_base = OTHER; note = 2'-O-Methyl-adenosine
  modified_base 89: mod_base = OTHER; note = 2'-O-Methyl-guanosine
  modified_base 90: mod_base = OTHER; note = 2'-O-Methyl-uridine
  modified_base 91: mod_base = OTHER; note = 2'-O-Methyl-cytidine
  modified_base 92: mod_base = OTHER; note = 2'-O-Methyl-guanosine
  modified_base 93: mod_base = OTHER; note = 2'-O-Methyl-guanosine
  modified_base 94: mod_base = OTHER; note = 2'-O-Methyl-uridine
  modified_base 95: mod_base = OTHER; note = 2'-O-Methyl-guanosine
  modified_base 96: mod_base = OTHER; note = 2'-O-Methyl-cytidine
  modified_base 97: mod_base = OTHER; note = 2'-O-Methyl-uridine phosphorothioate
  modified_base 98: mod_base = OTHER; note = 2'-O-Methyl-uridine phosphorothioate
  modified_base 99: mod_base = OTHER; note = 2'-O-Methyl-uridine phosphorothioate
  modified_base 100: mod_base = OTHER; note = 2'-O-Methyl-uridine

SEQ ID NO: 1735 - RNA, 103 nt, synthetic construct; identical to SEQ ID NO: 1643
  source 1..103: mol_type = other RNA; note = Description of Artificial Sequence: Synthetic polynucleotide
  modified_base 1: mod_base = OTHER; note = 2'-O-Methyl-cytidine phosphorothioate
  modified_base 2: mod_base = OTHER; note = 2'-O-Methyl-cytidine phosphorothioate
  modified_base 3: mod_base = OTHER; note = 2'-O-Methyl-cytidine
  modified_base 21: mod_base = OTHER; note = 2'-O-Methyl-guanosine
  modified_base 28: mod_base = OTHER; note = 2'-O-Methyl-adenosine
  modified_base 29: mod_base = OTHER; note = 2'-O-Methyl-guanosine
  modified_base 30: mod_base = OTHER; note = 2'-O-Methyl-cytidine
  modified_base 31: mod_base = OTHER; note = 2'-O-Methyl-uridine
  modified_base 32: mod_base = OTHER; note = 2'-O-Methyl-adenosine
  modified_base 34: mod_base = OTHER; note = 2'-O-Methyl-adenosine
  modified_base 35: mod_base = OTHER; note = 2'-O-Methyl-adenosine
  modified_base 36: mod_base = OTHER; note = 2'-O-Methyl-adenosine
  modified_base 37: mod_base = OTHER; note = 2'-O-Methyl-uridine
  modified_base 38: mod_base = OTHER; note = 2'-O-Methyl-adenosine
  modified_base 39: mod_base = OTHER; note = 2'-O-Methyl-guanosine
  modified_base 40: mod_base = OTHER; note = 2'-O-Methyl-cytidine
  modified_base 41: mod_base = OTHER; note = 2'-O-Methyl-adenosine
  modified_base 42: mod_base = OTHER; note = 2'-O-Methyl-adenosine
  modified_base 45: mod_base = OTHER; note = uridine phosphorothioate
  modified_base 46: mod_base = OTHER; note = 2'-O-Methyl-adenosine
  modified_base 48: mod_base = OTHER; note = 2'-O-Methyl-adenosine
  modified_base 50: mod_base = OTHER; note = 2'-O-Methyl-uridine
  modified_base 52: mod_base = OTHER; note = 2'-O-Methyl-adenosine
  modified_base 53: mod_base = OTHER; note = 2'-O-Methyl-guanosine
  modified_base 54: mod_base = OTHER; note = 2'-O-Methyl-guanosine
  modified_base 57: mod_base = OTHER; note = 2'-O-Methyl-adenosine
  modified_base 61: mod_base = OTHER; note = 2'-O-Methyl-cytidine
  modified_base 64: mod_base = OTHER; note = uridine phosphorothioate
  modified_base 66: mod_base = OTHER; note = 2'-O-Methyl-uridine
  modified_base 67: mod_base = OTHER; note = 2'-O-Methyl-cytidine
  modified_base 70: mod_base = OTHER; note = 2'-O-Methyl-cytidine
  modified_base 71: mod_base = OTHER; note = 2'-O-Methyl-uridine
  modified_base 72: mod_base = OTHER; note = 2'-O-Methyl-uridine
  modified_base 74: mod_base = OTHER; note = 2'-O-Methyl-adenosine
  modified_base 75: mod_base = OTHER; note = 2'-O-Methyl-adenosine
  modified_base 76: mod_base = OTHER; note = 2'-O-Methyl-adenosine
  modified_base 77: mod_base = OTHER; note = 2'-O-Methyl-adenosine
  modified_base 78: mod_base = OTHER; note = 2'-O-Methyl-adenosine
  modified_base 79: mod_base = OTHER; note = 2'-O-Methyl-guanosine
  modified_base 80: mod_base = OTHER; note = 2'-O-Methyl-uridine
  modified_base 82: mod_base = OTHER; note = 2'-O-Methyl-guanosine
  modified_base 83: mod_base = OTHER; note = 2'-O-Methyl-cytidine
  modified_base 84: mod_base = OTHER; note = 2'-O-Methyl-adenosine
  modified_base 85: mod_base = OTHER; note = 2'-O-Methyl-cytidine
  modified_base 86: mod_base = OTHER; note = 2'-O-Methyl-cytidine
  modified_base 87: mod_base = OTHER; note = 2'-O-Methyl-guanosine
  modified_base 89: mod_base = OTHER; note = 2'-O-Methyl-guanosine
  modified_base 92: mod_base = OTHER; note = 2'-O-Methyl-guanosine
  modified_base 93: mod_base = OTHER; note = 2'-O-Methyl-guanosine
  modified_base 94: mod_base = OTHER; note = 2'-O-Methyl-uridine
  modified_base 95: mod_base = OTHER; note = 2'-O-Methyl-guanosine
  modified_base 96: mod_base = OTHER; note = 2'-O-Methyl-cytidine
  modified_base 97: mod_base = OTHER; note = 2'-O-Methyl-uridine phosphorothioate
  modified_base 98: mod_base = OTHER; note = 2'-O-Methyl-uridine phosphorothioate
  modified_base 99: mod_base = OTHER; note = 2'-O-Methyl-uridine phosphorothioate
  modified_base 100: mod_base = OTHER; note = 2'-O-Methyl-uridine

SEQ ID NO: 1736 - RNA, 103 nt, synthetic construct; identical to SEQ ID NO: 1699
  source 1..103: mol_type = other RNA; note = Description of Artificial Sequence: Synthetic polynucleotide
  modified_base 1: mod_base = OTHER; note = 2'-O-Methyl-guanosine phosphorothioate
  modified_base 2: mod_base = OTHER; note = 2'-O-Methyl-adenosine phosphorothioate
  modified_base 3: mod_base = OTHER; note = 2'-O-Methyl-guanosine
  modified_base 21: mod_base = OTHER; note = 2'-O-Methyl-guanosine
  modified_base 28: mod_base = OTHER; note = 2'-O-Methyl-adenosine
  modified_base 29: mod_base = OTHER; note = 2'-O-Methyl-guanosine
  modified_base 30: mod_base = OTHER; note = 2'-O-Methyl-cytidine
  modified_base 31: mod_base = OTHER; note = 2'-O-Methyl-uridine
  modified_base 32: mod_base = OTHER; note = 2'-O-Methyl-adenosine
  modified_base 34: mod_base = OTHER; note = 2'-O-Methyl-adenosine
  modified_base 35: mod_base = OTHER; note = 2'-O-Methyl-adenosine
  modified_base 36: mod_base = OTHER; note = 2'-O-Methyl-adenosine
  modified_base 37: mod_base = OTHER; note = 2'-O-Methyl-uridine
  modified_base 38: mod_base = OTHER; note = 2'-O-Methyl-adenosine
  modified_base 39: mod_base = OTHER; note = 2'-O-Methyl-guanosine
  modified_base 40: mod_base = OTHER; note = 2'-O-Methyl-cytidine
  modified_base 41: mod_base = OTHER; note = 2'-O-Methyl-adenosine
  modified_base 42: mod_base = OTHER; note = 2'-O-Methyl-adenosine
  modified_base 45: mod_base = OTHER; note = uridine phosphorothioate
  modified_base 46: mod_base = OTHER; note = 2'-O-Methyl-adenosine
  modified_base 48: mod_base = OTHER; note = 2'-O-Methyl-adenosine
  modified_base 50: mod_base = OTHER; note = 2'-O-Methyl-uridine
  modified_base 52: mod_base = OTHER; note = 2'-O-Methyl-adenosine
  modified_base 53: mod_base = OTHER; note = 2'-O-Methyl-guanosine
  modified_base 54: mod_base = OTHER; note = 2'-O-Methyl-guanosine
  modified_base 57: mod_base = OTHER; note = 2'-O-Methyl-adenosine
  modified_base 61: mod_base = OTHER; note = 2'-O-Methyl-cytidine
  modified_base 64: mod_base = OTHER; note = uridine phosphorothioate
  modified_base 66: mod_base = OTHER; note = 2'-O-Methyl-uridine
  modified_base 67: mod_base = OTHER; note = 2'-O-Methyl-cytidine
  modified_base 70: mod_base = OTHER; note = 2'-O-Methyl-cytidine
  modified_base 71: mod_base = OTHER; note = 2'-O-Methyl-uridine
  modified_base 72: mod_base = OTHER; note = 2'-O-Methyl-uridine
  modified_base 74: mod_base = OTHER; note = 2'-O-Methyl-adenosine
  modified_base 75: mod_base = OTHER; note = 2'-O-Methyl-adenosine
  modified_base 76: mod_base = OTHER; note = 2'-O-Methyl-adenosine
  modified_base 77: mod_base = OTHER; note = 2'-O-Methyl-adenosine
  modified_base 78: mod_base = OTHER; note = 2'-O-Methyl-adenosine
  modified_base 79: mod_base = OTHER; note = 2'-O-Methyl-guanosine
  modified_base 80: mod_base = OTHER; note = 2'-O-Methyl-uridine
  modified_base 82: mod_base = OTHER; note = 2'-O-Methyl-guanosine
  modified_base 83: mod_base = OTHER; note = 2'-O-Methyl-cytidine
  modified_base 84: mod_base = OTHER; note = 2'-O-Methyl-adenosine
  modified_base 85: mod_base = OTHER; note = 2'-O-Methyl-cytidine
  modified_base 86: mod_base = OTHER; note = 2'-O-Methyl-cytidine
  modified_base 87: mod_base = OTHER; note = 2'-O-Methyl-guanosine
  modified_base 89: mod_base = OTHER; note = 2'-O-Methyl-guanosine
  modified_base 92: mod_base = OTHER; note = 2'-O-Methyl-guanosine
  modified_base 93: mod_base = OTHER; note = 2'-O-Methyl-guanosine
  modified_base 94: mod_base = OTHER; note = 2'-O-Methyl-uridine
  modified_base 95: mod_base = OTHER; note = 2'-O-Methyl-guanosine
  modified_base 96: mod_base = OTHER; note = 2'-O-Methyl-cytidine
  modified_base 97: mod_base = OTHER; note = 2'-O-Methyl-uridine phosphorothioate
  modified_base 98: mod_base = OTHER; note = 2'-O-Methyl-uridine phosphorothioate
  modified_base 99: mod_base = OTHER; note = 2'-O-Methyl-uridine phosphorothioate
  modified_base 100: mod_base = OTHER; note = 2'-O-Methyl-uridine

SEQ ID NO: 1737 - RNA, 103 nt, synthetic construct; identical to SEQ ID NO: 1700
  source 1..103: mol_type = other RNA; note = Description of Artificial Sequence: Synthetic polynucleotide
  modified_base 1: mod_base = OTHER; note = 2'-O-Methyl-cytidine phosphorothioate
  modified_base 2: mod_base = OTHER; note = 2'-O-Methyl-adenosine phosphorothioate
  modified_base 3: mod_base = OTHER; note = 2'-O-Methyl-guanosine
  modified_base 21: mod_base = OTHER; note = 2'-O-Methyl-guanosine
  modified_base 28: mod_base = OTHER; note = 2'-O-Methyl-adenosine
  modified_base 29: mod_base = OTHER; note = 2'-O-Methyl-guanosine
  modified_base 30: mod_base = OTHER; note = 2'-O-Methyl-cytidine
  modified_base 31: mod_base = OTHER; note = 2'-O-Methyl-uridine
  modified_base 32: mod_base = OTHER; note = 2'-O-Methyl-adenosine
  modified_base 34: mod_base = OTHER; note = 2'-O-Methyl-adenosine
  modified_base 35: mod_base = OTHER; note = 2'-O-Methyl-adenosine
  modified_base 36: mod_base = OTHER; note = 2'-O-Methyl-adenosine
  modified_base 37: mod_base = OTHER; note = 2'-O-Methyl-uridine
  modified_base 38: mod_base = OTHER; note = 2'-O-Methyl-adenosine
  modified_base 39: mod_base = OTHER; note = 2'-O-Methyl-guanosine
  modified_base 40: mod_base = OTHER; note = 2'-O-Methyl-cytidine
  modified_base 41: mod_base = OTHER; note = 2'-O-Methyl-adenosine
  modified_base 42: mod_base = OTHER; note = 2'-O-Methyl-adenosine
  modified_base 45: mod_base = OTHER; note = uridine phosphorothioate
  modified_base 46: mod_base = OTHER; note = 2'-O-Methyl-adenosine
  modified_base 48: mod_base = OTHER; note = 2'-O-Methyl-adenosine
  modified_base 50: mod_base = OTHER; note = 2'-O-Methyl-uridine
  modified_base 52: mod_base = OTHER; note = 2'-O-Methyl-adenosine
  modified_base 53: mod_base = OTHER; note = 2'-O-Methyl-guanosine
  modified_base 54: mod_base = OTHER; note = 2'-O-Methyl-guanosine
  modified_base 55: mod_base = OTHER; note = 2'-O-Methyl-cytidine
  modified_base 56: mod_base = OTHER; note = 2'-O-Methyl-uridine
  modified_base 57: mod_base = OTHER; note = 2'-O-Methyl-adenosine
  modified_base 60: mod_base = OTHER; note = 2'-O-Methyl-cytidine
  modified_base 61: mod_base = OTHER; note = 2'-O-Methyl-cytidine
  modified_base 64: mod_base = OTHER; note = uridine phosphorothioate
  modified_base 66: mod_base = OTHER; note = 2'-O-Methyl-uridine
  modified_base 67: mod_base = OTHER; note = 2'-O-Methyl-cytidine
  modified_base 70: mod_base = OTHER; note = 2'-O-Methyl-cytidine
  modified_base 71: mod_base = OTHER; note = 2'-O-Methyl-uridine
  modified_base 72: mod_base = OTHER; note = 2'-O-Methyl-uridine
  modified_base 74: mod_base = OTHER; note = 2'-O-Methyl-adenosine
  modified_base 75: mod_base = OTHER; note = 2'-O-Methyl-adenosine
  modified_base 76: mod_base = OTHER; note = 2'-O-Methyl-adenosine
  modified_base 77: mod_base = OTHER; note = 2'-O-Methyl-adenosine
  modified_base 78: mod_base = OTHER; note = 2'-O-Methyl-adenosine
  modified_base 79: mod_base = OTHER; note = 2'-O-Methyl-guanosine
  modified_base 80: mod_base = OTHER; note = 2'-O-Methyl-uridine
  modified_base 81: mod_base = OTHER; note = 2'-O-Methyl-guanosine
  modified_base 83: mod_base = OTHER; note = 2'-O-Methyl-cytidine
  modified_base 84: mod_base = OTHER; note = 2'-O-Methyl-adenosine
  modified_base 85: mod_base = OTHER; note = 2'-O-Methyl-cytidine
  modified_base 86: mod_base = OTHER; note = 2'-O-Methyl-cytidine
  modified_base 87: mod_base = OTHER; note = 2'-O-Methyl-guanosine
  modified_base 88: mod_base = OTHER; note = 2'-O-Methyl-adenosine
  modified_base 89: mod_base = OTHER; note = 2'-O-Methyl-guanosine
  modified_base 90: mod_base = OTHER; note = 2'-O-Methyl-uridine
  modified_base 91: mod_base = OTHER; note = 2'-O-Methyl-cytidine
  modified_base 92: mod_base = OTHER; note = 2'-O-Methyl-guanosine
  modified_base 93: mod_base = OTHER; note = 2'-O-Methyl-guanosine
  modified_base 94: mod_base = OTHER; note = 2'-O-Methyl-uridine
  modified_base 95: mod_base = OTHER; note = 2'-O-Methyl-guanosine
  modified_base 96: mod_base = OTHER; note = 2'-O-Methyl-cytidine
  modified_base 97: mod_base = OTHER; note = 2'-O-Methyl-uridine phosphorothioate
  modified_base 98: mod_base = OTHER; note = 2'-O-Methyl-uridine phosphorothioate
  modified_base 99: mod_base = OTHER; note = 2'-O-Methyl-uridine phosphorothioate
  modified_base 100: mod_base = OTHER; note = 2'-O-Methyl-uridine

SEQ ID NO: 1738 - RNA, 103 nt, synthetic construct; identical to SEQ ID NO: 1643
  source 1..103: mol_type = other RNA; note = Description of Artificial Sequence: Synthetic polynucleotide
  modified_base 1: mod_base = OTHER; note = 2'-O-Methyl-cytidine phosphorothioate
  modified_base 2: mod_base = OTHER; note = 2'-O-Methyl-cytidine phosphorothioate
  modified_base 3: mod_base = OTHER; note = 2'-O-Methyl-cytidine
  modified_base 21: mod_base = OTHER; note = 2'-O-Methyl-guanosine
  modified_base 25: mod_base = OTHER; note = uridine phosphorothioate
  modified_base 28: mod_base = OTHER; note = 2'-O-Methyl-adenosine
  modified_base 29: mod_base = OTHER; note = 2'-O-Methyl-guanosine
  modified_base 30: mod_base = OTHER; note = 2'-O-Methyl-cytidine
  modified_base 31: mod_base = OTHER; note = 2'-O-Methyl-uridine
  modified_base 32: mod_base = OTHER; note = 2'-O-Methyl-adenosine
  modified_base 34: mod_base = OTHER; note = 2'-O-Methyl-adenosine
  modified_base 35: mod_base = OTHER; note = 2'-O-Methyl-adenosine
  modified_base 36: mod_base = OTHER; note = 2'-O-Methyl-adenosine
  modified_base 37: mod_base = OTHER; note = 2'-O-Methyl-uridine
  modified_base 38: mod_base = OTHER; note = 2'-O-Methyl-adenosine
  modified_base 39: mod_base = OTHER; note = 2'-O-Methyl-guanosine
  modified_base 40: mod_base = OTHER; note = 2'-O-Methyl-cytidine
  modified_base 41: mod_base = OTHER; note = 2'-O-Methyl-adenosine
  modified_base 42: mod_base = OTHER; note = 2'-O-Methyl-adenosine
  modified_base 45: mod_base = OTHER; note = uridine phosphorothioate
  modified_base 46: mod_base = OTHER; note = 2'-O-Methyl-adenosine
  modified_base 48: mod_base = OTHER; note = 2'-O-Methyl-adenosine
  modified_base 50: mod_base = OTHER; note = 2'-O-Methyl-uridine
  modified_base 52: mod_base = OTHER; note = 2'-O-Methyl-adenosine
  modified_base 53: mod_base = OTHER; note = 2'-O-Methyl-guanosine
  modified_base 54: mod_base = OTHER; note = 2'-O-Methyl-guanosine
  modified_base 57: mod_base = OTHER; note = 2'-O-Methyl-adenosine
  modified_base 61: mod_base = OTHER; note = 2'-O-Methyl-cytidine
  modified_base 66: mod_base = OTHER; note = 2'-O-Methyl-uridine
  modified_base 67: mod_base = OTHER; note = 2'-O-Methyl-cytidine
  modified_base 70: mod_base = OTHER; note = 2'-O-Methyl-cytidine
  modified_base 71: mod_base = OTHER; note = 2'-O-Methyl-uridine
  modified_base 72: mod_base = OTHER; note = 2'-O-Methyl-uridine
  modified_base 74: mod_base = OTHER; note = 2'-O-Methyl-adenosine
  modified_base 75: mod_base = OTHER; note = 2'-O-Methyl-adenosine
  modified_base 76: mod_base = OTHER; note = 2'-O-Methyl-adenosine
  modified_base 77: mod_base = OTHER; note = 2'-O-Methyl-adenosine
  modified_base 78: mod_base = OTHER; note = 2'-O-Methyl-adenosine
  modified_base 79: mod_base = OTHER; note = 2'-O-Methyl-guanosine
  modified_base 80: mod_base = OTHER; note = 2'-O-Methyl-uridine
  modified_base 82: mod_base = OTHER; note = 2'-O-Methyl-guanosine
  modified_base 83: mod_base = OTHER; note = 2'-O-Methyl-cytidine
  modified_base 84: mod_base = OTHER; note = 2'-O-Methyl-adenosine
  modified_base 85: mod_base = OTHER; note = 2'-O-Methyl-cytidine
  modified_base 86: mod_base = OTHER; note = 2'-O-Methyl-cytidine
  modified_base 87: mod_base = OTHER; note = 2'-O-Methyl-guanosine
  modified_base 89: mod_base = OTHER; note = 2'-O-Methyl-guanosine
  modified_base 92: mod_base = OTHER; note = 2'-O-Methyl-guanosine
  modified_base 93: mod_base = OTHER; note = 2'-O-Methyl-guanosine
  modified_base 94: mod_base = OTHER; note = 2'-O-Methyl-uridine
  modified_base 95: mod_base = OTHER; note = 2'-O-Methyl-guanosine
  modified_base 96: mod_base = OTHER; note = 2'-O-Methyl-cytidine
  modified_base 97: mod_base = OTHER; note = 2'-O-Methyl-uridine phosphorothioate
  modified_base 98: mod_base = OTHER; note = 2'-O-Methyl-uridine phosphorothioate
  modified_base 99: mod_base = OTHER; note = 2'-O-Methyl-uridine phosphorothioate
  modified_base 100: mod_base = OTHER; note = 2'-O-Methyl-uridine

SEQ ID NO: 1739 - RNA, 103 nt, synthetic construct; identical to SEQ ID NO: 1699
  source 1..103: mol_type = other RNA; note = Description of Artificial Sequence: Synthetic polynucleotide
  modified_base 1: mod_base = OTHER; note = 2'-O-Methyl-guanosine phosphorothioate
  modified_base 2: mod_base = OTHER; note = 2'-O-Methyl-adenosine phosphorothioate
  modified_base 3: mod_base = OTHER; note = 2'-O-Methyl-guanosine
  modified_base 21: mod_base = OTHER; note = 2'-O-Methyl-guanosine
  modified_base 25: mod_base = OTHER; note = uridine phosphorothioate
  modified_base 28: mod_base = OTHER; note = 2'-O-Methyl-adenosine
  modified_base 29: mod_base = OTHER; note = 2'-O-Methyl-guanosine
  modified_base 30: mod_base = OTHER; note = 2'-O-Methyl-cytidine
  modified_base 31: mod_base = OTHER; note = 2'-O-Methyl-uridine
  modified_base 32: mod_base = OTHER; note = 2'-O-Methyl-adenosine
  modified_base 34: mod_base = OTHER; note = 2'-O-Methyl-adenosine
  modified_base 35: mod_base = OTHER; note = 2'-O-Methyl-adenosine
  modified_base 36: mod_base = OTHER; note = 2'-O-Methyl-adenosine
  modified_base 37: mod_base = OTHER; note = 2'-O-Methyl-uridine
  modified_base 38: mod_base = OTHER; note = 2'-O-Methyl-adenosine
  modified_base 39: mod_base = OTHER; note = 2'-O-Methyl-guanosine
  modified_base 40: mod_base = OTHER; note = 2'-O-Methyl-cytidine
  modified_base 41: mod_base = OTHER; note = 2'-O-Methyl-adenosine
  modified_base 42: mod_base = OTHER; note = 2'-O-Methyl-adenosine
  modified_base 45: mod_base = OTHER; note = uridine phosphorothioate
  modified_base 46: mod_base = OTHER; note = 2'-O-Methyl-adenosine
  modified_base 48: mod_base = OTHER; note = 2'-O-Methyl-adenosine
  modified_base 50: mod_base = OTHER; note = 2'-O-Methyl-uridine
  modified_base 52: mod_base = OTHER; note = 2'-O-Methyl-adenosine
  modified_base 53: mod_base = OTHER; note = 2'-O-Methyl-guanosine
  modified_base 54: mod_base = OTHER; note = 2'-O-Methyl-guanosine
  modified_base 57: mod_base = OTHER; note = 2'-O-Methyl-adenosine
  modified_base 61: mod_base = OTHER; note = 2'-O-Methyl-cytidine
  modified_base 66: mod_base = OTHER; note = 2'-O-Methyl-uridine
  modified_base 67: mod_base = OTHER; note = 2'-O-Methyl-cytidine
  modified_base 70: mod_base = OTHER; note = 2'-O-Methyl-cytidine
  modified_base 71: mod_base = OTHER; note = 2'-O-Methyl-uridine
  modified_base 72: mod_base = OTHER; note = 2'-O-Methyl-uridine
  modified_base 74: mod_base = OTHER; note = 2'-O-Methyl-adenosine
  modified_base 75: mod_base = OTHER; note = 2'-O-Methyl-adenosine
  modified_base 76: mod_base = OTHER; note = 2'-O-Methyl-adenosine
  modified_base 77: mod_base = OTHER; note = 2'-O-Methyl-adenosine
  modified_base 78: mod_base = OTHER; note = 2'-O-Methyl-adenosine
  modified_base 79: mod_base = OTHER; note = 2'-O-Methyl-guanosine
  modified_base 80: mod_base = OTHER; note = 2'-O-Methyl-uridine
  modified_base 82: mod_base = OTHER; note = 2'-O-Methyl-guanosine
  modified_base 83: mod_base = OTHER; note = 2'-O-Methyl-cytidine
  modified_base 84: mod_base = OTHER; note = 2'-O-Methyl-adenosine
  modified_base 85: mod_base = OTHER; note = 2'-O-Methyl-cytidine
  modified_base 86: mod_base = OTHER; note = 2'-O-Methyl-cytidine
  modified_base 87: mod_base = OTHER; note = 2'-O-Methyl-guanosine
  modified_base 89: mod_base = OTHER; note = 2'-O-Methyl-guanosine
  modified_base 92: mod_base = OTHER; note = 2'-O-Methyl-guanosine
  modified_base 93: mod_base = OTHER; note = 2'-O-Methyl-guanosine
  modified_base 94: mod_base = OTHER; note = 2'-O-Methyl-uridine
  modified_base 95: mod_base = OTHER; note = 2'-O-Methyl-guanosine
  modified_base 96: mod_base = OTHER; note = 2'-O-Methyl-cytidine
  modified_base 97: mod_base = OTHER; note = 2'-O-Methyl-uridine phosphorothioate
  modified_base 98: mod_base = OTHER; note = 2'-O-Methyl-uridine phosphorothioate
  modified_base 99: mod_base = OTHER; note = 2'-O-Methyl-uridine phosphorothioate
  modified_base 100: mod_base = OTHER; note = 2'-O-Methyl-uridine

SEQ ID NO: 1740 - RNA, 103 nt, synthetic construct; identical to SEQ ID NO: 1700
  source 1..103: mol_type = other RNA; note = Description of Artificial Sequence: Synthetic polynucleotide
  modified_base 1: mod_base = OTHER; note = 2'-O-Methyl-cytidine phosphorothioate
  modified_base 2: mod_base = OTHER; note = 2'-O-Methyl-adenosine phosphorothioate
  modified_base 3: mod_base = OTHER; note = 2'-O-Methyl-guanosine
  modified_base 21: mod_base = OTHER; note = 2'-O-Methyl-guanosine
  modified_base 25: mod_base = OTHER; note = uridine phosphorothioate
  modified_base 28: mod_base = OTHER; note = 2'-O-Methyl-adenosine
  modified_base 29: mod_base = OTHER; note = 2'-O-Methyl-guanosine
  modified_base 30: mod_base = OTHER; note = 2'-O-Methyl-cytidine
  modified_base 31: mod_base = OTHER; note = 2'-O-Methyl-uridine
  modified_base 32: mod_base = OTHER; note = 2'-O-Methyl-adenosine
  modified_base 34: mod_base = OTHER; note = 2'-O-Methyl-adenosine
  modified_base 35: mod_base = OTHER; note = 2'-O-Methyl-adenosine
  modified_base 36: mod_base = OTHER; note = 2'-O-Methyl-adenosine
  modified_base 37: mod_base = OTHER; note = 2'-O-Methyl-uridine
  modified_base 38: mod_base = OTHER; note = 2'-O-Methyl-adenosine
  modified_base 39: mod_base = OTHER; note = 2'-O-Methyl-guanosine
  modified_base 40: mod_base = OTHER; note = 2'-O-Methyl-cytidine
  modified_base 41: mod_base = OTHER; note = 2'-O-Methyl-adenosine
  modified_base 42: mod_base = OTHER; note = 2'-O-Methyl-adenosine
  modified_base 45: mod_base = OTHER; note = uridine phosphorothioate
  modified_base 46: mod_base = OTHER; note = 2'-O-Methyl-adenosine
  modified_base 48: mod_base = OTHER; note = 2'-O-Methyl-adenosine
  modified_base 50: mod_base = OTHER; note = 2'-O-Methyl-uridine
  modified_base 52: mod_base = OTHER; note = 2'-O-Methyl-adenosine
  modified_base 53: mod_base = OTHER; note = 2'-O-Methyl-guanosine
  modified_base 54: mod_base = OTHER; note = 2'-O-Methyl-guanosine
  modified_base 55: mod_base = OTHER; note = 2'-O-Methyl-cytidine
  modified_base 56: mod_base = OTHER; note = 2'-O-Methyl-uridine
  modified_base 57: mod_base = OTHER; note = 2'-O-Methyl-adenosine
  modified_base 60: mod_base = OTHER; note = 2'-O-Methyl-cytidine
  modified_base 61: mod_base = OTHER; note = 2'-O-Methyl-cytidine
  modified_base 66: mod_base = OTHER; note = 2'-O-Methyl-uridine
  modified_base 67: mod_base = OTHER; note = 2'-O-Methyl-cytidine
  modified_base 70: mod_base = OTHER; note = 2'-O-Methyl-cytidine
  modified_base 71: mod_base = OTHER; note = 2'-O-Methyl-uridine
  modified_base 72: mod_base = OTHER; note = 2'-O-Methyl-uridine
  modified_base 74: mod_base = OTHER; note = 2'-O-Methyl-adenosine
  modified_base 75: mod_base = OTHER; note = 2'-O-Methyl-adenosine
  modified_base 76: mod_base = OTHER; note = 2'-O-Methyl-adenosine
  modified_base 77: mod_base = OTHER; note = 2'-O-Methyl-adenosine
  modified_base 78: mod_base = OTHER; note = 2'-O-Methyl-adenosine
  modified_base 79: mod_base = OTHER; note = 2'-O-Methyl-guanosine
  modified_base 80: mod_base = OTHER; note = 2'-O-Methyl-uridine
  modified_base 81: mod_base = OTHER; note = 2'-O-Methyl-guanosine
  modified_base 83: mod_base = OTHER; note = 2'-O-Methyl-cytidine
  modified_base 84: mod_base = OTHER; note = 2'-O-Methyl-adenosine
  modified_base 85: mod_base = OTHER; note = 2'-O-Methyl-cytidine
  modified_base 86: mod_base = OTHER; note = 2'-O-Methyl-cytidine
  modified_base 87: mod_base = OTHER; note = 2'-O-Methyl-guanosine
  modified_base 88: mod_base = OTHER; note = 2'-O-Methyl-adenosine
  modified_base 89: mod_base = OTHER; note = 2'-O-Methyl-guanosine
  modified_base 90: mod_base = OTHER; note = 2'-O-Methyl-uridine
  modified_base 91: mod_base = OTHER; note = 2'-O-Methyl-cytidine
  modified_base 92: mod_base = OTHER; note = 2'-O-Methyl-guanosine
  modified_base 93: mod_base = OTHER; note = 2'-O-Methyl-guanosine
  modified_base 94: mod_base = OTHER; note = 2'-O-Methyl-uridine
  modified_base 95: mod_base = OTHER; note = 2'-O-Methyl-guanosine
  modified_base 96: mod_base = OTHER; note = 2'-O-Methyl-cytidine
  modified_base 97: mod_base = OTHER; note = 2'-O-Methyl-uridine phosphorothioate
  modified_base 98: mod_base = OTHER; note = 2'-O-Methyl-uridine phosphorothioate
  modified_base 99: mod_base = OTHER; note = 2'-O-Methyl-uridine phosphorothioate
  modified_base 100: mod_base = OTHER; note = 2'-O-Methyl-uridine

SEQ ID NO: 1741 - RNA, 103 nt, synthetic construct; identical to SEQ ID NO: 1643
  source 1..103: mol_type = other RNA; note = Description of Artificial Sequence: Synthetic polynucleotide
  modified_base 1: mod_base = OTHER; note = 2'-O-Methyl-cytidine phosphorothioate
  modified_base 2: mod_base = OTHER; note = 2'-O-Methyl-cytidine phosphorothioate
  modified_base 3: mod_base = OTHER; note = 2'-O-Methyl-cytidine
  modified_base 21: mod_base = OTHER; note = 2'-O-Methyl-guanosine
  modified_base 25: mod_base = OTHER; note = uridine phosphorothioate
  modified_base 28: mod_base = OTHER; note = 2'-O-Methyl-adenosine
  modified_base 29: mod_base = OTHER; note = 2'-O-Methyl-guanosine
  modified_base 30: mod_base = OTHER; note = 2'-O-Methyl-cytidine
  modified_base 31: mod_base = OTHER; note = 2'-O-Methyl-uridine
  modified_base 32: mod_base = OTHER; note = 2'-O-Methyl-adenosine
  modified_base 34: mod_base = OTHER; note = 2'-O-Methyl-adenosine
  modified_base 35: mod_base = OTHER; note = 2'-O-Methyl-adenosine
  modified_base 36: mod_base = OTHER; note = 2'-O-Methyl-adenosine
  modified_base 37: mod_base = OTHER; note = 2'-O-Methyl-uridine
  modified_base 38: mod_base = OTHER; note = 2'-O-Methyl-adenosine
  modified_base 39: mod_base = OTHER; note = 2'-O-Methyl-guanosine
  modified_base 40: mod_base = OTHER; note = 2'-O-Methyl-cytidine
  modified_base 41: mod_base = OTHER; note = 2'-O-Methyl-adenosine
  modified_base 42: mod_base = OTHER; note = 2'-O-Methyl-adenosine
  modified_base 46: mod_base = OTHER; note = 2'-O-Methyl-adenosine
  modified_base 48: mod_base = OTHER; note = 2'-O-Methyl-adenosine
  modified_base 50: mod_base = OTHER; note = 2'-O-Methyl-uridine
  modified_base 52: mod_base = OTHER; note = 2'-O-Methyl-adenosine
  modified_base 53: mod_base = OTHER; note = 2'-O-Methyl-guanosine
  modified_base 54: mod_base = OTHER; note = 2'-O-Methyl-guanosine
  modified_base 57: mod_base = OTHER; note = 2'-O-Methyl-adenosine
  modified_base 61: mod_base = OTHER; note = 2'-O-Methyl-cytidine
  modified_base 64: mod_base = OTHER; note = uridine phosphorothioate
  modified_base 66: mod_base = OTHER; note = 2'-O-Methyl-uridine
  modified_base 67: mod_base = OTHER; note = 2'-O-Methyl-cytidine
  modified_base 70: mod_base = OTHER; note = 2'-O-Methyl-cytidine
  modified_base 71: mod_base = OTHER; note = 2'-O-Methyl-uridine
  modified_base 72: mod_base = OTHER; note = 2'-O-Methyl-uridine
  modified_base 74: mod_base = OTHER; note = 2'-O-Methyl-adenosine
  modified_base 75: mod_base = OTHER; note = 2'-O-Methyl-adenosine
  modified_base 76: mod_base = OTHER; note = 2'-O-Methyl-adenosine
  modified_base 77: mod_base = OTHER; note = 2'-O-Methyl-adenosine
  modified_base 78: mod_base = OTHER; note = 2'-O-Methyl-adenosine
  modified_base 79: mod_base = OTHER; note = 2'-O-Methyl-guanosine
  modified_base 80: mod_base = OTHER; note = 2'-O-Methyl-uridine
  modified_base 82: mod_base = OTHER; note = 2'-O-Methyl-guanosine
  modified_base 83: mod_base = OTHER; note = 2'-O-Methyl-cytidine
  modified_base 84: mod_base = OTHER; note = 2'-O-Methyl-adenosine
  modified_base 85: mod_base = OTHER; note = 2'-O-Methyl-cytidine
  modified_base 86: mod_base = OTHER; note = 2'-O-Methyl-cytidine
  modified_base 87: mod_base = OTHER; note = 2'-O-Methyl-guanosine
  modified_base 89: mod_base = OTHER; note = 2'-O-Methyl-guanosine
  modified_base 92: mod_base = OTHER; note = 2'-O-Methyl-guanosine
  modified_base 93: mod_base = OTHER; note = 2'-O-Methyl-guanosine
  modified_base 94: mod_base = OTHER; note = 2'-O-Methyl-uridine
  modified_base 95: mod_base = OTHER; note = 2'-O-Methyl-guanosine
  modified_base 96: mod_base = OTHER; note = 2'-O-Methyl-cytidine
  modified_base 97: mod_base = OTHER; note = 2'-O-Methyl-uridine phosphorothioate
  modified_base 98: mod_base = OTHER; note = 2'-O-Methyl-uridine phosphorothioate
  modified_base 99: mod_base = OTHER; note = 2'-O-Methyl-uridine phosphorothioate
  modified_base 100: mod_base = OTHER; note = 2'-O-Methyl-uridine

SEQ ID NO: 1742 - RNA, 103 nt, synthetic construct; identical to SEQ ID NO: 1699
  source 1..103: mol_type = other RNA; note = Description of Artificial Sequence: Synthetic polynucleotide
  modified_base 1: mod_base = OTHER; note = 2'-O-Methyl-guanosine phosphorothioate
  modified_base 2: mod_base = OTHER; note = 2'-O-Methyl-adenosine phosphorothioate
  modified_base 3: mod_base = OTHER; note = 2'-O-Methyl-guanosine
  modified_base 21: mod_base = OTHER; note = 2'-O-Methyl-guanosine
  modified_base 25: mod_base = OTHER; note = uridine phosphorothioate
  modified_base 28: mod_base = OTHER; note = 2'-O-Methyl-adenosine
  modified_base 29: mod_base = OTHER; note = 2'-O-Methyl-guanosine
  modified_base 30: mod_base = OTHER; note = 2'-O-Methyl-cytidine
  modified_base 31: mod_base = OTHER; note = 2'-O-Methyl-uridine
  modified_base 32: mod_base = OTHER; note = 2'-O-Methyl-adenosine
  modified_base 34: mod_base = OTHER; note = 2'-O-Methyl-adenosine
  modified_base 35: mod_base = OTHER; note = 2'-O-Methyl-adenosine
  modified_base 36: mod_base = OTHER; note = 2'-O-Methyl-adenosine
  modified_base 37: mod_base = OTHER; note = 2'-O-Methyl-uridine
  modified_base 38: mod_base = OTHER; note = 2'-O-Methyl-adenosine
  modified_base 39: mod_base = OTHER; note = 2'-O-Methyl-guanosine
  modified_base 40: mod_base = OTHER; note = 2'-O-Methyl-cytidine
  modified_base 41: mod_base = OTHER; note = 2'-O-Methyl-adenosine
  modified_base 42: mod_base = OTHER; note = 2'-O-Methyl-adenosine
  modified_base 46: mod_base = OTHER; note = 2'-O-Methyl-adenosine
  modified_base 48: mod_base = OTHER; note = 2'-O-Methyl-adenosine
  modified_base 50: mod_base = OTHER; note = 2'-O-Methyl-uridine
  modified_base 52: mod_base = OTHER; note = 2'-O-Methyl-adenosine
  modified_base 53: mod_base = OTHER; note = 2'-O-Methyl-guanosine
  modified_base 54: mod_base = OTHER; note = 2'-O-Methyl-guanosine
  modified_base 57: mod_base = OTHER; note = 2'-O-Methyl-adenosine
  modified_base 61: mod_base = OTHER; note = 2'-O-Methyl-cytidine
  modified_base 64: mod_base = OTHER; note = uridine phosphorothioate
  modified_base 66: mod_base = OTHER; note = 2'-O-Methyl-uridine
  modified_base 67: mod_base = OTHER; note = 2'-O-Methyl-cytidine
  modified_base 70: mod_base = OTHER; note = 2'-O-Methyl-cytidine
  modified_base 71: mod_base = OTHER; note = 2'-O-Methyl-uridine
  modified_base 72: mod_base = OTHER; note = 2'-O-Methyl-uridine
  modified_base 74: mod_base = OTHER; note = 2'-O-Methyl-adenosine
  modified_base 75: mod_base = OTHER; note = 2'-O-Methyl-adenosine
  modified_base 76: mod_base = OTHER; note = 2'-O-Methyl-adenosine
  modified_base 77: mod_base = OTHER; note = 2'-O-Methyl-adenosine
  modified_base 78: mod_base = OTHER; note = 2'-O-Methyl-adenosine
  modified_base 79: mod_base = OTHER; note = 2'-O-Methyl-guanosine
  modified_base 80: mod_base = OTHER; note = 2'-O-Methyl-uridine
  modified_base 82: mod_base = OTHER; note = 2'-O-Methyl-guanosine
  modified_base 83: mod_base = OTHER; note = 2'-O-Methyl-cytidine
  modified_base 84: mod_base = OTHER; note = 2'-O-Methyl-adenosine
  modified_base 85: mod_base = OTHER; note = 2'-O-Methyl-cytidine
  modified_base 86: mod_base = OTHER; note = 2'-O-Methyl-cytidine
  modified_base 87: mod_base = OTHER; note = 2'-O-Methyl-guanosine
  modified_base 89: mod_base = OTHER; note = 2'-O-Methyl-guanosine
  modified_base 92: mod_base = OTHER; note = 2'-O-Methyl-guanosine
  modified_base 93: mod_base = OTHER; note = 2'-O-Methyl-guanosine
  modified_base 94: mod_base = OTHER; note = 2'-O-Methyl-uridine
  modified_base 95: mod_base = OTHER; note = 2'-O-Methyl-guanosine
  modified_base 96: mod_base = OTHER; note = 2'-O-Methyl-cytidine
  modified_base 97: mod_base = OTHER; note = 2'-O-Methyl-uridine phosphorothioate
  modified_base 98: mod_base = OTHER; note = 2'-O-Methyl-uridine phosphorothioate
  modified_base 99: mod_base = OTHER; note = 2'-O-Methyl-uridine phosphorothioate
  modified_base 100: mod_base = OTHER; note = 2'-O-Methyl-uridine

SEQ ID NO: 1743 - RNA, 103 nt, synthetic construct; identical to SEQ ID NO: 1700
  source 1..103: mol_type = other RNA; note = Description of Artificial Sequence: Synthetic polynucleotide
  modified_base 1: mod_base = OTHER; note = 2'-O-Methyl-cytidine phosphorothioate
  modified_base 2: mod_base = OTHER; note = 2'-O-Methyl-adenosine phosphorothioate
  modified_base 3: mod_base = OTHER; note = 2'-O-Methyl-guanosine
  modified_base 21: mod_base = OTHER; note = 2'-O-Methyl-guanosine
  modified_base 25: mod_base = OTHER; note = uridine phosphorothioate
  modified_base 28: mod_base = OTHER; note = 2'-O-Methyl-adenosine
  modified_base 29: mod_base = OTHER; note = 2'-O-Methyl-guanosine
  modified_base 30: mod_base = OTHER; note = 2'-O-Methyl-cytidine
  modified_base 31: mod_base = OTHER; note = 2'-O-Methyl-uridine
  modified_base 32: mod_base = OTHER; note = 2'-O-Methyl-adenosine
  modified_base 34: mod_base = OTHER; note = 2'-O-Methyl-adenosine
  modified_base 35: mod_base = OTHER; note = 2'-O-Methyl-adenosine
  modified_base 36: mod_base = OTHER; note = 2'-O-Methyl-adenosine
  modified_base 37: mod_base = OTHER; note = 2'-O-Methyl-uridine
  modified_base 38: mod_base = OTHER; note = 2'-O-Methyl-adenosine
  modified_base 39: mod_base = OTHER; note = 2'-O-Methyl-guanosine
  modified_base 40: mod_base = OTHER; note = 2'-O-Methyl-cytidine
  modified_base 41: mod_base = OTHER; note = 2'-O-Methyl-adenosine
  modified_base 42: mod_base = OTHER; note = 2'-O-Methyl-adenosine
  modified_base 46: mod_base = OTHER; note = 2'-O-Methyl-adenosine
  modified_base 48: mod_base = OTHER; note = 2'-O-Methyl-adenosine
  modified_base 50: mod_base = OTHER; note = 2'-O-Methyl-uridine
  modified_base 52: mod_base = OTHER; note = 2'-O-Methyl-adenosine
  modified_base 53: mod_base = OTHER; note = 2'-O-Methyl-guanosine
  modified_base 54: mod_base = OTHER; note = 2'-O-Methyl-guanosine
  modified_base 55: mod_base = OTHER; note = 2'-O-Methyl-cytidine
  modified_base 56: mod_base = OTHER; note = 2'-O-Methyl-uridine
  modified_base 57: mod_base = OTHER; note = 2'-O-Methyl-adenosine
  modified_base 60: mod_base = OTHER; note = 2'-O-Methyl-cytidine
  modified_base 61: mod_base = OTHER; note = 2'-O-Methyl-cytidine
  modified_base 64: mod_base = OTHER; note = uridine phosphorothioate
  modified_base 66: mod_base = OTHER; note = 2'-O-Methyl-uridine
  modified_base 67: mod_base = OTHER; note = 2'-O-Methyl-cytidine
  modified_base 70: mod_base = OTHER; note = 2'-O-Methyl-cytidine
  modified_base 71: mod_base = OTHER; note = 2'-O-Methyl-uridine
  modified_base 72: mod_base = OTHER; note = 2'-O-Methyl-uridine
  modified_base 74: mod_base = OTHER; note = 2'-O-Methyl-adenosine
  modified_base 75: mod_base = OTHER; note = 2'-O-Methyl-adenosine
  modified_base 76: mod_base = OTHER; note = 2'-O-Methyl-adenosine
  modified_base 77: mod_base = OTHER; note = 2'-O-Methyl-adenosine
  modified_base 78: mod_base = OTHER; note = 2'-O-Methyl-adenosine
  modified_base 79: mod_base = OTHER; note = 2'-O-Methyl-guanosine
  modified_base 80: mod_base = OTHER; note = 2'-O-Methyl-uridine
  modified_base 81: mod_base = OTHER; note = 2'-O-Methyl-guanosine
  modified_base 83: mod_base = OTHER; note = 2'-O-Methyl-cytidine
  modified_base 84: mod_base = OTHER; note = 2'-O-Methyl-adenosine
  modified_base 85: mod_base = OTHER; note = 2'-O-Methyl-cytidine
  modified_base 86: mod_base = OTHER; note = 2'-O-Methyl-cytidine
  modified_base 87: mod_base = OTHER; note = 2'-O-Methyl-guanosine
  modified_base 88: mod_base = OTHER; note = 2'-O-Methyl-adenosine
  modified_base 89: mod_base = OTHER; note = 2'-O-Methyl-guanosine
  modified_base 90: mod_base = OTHER; note = 2'-O-Methyl-uridine
  modified_base 91: mod_base = OTHER; note = 2'-O-Methyl-cytidine
  modified_base 92: mod_base = OTHER; note = 2'-O-Methyl-guanosine
  modified_base 93: mod_base = OTHER; note = 2'-O-Methyl-guanosine
  modified_base 94: mod_base = OTHER; note = 2'-O-Methyl-uridine
  modified_base 95: mod_base = OTHER; note = 2'-O-Methyl-guanosine
  modified_base 96: mod_base = OTHER; note = 2'-O-Methyl-cytidine
  modified_base 97: mod_base = OTHER; note = 2'-O-Methyl-uridine phosphorothioate
  modified_base 98: mod_base = OTHER; note = 2'-O-Methyl-uridine phosphorothioate
  modified_base 99: mod_base = OTHER; note = 2'-O-Methyl-uridine phosphorothioate
  modified_base 100: mod_base = OTHER; note = 2'-O-Methyl-uridine

SEQ ID NO: 1744 - RNA, 103 nt, synthetic construct; identical to SEQ ID NO: 1643
  source 1..103: mol_type = other RNA; note = Description of Artificial Sequence: Synthetic polynucleotide
  modified_base 1: mod_base = OTHER; note = 2'-O-Methyl-cytidine phosphorothioate
  modified_base 2: mod_base = OTHER; note = 2'-O-Methyl-cytidine phosphorothioate
  modified_base 3: mod_base = OTHER; note = 2'-O-Methyl-cytidine
  modified_base 21: mod_base = OTHER; note = 2'-O-Methyl-guanosine
  modified_base 25: mod_base = OTHER; note = uridine phosphorothioate
  modified_base 28: mod_base = OTHER; note = 2'-O-Methyl-adenosine
  modified_base 29: mod_base = OTHER; note = 2'-O-Methyl-guanosine
  modified_base 30: mod_base = OTHER; note = 2'-O-Methyl-cytidine
  modified_base 31: mod_base = OTHER; note = 2'-O-Methyl-uridine
  modified_base 32: mod_base = OTHER; note = 2'-O-Methyl-adenosine
  modified_base 34: mod_base = OTHER; note = 2'-O-Methyl-adenosine
  modified_base 35: mod_base = OTHER; note = 2'-O-Methyl-adenosine
  modified_base 36: mod_base = OTHER; note = 2'-O-Methyl-adenosine
  modified_base 37: mod_base = OTHER; note = 2'-O-Methyl-uridine
  modified_base 38: mod_base = OTHER; note = 2'-O-Methyl-adenosine
  modified_base 39: mod_base = OTHER; note = 2'-O-Methyl-guanosine
  modified_base 40: mod_base = OTHER; note = 2'-O-Methyl-cytidine
  modified_base 41: mod_base = OTHER; note = 2'-O-Methyl-adenosine
  modified_base 42: mod_base = OTHER; note = 2'-O-Methyl-adenosine
  modified_base 45: mod_base = OTHER; note = uridine phosphorothioate
  modified_base 46: mod_base = OTHER; note = 2'-O-Methyl-adenosine
  modified_base 48: mod_base = OTHER; note = 2'-O-Methyl-adenosine
  modified_base 50: mod_base = OTHER; note = 2'-O-Methyl-uridine
  modified_base 52: mod_base = OTHER; note = 2'-O-Methyl-adenosine
  modified_base 53: mod_base = OTHER; note = 2'-O-Methyl-guanosine
  modified_base 54: mod_base = OTHER; note = 2'-O-Methyl-guanosine
  modified_base 57: mod_base = OTHER; note = 2'-O-Methyl-adenosine
  modified_base 61: mod_base = OTHER; note = 2'-O-Methyl-cytidine
  modified_base 64: mod_base = OTHER; note = uridine phosphorothioate
  modified_base 66: mod_base = OTHER; note = 2'-O-Methyl-uridine
  modified_base 67: mod_base = OTHER; note = 2'-O-Methyl-cytidine
  modified_base 70: mod_base = OTHER; note = 2'-O-Methyl-cytidine
  modified_base 71: mod_base = OTHER; note = 2'-O-Methyl-uridine
  modified_base 72: mod_base = OTHER; note = 2'-O-Methyl-uridine
  modified_base 74: mod_base = OTHER; note = 2'-O-Methyl-adenosine
  modified_base 75: mod_base = OTHER; note = 2'-O-Methyl-adenosine
  modified_base 76: mod_base = OTHER; note = 2'-O-Methyl-adenosine
  modified_base 77: mod_base = OTHER; note = 2'-O-Methyl-adenosine
  modified_base 78: mod_base = OTHER; note = 2'-O-Methyl-adenosine
  modified_base 79: mod_base = OTHER; note = 2'-O-Methyl-guanosine
  modified_base 80: mod_base = OTHER; note = 2'-O-Methyl-uridine
  modified_base 82: mod_base = OTHER; note = 2'-O-Methyl-guanosine
  modified_base 83: mod_base = OTHER; note = 2'-O-Methyl-cytidine
  modified_base 84: mod_base = OTHER; note = 2'-O-Methyl-adenosine
  modified_base 85: mod_base = OTHER; note = 2'-O-Methyl-cytidine
  modified_base 86: mod_base = OTHER; note = 2'-O-Methyl-cytidine
  modified_base 87: mod_base = OTHER; note = 2'-O-Methyl-guanosine
  modified_base 89: mod_base = OTHER; note = 2'-O-Methyl-guanosine
  modified_base 92: mod_base = OTHER; note = 2'-O-Methyl-guanosine
  modified_base 93: mod_base = OTHER; note = 2'-O-Methyl-guanosine
  modified_base 94: mod_base = OTHER; note = 2'-O-Methyl-uridine
  modified_base 95: mod_base = OTHER; note = 2'-O-Methyl-guanosine
  modified_base 96: mod_base = OTHER; note = 2'-O-Methyl-cytidine
  modified_base 97: mod_base = OTHER; note = 2'-O-Methyl-uridine phosphorothioate
  modified_base 98: mod_base = OTHER; note = 2'-O-Methyl-uridine phosphorothioate
  modified_base 99: mod_base = OTHER; note = 2'-O-Methyl-uridine phosphorothioate
  modified_base 100: mod_base = OTHER; note = 2'-O-Methyl-uridine

SEQ ID NO: 1745 - RNA, 103 nt, synthetic construct; identical to SEQ ID NO: 1699
  source 1..103: mol_type = other RNA; note = Description of Artificial Sequence: Synthetic polynucleotide
  modified_base 1: mod_base = OTHER; note = 2'-O-Methyl-guanosine phosphorothioate
  modified_base 2: mod_base = OTHER; note = 2'-O-Methyl-adenosine phosphorothioate
  modified_base 3: mod_base = OTHER; note = 2'-O-Methyl-guanosine
  modified_base 21: mod_base = OTHER; note = 2'-O-Methyl-guanosine
  modified_base 25: mod_base = OTHER; note = uridine phosphorothioate
  modified_base 28: mod_base = OTHER; note = 2'-O-Methyl-adenosine
  modified_base 29: mod_base = OTHER; note = 2'-O-Methyl-guanosine
  modified_base 30: mod_base = OTHER; note = 2'-O-Methyl-cytidine
  modified_base 31: mod_base = OTHER; note = 2'-O-Methyl-uridine
  modified_base 32: mod_base = OTHER; note = 2'-O-Methyl-adenosine
  modified_base 34: mod_base = OTHER; note = 2'-O-Methyl-adenosine
  modified_base 35: mod_base = OTHER; note = 2'-O-Methyl-adenosine
  modified_base 36: mod_base = OTHER; note = 2'-O-Methyl-adenosine
  modified_base 37: mod_base = OTHER; note = 2'-O-Methyl-uridine
  modified_base 38: mod_base = OTHER; note = 2'-O-Methyl-adenosine
  modified_base 39: mod_base = OTHER; note = 2'-O-Methyl-guanosine
  modified_base 40: mod_base = OTHER; note = 2'-O-Methyl-cytidine
  modified_base 41: mod_base = OTHER; note = 2'-O-Methyl-adenosine
  modified_base 42: mod_base = OTHER; note = 2'-O-Methyl-adenosine
  modified_base 45: mod_base = OTHER; note = uridine phosphorothioate
  modified_base 46: mod_base = OTHER; note = 2'-O-Methyl-adenosine
  modified_base 48: mod_base = OTHER; note = 2'-O-Methyl-adenosine
  modified_base 50: mod_base = OTHER; note = 2'-O-Methyl-uridine
  modified_base 52: mod_base = OTHER; note = 2'-O-Methyl-adenosine
  modified_base 53: mod_base = OTHER; note = 2'-O-Methyl-guanosine
  modified_base 54: mod_base = OTHER; note = 2'-O-Methyl-guanosine
  modified_base 57: mod_base = OTHER; note = 2'-O-Methyl-adenosine
  modified_base 61: mod_base = OTHER; note = 2'-O-Methyl-cytidine
  modified_base 64: mod_base = OTHER; note = uridine phosphorothioate
  modified_base 66: mod_base = OTHER; note = 2'-O-Methyl-uridine
  modified_base 67: mod_base = OTHER; note = 2'-O-Methyl-cytidine
  modified_base 70: mod_base = OTHER; note = 2'-O-Methyl-cytidine
  modified_base 71: mod_base = OTHER; note = 2'-O-Methyl-uridine
  modified_base 72: mod_base = OTHER; note = 2'-O-Methyl-uridine
  modified_base 74: mod_base = OTHER; note = 2'-O-Methyl-adenosine
  modified_base 75: mod_base = OTHER; note = 2'-O-Methyl-adenosine
  modified_base 76: mod_base = OTHER; note = 2'-O-Methyl-adenosine
  modified_base 77: mod_base = OTHER; note = 2'-O-Methyl-adenosine
  modified_base 78: mod_base = OTHER; note = 2'-O-Methyl-adenosine
  modified_base 79: mod_base = OTHER; note = 2'-O-Methyl-guanosine
  modified_base 80: mod_base = OTHER; note = 2'-O-Methyl-uridine
  modified_base 82: mod_base = OTHER; note = 2'-O-Methyl-guanosine
  modified_base 83: mod_base = OTHER; note = 2'-O-Methyl-cytidine
  modified_base 84: mod_base = OTHER; note = 2'-O-Methyl-adenosine
  modified_base 85: mod_base = OTHER; note = 2'-O-Methyl-cytidine
  modified_base 86: mod_base = OTHER; note = 2'-O-Methyl-cytidine
  modified_base 87: mod_base = OTHER; note = 2'-O-Methyl-guanosine
  modified_base 89: mod_base = OTHER; note = 2'-O-Methyl-guanosine
  modified_base 92: mod_base = OTHER; note = 2'-O-Methyl-guanosine
  modified_base 93: mod_base = OTHER; note = 2'-O-Methyl-guanosine
  modified_base 94: mod_base = OTHER; note = 2'-O-Methyl-uridine
  modified_base 95: mod_base = OTHER; note = 2'-O-Methyl-guanosine
  modified_base 96: mod_base = OTHER; note = 2'-O-Methyl-cytidine
  modified_base 97: mod_base = OTHER; note = 2'-O-Methyl-uridine phosphorothioate
  modified_base 98: mod_base = OTHER; note = 2'-O-Methyl-uridine phosphorothioate
  modified_base 99: mod_base = OTHER; note = 2'-O-Methyl-uridine phosphorothioate
  modified_base 100: mod_base = OTHER; note = 2'-O-Methyl-uridine

SEQ ID NO: 1746 - RNA, 102 nt, synthetic construct
  source 1..102: mol_type = other RNA; note = Description of Artificial Sequence: Synthetic polynucleotide
  modified_base 1: mod_base = OTHER; note = 2'-O-Methyl-guanosine phosphorothioate
  modified_base 2: mod_base = OTHER; note = 2'-O-Methyl-adenosine phosphorothioate
  modified_base 20: mod_base = OTHER; note = 2'-O-Methyl-guanosine
  modified_base 24: mod_base = OTHER; note = uridine phosphorothioate
  modified_base 27: mod_base = OTHER; note = 2'-O-Methyl-adenosine
  modified_base 28: mod_base = OTHER; note = 2'-O-Methyl-guanosine
  modified_base 29: mod_base = OTHER; note = 2'-O-Methyl-cytidine
  modified_base 30: mod_base = OTHER; note = 2'-O-Methyl-uridine
  modified_base 31: mod_base = OTHER; note = 2'-O-Methyl-adenosine
  modified_base 32: mod_base = OTHER; note = 2'-O-Methyl-guanosine
  modified_base 33: mod_base = OTHER; note = 2'-O-Methyl-adenosine
  modified_base 34: mod_base = OTHER; note = 2'-O-Methyl-adenosine
  modified_base 35: mod_base = OTHER; note = 2'-O-Methyl-adenosine
  modified_base 36: mod_base = OTHER; note = 2'-O-Methyl-uridine
  modified_base 37: mod_base = OTHER; note = 2'-O-Methyl-adenosine
  modified_base 38: mod_base = OTHER; note = 2'-O-Methyl-guanosine
  modified_base 39: mod_base = OTHER; note = 2'-O-Methyl-cytidine
  modified_base 40: mod_base = OTHER; note = 2'-O-Methyl-adenosine
  modified_base 41: mod_base = OTHER; note = 2'-O-Methyl-adenosine
  modified_base 44: mod_base = OTHER; note = uridine phosphorothioate
  modified_base 45: mod_base = OTHER; note = 2'-O-Methyl-adenosine
  modified_base 47: mod_base = OTHER; note = 2'-O-Methyl-adenosine
  modified_base 49: mod_base = OTHER; note = 2'-O-Methyl-uridine
  modified_base 51: mod_base = OTHER; note = 2'-O-Methyl-adenosine
  modified_base 52: mod_base = OTHER; note = 2'-O-Methyl-guanosine
  modified_base 53: mod_base = OTHER; note = 2'-O-Methyl-guanosine
  modified_base 54: mod_base = OTHER; note = 2'-O-Methyl-cytidine
  modified_base 55: mod_base = OTHER; note = 2'-O-Methyl-uridine
  modified_base 56: mod_base = OTHER; note = 2'-O-Methyl-adenosine
  modified_base 59: mod_base = OTHER; note = 2'-O-Methyl-cytidine
  modified_base 60: mod_base = OTHER; note = 2'-O-Methyl-cytidine
  modified_base 63: mod_base = OTHER; note = uridine phosphorothioate
  modified_base 65: mod_base = OTHER; note = 2'-O-Methyl-uridine
  modified_base 66: mod_base = OTHER; note = 2'-O-Methyl-cytidine
  modified_base 69: mod_base = OTHER; note = 2'-O-Methyl-cytidine
  modified_base 70: mod_base = OTHER; note = 2'-O-Methyl-uridine
  modified_base 71: mod_base = OTHER; note = 2'-O-Methyl-uridine
  modified_base 72: mod_base = OTHER; note = 2'-O-Methyl-guanosine
  modified_base 73: mod_base = OTHER; note = 2'-O-Methyl-adenosine
  modified_base 74: mod_base = OTHER; note = 2'-O-Methyl-adenosine
  modified_base 75: mod_base = OTHER; note = 2'-O-Methyl-adenosine
  modified_base 76: mod_base = OTHER; note = 2'-O-Methyl-adenosine
  modified_base 77: mod_base = OTHER; note = 2'-O-Methyl-adenosine
  modified_base 78: mod_base = OTHER; note = 2'-O-Methyl-guanosine
  modified_base 79: mod_base = OTHER; note = 2'-O-Methyl-uridine
  modified_base 80: mod_base = OTHER; note = 2'-O-Methyl-guanosine
  modified_base 82: mod_base = OTHER; note = 2'-O-Methyl-cytidine
  modified_base 83: mod_base = OTHER; note = 2'-O-Methyl-adenosine
  modified_base 84: mod_base = OTHER; note = 2'-O-Methyl-cytidine
  modified_base 85: mod_base = OTHER; note = 2'-O-Methyl-cytidine
  modified_base 86: mod_base = OTHER; note = 2'-O-Methyl-guanosine
  modified_base 87: mod_base = OTHER; note = 2'-O-Methyl-adenosine
  modified_base 88: mod_base = OTHER; note = 2'-O-Methyl-guanosine
  modified_base 89: mod_base = OTHER; note = 2'-O-Methyl-uridine
  modified_base 90: mod_base = OTHER; note = 2'-O-Methyl-cytidine
  modified_base 91: mod_base = OTHER; note = 2'-O-Methyl-guanosine
  modified_base 92: mod_base = OTHER; note = 2'-O-Methyl-guanosine
  modified_base 93: mod_base = OTHER; note = 2'-O-Methyl-uridine
  modified_base 94: mod_base = OTHER; note = 2'-O-Methyl-guanosine
  modified_base 95: mod_base = OTHER; note = 2'-O-Methyl-cytidine
  modified_base 96: mod_base = OTHER; note = 2'-O-Methyl-uridine phosphorothioate
  modified_base 97: mod_base = OTHER; note = 2'-O-Methyl-uridine phosphorothioate
  modified_base 98: mod_base = OTHER; note = 2'-O-Methyl-uridine phosphorothioate
  modified_base 99: mod_base = OTHER; note = 2'-O-Methyl-uridine
gaatacctgagtaactttcgttttagagctagaaatagcaagttaaaataaggctagtccgttatcaacttgaaaaagtggcaccgagtcggtgcttttttt

SEQ ID NO: 1747 - RNA, 103 nt, synthetic construct; identical to SEQ ID NO: 1700
  source 1..103: mol_type = other RNA; note = Description of Artificial Sequence: Synthetic polynucleotide
  modified_base 1: mod_base = OTHER; note = 2'-O-Methyl-cytidine phosphorothioate
  modified_base 2: mod_base = OTHER; note = 2'-O-Methyl-adenosine phosphorothioate
  modified_base 3: mod_base = OTHER; note = 2'-O-Methyl-guanosine
  modified_base 21: mod_base = OTHER; note = 2'-O-Methyl-guanosine
  modified_base 25: mod_base = OTHER; note = uridine phosphorothioate
  modified_base 28: mod_base = OTHER; note = 2'-O-Methyl-adenosine
  modified_base 29: mod_base = OTHER; note = 2'-O-Methyl-guanosine
  modified_base 30: mod_base = OTHER; note = 2'-O-Methyl-cytidine
  modified_base 31: mod_base = OTHER; note = 2'-O-Methyl-uridine
  modified_base 32: mod_base = OTHER; note = 2'-O-Methyl-adenosine
  modified_base 34: mod_base = OTHER; note = 2'-O-Methyl-adenosine
  modified_base 35: mod_base = OTHER; note = 2'-O-Methyl-adenosine
  modified_base 36: mod_base = OTHER; note = 2'-O-Methyl-adenosine
  modified_base 37: mod_base = OTHER; note = 2'-O-Methyl-uridine
  modified_base 38: mod_base = OTHER; note = 2'-O-Methyl-adenosine
  modified_base 39: mod_base = OTHER; note = 2'-O-Methyl-guanosine
  modified_base 40: mod_base = OTHER; note = 2'-O-Methyl-cytidine
  modified_base 41: mod_base = OTHER; note = 2'-O-Methyl-adenosine
  modified_base 42: mod_base = OTHER; note = 2'-O-Methyl-adenosine
  modified_base 45: mod_base = OTHER; note = uridine phosphorothioate
  modified_base 46: mod_base = OTHER; note = 2'-O-Methyl-adenosine
  modified_base 48: mod_base = OTHER; note = 2'-O-Methyl-adenosine
  modified_base 50: mod_base = OTHER; note = 2'-O-Methyl-uridine
  modified_base 52: mod_base = OTHER; note = 2'-O-Methyl-adenosine
  modified_base 53: mod_base = OTHER; note = 2'-O-Methyl-guanosine
  modified_base 54: mod_base = OTHER; note = 2'-O-Methyl-guanosine
  modified_base 55: mod_base = OTHER; note = 2'-O-Methyl-cytidine
  modified_base 56: mod_base = OTHER; note = 2'-O-Methyl-uridine
  modified_base 57: mod_base = OTHER; note = 2'-O-Methyl-adenosine
  modified_base 60: mod_base = OTHER; note = 2'-O-Methyl-cytidine
  modified_base 61: mod_base = OTHER; note = 2'-O-Methyl-cytidine
  modified_base 64: mod_base = OTHER; note = uridine phosphorothioate
  modified_base 66: mod_base = OTHER; note = 2'-O-Methyl-uridine
  modified_base 67: mod_base = OTHER; note = 2'-O-Methyl-cytidine
  modified_base 70: mod_base = OTHER; note = 2'-O-Methyl-cytidine
  modified_base 71: mod_base = OTHER; note = 2'-O-Methyl-uridine
  modified_base 72: mod_base = OTHER; note = 2'-O-Methyl-uridine
  modified_base 74: mod_base = OTHER; note = 2'-O-Methyl-adenosine
  modified_base 75: mod_base = OTHER; note = 2'-O-Methyl-adenosine
  modified_base 76: mod_base = OTHER; note = 2'-O-Methyl-adenosine
  modified_base 77: mod_base = OTHER; note = 2'-O-Methyl-adenosine
  modified_base 78: mod_base = OTHER; note = 2'-O-Methyl-adenosine
  modified_base 79: mod_base = OTHER; note = 2'-O-Methyl-guanosine
  modified_base 80: mod_base = OTHER; note = 2'-O-Methyl-uridine
  modified_base 81: mod_base = OTHER; note = 2'-O-Methyl-guanosine
  modified_base 83: mod_base = OTHER; note = 2'-O-Methyl-cytidine
  modified_base 84: mod_base = OTHER; note = 2'-O-Methyl-adenosine
  modified_base 85: mod_base = OTHER; note = 2'-O-Methyl-cytidine
  modified_base 86: mod_base = OTHER; note = 2'-O-Methyl-cytidine
  modified_base 87: mod_base = OTHER; note = 2'-O-Methyl-guanosine
  modified_base 88: mod_base = OTHER; note = 2'-O-Methyl-adenosine
  modified_base 89: mod_base = OTHER; note = 2'-O-Methyl-guanosine
  modified_base 90: mod_base = OTHER; note = 2'-O-Methyl-uridine
  modified_base 91: mod_base = OTHER; note = 2'-O-Methyl-cytidine
  modified_base 92: mod_base = OTHER; note = 2'-O-Methyl-guanosine
  modified_base 93: mod_base = OTHER; note = 2'-O-Methyl-guanosine
  modified_base 94: mod_base = OTHER; note = 2'-O-Methyl-uridine
  modified_base 95: mod_base = OTHER; note = 2'-O-Methyl-guanosine
  modified_base 96: mod_base = OTHER; note = 2'-O-Methyl-cytidine
  modified_base 97: mod_base = OTHER; note = 2'-O-Methyl-uridine phosphorothioate
  modified_base 98: mod_base = OTHER; note = 2'-O-Methyl-uridine phosphorothioate
  modified_base 99: mod_base = OTHER; note = 2'-O-Methyl-uridine phosphorothioate
  modified_base 100: mod_base = OTHER; note = 2'-O-Methyl-uridine

SEQ ID NO: 1748 - RNA, 103 nt, synthetic construct; identical to SEQ ID NO: 1700
  source 1..103: mol_type = other RNA; note = Description of Artificial Sequence: Synthetic polynucleotide
  modified_base 1: mod_base = OTHER; note = 2'-O-Methyl-cytidine phosphorothioate
  modified_base 2: mod_base = OTHER; note = 2'-O-Methyl-adenosine phosphorothioate
  modified_base 3: mod_base = OTHER; note = 2'-O-Methyl-guanosine phosphorothioate
  modified_base 21: mod_base = OTHER; note = 2'-O-Methyl-guanosine
  modified_base 28: mod_base = OTHER; note = 2'-O-Methyl-adenosine
  modified_base 29: mod_base = OTHER; note = 2'-O-Methyl-guanosine
  modified_base 30: mod_base = OTHER; note = 2'-O-Methyl-cytidine
  modified_base 31: mod_base = OTHER; note = 2'-O-Methyl-uridine
  modified_base 32: mod_base = OTHER; note = 2'-O-Methyl-adenosine
  modified_base 34: mod_base = OTHER; note = 2'-O-Methyl-adenosine
  modified_base 35: mod_base = OTHER; note = 2'-O-Methyl-adenosine
  modified_base 36: mod_base = OTHER; note = 2'-O-Methyl-adenosine
  modified_base 37: mod_base = OTHER; note = 2'-O-Methyl-uridine
  modified_base 38: mod_base = OTHER; note = 2'-O-Methyl-adenosine
  modified_base 39: mod_base = OTHER; note = 2'-O-Methyl-guanosine
  modified_base 40: mod_base = OTHER; note = 2'-O-Methyl-cytidine
  modified_base 41: mod_base = OTHER; note = 2'-O-Methyl-adenosine
  modified_base 42: mod_base = OTHER; note = 2'-O-Methyl-adenosine
  modified_base 46: mod_base = OTHER; note = 2'-O-Methyl-adenosine
  modified_base 48: mod_base = OTHER; note = 2'-O-Methyl-adenosine
  modified_base 50: mod_base = OTHER; note = 2'-O-Methyl-uridine
  modified_base 52: mod_base = OTHER; note = 2'-O-Methyl-adenosine
  modified_base 53: mod_base = OTHER; note = 2'-O-Methyl-guanosine
  modified_base 54: mod_base = OTHER; note = 2'-O-Methyl-guanosine
  modified_base 57: mod_base = OTHER; note = 2'-O-Methyl-adenosine
  modified_base 61: mod_base = OTHER; note = 2'-O-Methyl-cytidine
  modified_base 66: mod_base = OTHER; note = 2'-O-Methyl-uridine
  modified_base 67: mod_base = OTHER; note = 2'-O-Methyl-cytidine
  modified_base 70: mod_base = OTHER; note = 2'-O-Methyl-cytidine
  modified_base 71: mod_base = OTHER; note = 2'-O-Methyl-uridine
  modified_base 72: mod_base = OTHER; note = 2'-O-Methyl-uridine
  modified_base 74: mod_base = OTHER; note = 2'-O-Methyl-adenosine
  modified_base 75: mod_base = OTHER; note = 2'-O-Methyl-adenosine
  modified_base 76: mod_base = OTHER; note = 2'-O-Methyl-adenosine
  modified_base 77: mod_base = OTHER; note = 2'-O-Methyl-adenosine
  modified_base 78: mod_base = OTHER; note = 2'-O-Methyl-adenosine
  modified_base 79: mod_base = OTHER; note = 2'-O-Methyl-guanosine
  modified_base 80: mod_base = OTHER; note = 2'-O-Methyl-uridine
  modified_base 82: mod_base = OTHER; note = 2'-O-Methyl-guanosine
  modified_base 83: mod_base = OTHER; note = 2'-O-Methyl-cytidine
  modified_base 84: mod_base = OTHER; note = 2'-O-Methyl-adenosine
  modified_base 85: mod_base = OTHER; note = 2'-O-Methyl-cytidine
  modified_base 86: mod_base = OTHER; note = 2'-O-Methyl-cytidine
  modified_base 87: mod_base = OTHER; note = 2'-O-Methyl-guanosine
  modified_base 89: mod_base = OTHER; note = 2'-O-Methyl-guanosine
  modified_base 92: mod_base = OTHER; note = 2'-O-Methyl-guanosine
  modified_base 93: mod_base = OTHER; note = 2'-O-Methyl-guanosine
  modified_base 94: mod_base = OTHER; note = 2'-O-Methyl-uridine
  modified_base 95: mod_base = OTHER; note = 2'-O-Methyl-guanosine
  modified_base 96: mod_base = OTHER; note = 2'-O-Methyl-cytidine
  modified_base 97: mod_base = OTHER; note = 2'-O-Methyl-uridine
  modified_base 98: mod_base = OTHER; note = 2'-O-Methyl-uridine phosphorothioate
  modified_base 99: mod_base = OTHER; note = 2'-O-Methyl-uridine phosphorothioate
  modified_base 100: mod_base = OTHER; note = 2'-O-Methyl-uridine

SEQ ID NO: 1749 - RNA, 103 nt, synthetic construct; identical to SEQ ID NO: 1700
  source 1..103: mol_type = other RNA; note = Description of Artificial Sequence: Synthetic polynucleotide
  modified_base 1: mod_base = OTHER; note = 2'-O-Methyl-cytidine phosphorothioate
  modified_base 2: mod_base = OTHER; note = 2'-O-Methyl-adenosine phosphorothioate
  modified_base 3: mod_base = OTHER; note = 2'-O-Methyl-guanosine phosphorothioate
  modified_base 21: mod_base = OTHER; note = 2'-O-Methyl-guanosine
  modified_base 28: mod_base = OTHER; note = 2'-O-Methyl-adenosine
  modified_base 29: mod_base = OTHER; note = 2'-O-Methyl-guanosine
  modified_base 30: mod_base = OTHER; note = 2'-O-Methyl-cytidine
  modified_base 31: mod_base = OTHER; note = 2'-O-Methyl-uridine
  modified_base 32: mod_base = OTHER; note = 2'-O-Methyl-adenosine
  modified_base 33: mod_base = OTHER; note = 2'-O-Methyl-guanosine
  modified_base 34: mod_base = OTHER; note = 2'-O-Methyl-adenosine
  modified_base 35: mod_base = OTHER; note = 2'-O-Methyl-adenosine
  modified_base 36: mod_base = OTHER; note = 2'-O-Methyl-adenosine
  modified_base 37: mod_base = OTHER; note = 2'-O-Methyl-uridine
  modified_base 38: mod_base = OTHER; note = 2'-O-Methyl-adenosine
  modified_base 39: mod_base = OTHER; note = 2'-O-Methyl-guanosine
  modified_base 40: mod_base = OTHER; note = 2'-O-Methyl-cytidine
  modified_base 41: mod_base = OTHER; note = 2'-O-Methyl-adenosine
  modified_base 42: mod_base = OTHER; note = 2'-O-Methyl-adenosine
  modified_base 46: mod_base = OTHER; note = 2'-O-Methyl-adenosine
  modified_base 48: mod_base = OTHER; note = 2'-O-Methyl-adenosine
  modified_base 50: mod_base = OTHER; note = 2'-O-Methyl-uridine
  modified_base 52: mod_base = OTHER; note = 2'-O-Methyl-adenosine
  modified_base 53: mod_base = OTHER; note = 2'-O-Methyl-guanosine
  modified_base 54: mod_base = OTHER; note = 2'-O-Methyl-guanosine
  modified_base 55: mod_base = OTHER; note = 2'-O-Methyl-cytidine
  modified_base 56: mod_base = OTHER; note = 2'-O-Methyl-uridine
  modified_base 57: mod_base = OTHER; note = 2'-O-Methyl-adenosine
  modified_base 60: mod_base = OTHER; note = 2'-O-Methyl-cytidine
  modified_base 61: mod_base = OTHER; note = 2'-O-Methyl-cytidine
  modified_base 66: mod_base = OTHER; note = 2'-O-Methyl-uridine
  modified_base 67: mod_base = OTHER; note = 2'-O-Methyl-cytidine
  modified_base 70: mod_base = OTHER; note = 2'-O-Methyl-cytidine
  modified_base 71: mod_base = OTHER; note = 2'-O-Methyl-uridine
  modified_base 72: mod_base = OTHER; note = 2'-O-Methyl-uridine
  modified_base 73: mod_base = OTHER; note = 2'-O-Methyl-guanosine
  modified_base 74: mod_base = OTHER; note = 2'-O-Methyl-adenosine
  modified_base 75: mod_base = OTHER; note = 2'-O-Methyl-adenosine
  modified_base 76: mod_base = OTHER; note = 2'-O-Methyl-adenosine
  modified_base 77: mod_base = OTHER; note = 2'-O-Methyl-adenosine
  modified_base 78: mod_base = OTHER; note = 2'-O-Methyl-adenosine
  modified_base 79: mod_base = OTHER; note = 2'-O-Methyl-guanosine
  modified_base 80: mod_base = OTHER; note = 2'-O-Methyl-uridine
  modified_base 81: mod_base = OTHER; note = 2'-O-Methyl-guanosine
  modified_base 83: mod_base = OTHER; note = 2'-O-Methyl-cytidine
  modified_base 84: mod_base = OTHER; note = 2'-O-Methyl-adenosine
  modified_base 85: mod_base = OTHER; note = 2'-O-Methyl-cytidine
  modified_base 86: mod_base = OTHER; note = 2'-O-Methyl-cytidine
  modified_base 87: mod_base = OTHER; note = 2'-O-Methyl-guanosine
  modified_base 88: mod_base = OTHER; note = 2'-O-Methyl-adenosine
  modified_base 89: mod_base = OTHER; note = 2'-O-Methyl-guanosine
  modified_base 90: mod_base = OTHER; note = 2'-O-Methyl-uridine
  modified_base 91: mod_base = OTHER; note = 2'-O-Methyl-cytidine
  modified_base 92: mod_base = OTHER; note = 2'-O-Methyl-guanosine
  modified_base 93: mod_base = OTHER; note = 2'-O-Methyl-guanosine
  modified_base 94: mod_base = OTHER; note = 2'-O-Methyl-uridine
  modified_base 95: mod_base = OTHER; note = 2'-O-Methyl-guanosine
  modified_base 96: mod_base = OTHER; note = 2'-O-Methyl-cytidine
  modified_base 97: mod_base = OTHER; note = 2'-O-Methyl-uridine
  modified_base 98: mod_base = OTHER; note = 2'-O-Methyl-uridine phosphorothioate
  modified_base 99: mod_base = OTHER; note = 2'-O-Methyl-uridine phosphorothioate
  modified_base 100: mod_base = OTHER; note = 2'-O-Methyl-uridine

SEQ ID NO: 1750 - RNA, 103 nt, synthetic construct; identical to SEQ ID NO: 1699
  source 1..103: mol_type = other RNA; note = Description of Artificial Sequence: Synthetic polynucleotide
  modified_base 1: mod_base = OTHER; note = 2'-O-Methyl-guanosine phosphorothioate
  modified_base 2: mod_base = OTHER; note = 2'-O-Methyl-adenosine phosphorothioate
  modified_base 3: mod_base = OTHER; note = 2'-O-Methyl-guanosine phosphorothioate
  modified_base 21: mod_base = OTHER; note = 2'-O-Methyl-guanosine
  modified_base 28: mod_base = OTHER; note = 2'-O-Methyl-adenosine
  modified_base 29: mod_base = OTHER; note = 2'-O-Methyl-guanosine
  modified_base 30: mod_base = OTHER; note = 2'-O-Methyl-cytidine
  modified_base 31: mod_base = OTHER; note = 2'-O-Methyl-uridine
  modified_base 32: mod_base = OTHER; note = 2'-O-Methyl-adenosine
  modified_base 34: mod_base = OTHER; note = 2'-O-Methyl-adenosine
  modified_base 35: mod_base = OTHER; note = 2'-O-Methyl-adenosine
  modified_base 36: mod_base = OTHER; note = 2'-O-Methyl-adenosine
  modified_base 37: mod_base = OTHER; note = 2'-O-Methyl-uridine
  modified_base 38: mod_base = OTHER; note = 2'-O-Methyl-adenosine
  modified_base 39: mod_base = OTHER; note = 2'-O-Methyl-guanosine
  modified_base 40: mod_base = OTHER; note = 2'-O-Methyl-cytidine
  modified_base 41: mod_base = OTHER; note = 2'-O-Methyl-adenosine
  modified_base 42: mod_base = OTHER; note = 2'-O-Methyl-adenosine
  modified_base 46: mod_base = OTHER; note = 2'-O-Methyl-adenosine
  modified_base 48: mod_base = OTHER; note = 2'-O-Methyl-adenosine
  modified_base 50: mod_base = OTHER; note = 2'-O-Methyl-uridine
  modified_base 52: mod_base = OTHER; note = 2'-O-Methyl-adenosine
  modified_base 53: mod_base = OTHER; note = 2'-O-Methyl-guanosine
  modified_base 54: mod_base = OTHER; note = 2'-O-Methyl-guanosine
  modified_base 57: mod_base = OTHER; note = 2'-O-Methyl-adenosine
  modified_base 61: mod_base = OTHER; note = 2'-O-Methyl-cytidine
  modified_base 66: mod_base = OTHER; note = 2'-O-Methyl-uridine
  modified_base 67: mod_base = OTHER; note = 2'-O-Methyl-cytidine
  modified_base 70: mod_base = OTHER; note = 2'-O-Methyl-cytidine
  modified_base 71: mod_base = OTHER; note = 2'-O-Methyl-uridine
  modified_base 72: mod_base = OTHER; note = 2'-O-Methyl-uridine
  modified_base 74: mod_base = OTHER; note = 2'-O-Methyl-adenosine
  modified_base 75: mod_base = OTHER; note = 2'-O-Methyl-adenosine
  modified_base 76: mod_base = OTHER; note = 2'-O-Methyl-adenosine
  modified_base 77: mod_base = OTHER; note = 2'-O-Methyl-adenosine
  modified_base 78: mod_base = OTHER; note = 2'-O-Methyl-adenosine
  modified_base 79: mod_base = OTHER; note = 2'-O-Methyl-guanosine
  modified_base 80: mod_base = OTHER; note = 2'-O-Methyl-uridine
  modified_base 82: mod_base = OTHER; note = 2'-O-Methyl-guanosine
  modified_base 83: mod_base = OTHER; note = 2'-O-Methyl-cytidine
  modified_base 84: mod_base = OTHER; note = 2'-O-Methyl-adenosine
  modified_base 85: mod_base = OTHER; note = 2'-O-Methyl-cytidine
  modified_base 86: mod_base = OTHER; note = 2'-O-Methyl-cytidine
  modified_base 87: mod_base = OTHER; note = 2'-O-Methyl-guanosine
  modified_base 89: mod_base = OTHER; note = 2'-O-Methyl-guanosine
  modified_base 92: mod_base = OTHER; note = 2'-O-Methyl-guanosine
  modified_base 93: mod_base = OTHER; note = 2'-O-Methyl-guanosine
  modified_base 94: mod_base = OTHER; note = 2'-O-Methyl-uridine
  modified_base 95: mod_base = OTHER; note = 2'-O-Methyl-guanosine
  modified_base 96: mod_base = OTHER; note = 2'-O-Methyl-cytidine
  modified_base 97: mod_base = OTHER; note = 2'-O-Methyl-uridine
  modified_base 98: mod_base = OTHER; note = 2'-O-Methyl-uridine phosphorothioate
  modified_base 99: mod_base = OTHER; note = 2'-O-Methyl-uridine phosphorothioate
  modified_base 100: mod_base = OTHER; note = 2'-O-Methyl-uridine

SEQ ID NO: 1751 - RNA, 103 nt, synthetic construct; identical to SEQ ID NO: 1699
  source 1..103: mol_type = other RNA; note = Description of Artificial Sequence: Synthetic polynucleotide
  modified_base 1: mod_base = OTHER; note = 2'-O-Methyl-guanosine phosphorothioate
  modified_base 2: mod_base = OTHER; note = 2'-O-Methyl-adenosine phosphorothioate
  modified_base 3: mod_base = OTHER; note = 2'-O-Methyl-guanosine phosphorothioate
  modified_base 21: mod_base = OTHER; note = 2'-O-Methyl-guanosine
  modified_base 28: mod_base = OTHER; note = 2'-O-Methyl-adenosine
  modified_base 29: mod_base = OTHER; note = 2'-O-Methyl-guanosine
  modified_base 30: mod_base = OTHER; note = 2'-O-Methyl-cytidine
  modified_base 31: mod_base = OTHER; note = 2'-O-Methyl-uridine
  modified_base 32: mod_base = OTHER; note = 2'-O-Methyl-adenosine
  modified_base 34: mod_base = OTHER; note = 2'-O-Methyl-adenosine
  modified_base 35: mod_base = OTHER; note = 2'-O-Methyl-adenosine
  modified_base 36: mod_base = OTHER; note = 2'-O-Methyl-adenosine
  modified_base 37: mod_base = OTHER; note = 2'-O-Methyl-uridine
  modified_base 38: mod_base = OTHER; note = 2'-O-Methyl-adenosine
  modified_base 39: mod_base = OTHER; note = 2'-O-Methyl-guanosine
  modified_base 40: mod_base = OTHER; note = 2'-O-Methyl-cytidine
  modified_base 41: mod_base = OTHER; note = 2'-O-Methyl-adenosine
  modified_base 42: mod_base = OTHER; note = 2'-O-Methyl-adenosine
  modified_base 46: mod_base = OTHER; note = 2'-O-Methyl-adenosine
  modified_base 48: mod_base = OTHER; note = 2'-O-Methyl-adenosine
  modified_base 50: mod_base = OTHER; note = 2'-O-Methyl-uridine
  modified_base 52: mod_base = OTHER; note = 2'-O-Methyl-adenosine
  modified_base 53: mod_base = OTHER; note = 2'-O-Methyl-guanosine
  modified_base 54: mod_base = OTHER; note = 2'-O-Methyl-guanosine
  modified_base 57: mod_base = OTHER; note = 2'-O-Methyl-adenosine
  modified_base 61: mod_base = OTHER; note = 2'-O-Methyl-cytidine
  modified_base 64: mod_base = OTHER; note = uridine phosphorothioate
  modified_base 66: mod_base = OTHER; note = 2'-O-Methyl-uridine
  modified_base 67: mod_base = OTHER; note = 2'-O-Methyl-cytidine
  modified_base 70: mod_base = OTHER; note = 2'-O-Methyl-cytidine
  modified_base 71: mod_base = OTHER; note = 2'-O-Methyl-uridine
  modified_base 72: mod_base = OTHER; note = 2'-O-Methyl-uridine
  modified_base 74: mod_base = OTHER; note = 2'-O-Methyl-adenosine
  modified_base 75: mod_base = OTHER; note = 2'-O-Methyl-adenosine
  modified_base 76: mod_base = OTHER; note = 2'-O-Methyl-adenosine
  modified_base 77: mod_base = OTHER; note = 2'-O-Methyl-adenosine
  modified_base 78: mod_base = OTHER; note = 2'-O-Methyl-adenosine
  modified_base 79: mod_base = OTHER; note = 2'-O-Methyl-guanosine
  modified_base 80: mod_base = OTHER; note = 2'-O-Methyl-uridine
  modified_base 82: mod_base = OTHER; note = 2'-O-Methyl-guanosine
  modified_base 83: mod_base = OTHER; note = 2'-O-Methyl-cytidine
  modified_base 84: mod_base = OTHER; note = 2'-O-Methyl-adenosine
  modified_base 85: mod_base = OTHER; note = 2'-O-Methyl-cytidine
  modified_base 86: mod_base = OTHER; note = 2'-O-Methyl-cytidine
  modified_base 87: mod_base = OTHER; note = 2'-O-Methyl-guanosine
  modified_base 89: mod_base = OTHER; note = 2'-O-Methyl-guanosine
  modified_base 92: mod_base = OTHER; note = 2'-O-Methyl-guanosine
  modified_base 93: mod_base = OTHER; note = 2'-O-Methyl-guanosine
  modified_base 94: mod_base = OTHER; note = 2'-O-Methyl-uridine
  modified_base 95: mod_base = OTHER; note = 2'-O-Methyl-guanosine
  modified_base 96: mod_base = OTHER; note = 2'-O-Methyl-cytidine
  modified_base 97: mod_base = OTHER; note = 2'-O-Methyl-uridine
  modified_base 98: mod_base = OTHER; note = 2'-O-Methyl-uridine phosphorothioate
  modified_base 99: mod_base = OTHER; note = 2'-O-Methyl-uridine phosphorothioate
  modified_base 100: mod_base = OTHER; note = 2'-O-Methyl-uridine

SEQ ID NO: 1752 - RNA, 103 nt, synthetic construct; identical to SEQ ID NO: 1700
  source 1..103: mol_type = other RNA; note = Description of Artificial Sequence: Synthetic polynucleotide
  modified_base 1: mod_base = OTHER; note = 2'-O-Methyl-cytidine phosphorothioate
  modified_base 2: mod_base = OTHER; note = 2'-O-Methyl-adenosine phosphorothioate
  modified_base 3: mod_base = OTHER; note = 2'-O-Methyl-guanosine phosphorothioate
  modified_base 21: mod_base = OTHER; note = 2'-O-Methyl-guanosine
  modified_base 28: mod_base = OTHER; note = 2'-O-Methyl-adenosine
  modified_base 29: mod_base = OTHER; note = 2'-O-Methyl-guanosine
  modified_base 30: mod_base = OTHER; note = 2'-O-Methyl-cytidine
  modified_base 31: mod_base = OTHER; note = 2'-O-Methyl-uridine
  modified_base 32: mod_base = OTHER; note = 2'-O-Methyl-adenosine
  modified_base 34: mod_base = OTHER; note = 2'-O-Methyl-adenosine
  modified_base 35: mod_base = OTHER; note = 2'-O-Methyl-adenosine
  modified_base 36: mod_base = OTHER; note = 2'-O-Methyl-adenosine
  modified_base 37: mod_base = OTHER; note = 2'-O-Methyl-uridine
  modified_base 38: mod_base = OTHER; note = 2'-O-Methyl-adenosine
  modified_base 39: mod_base = OTHER; note = 2'-O-Methyl-guanosine
  modified_base 40: mod_base = OTHER; note = 2'-O-Methyl-cytidine
  modified_base 41: mod_base = OTHER; note = 2'-O-Methyl-adenosine
  modified_base 42: mod_base = OTHER; note = 2'-O-Methyl-adenosine
  modified_base 46: mod_base = OTHER; note = 2'-O-Methyl-adenosine
  modified_base 48: mod_base = OTHER; note = 2'-O-Methyl-adenosine
  modified_base 50: mod_base = OTHER; note = 2'-O-Methyl-uridine
  modified_base 52: mod_base = OTHER; note = 2'-O-Methyl-adenosine
  modified_base 53: mod_base = OTHER; note = 2'-O-Methyl-guanosine
  modified_base 54: mod_base = OTHER; note = 2'-O-Methyl-guanosine
  modified_base 55: mod_base = OTHER; note = 2'-O-Methyl-cytidine
  modified_base 56: mod_base = OTHER; note = 2'-O-Methyl-uridine
  modified_base 57: mod_base = OTHER; note = 2'-O-Methyl-adenosine
  modified_base 60: mod_base = OTHER; note = 2'-O-Methyl-cytidine
  modified_base 61: mod_base = OTHER; note = 2'-O-Methyl-cytidine
  modified_base 64: mod_base = OTHER; note = uridine phosphorothioate
  modified_base 66: mod_base = OTHER; note = 2'-O-Methyl-uridine
  modified_base 67: mod_base = OTHER; note = 2'-O-Methyl-cytidine
  modified_base 70: mod_base = OTHER; note = 2'-O-Methyl-cytidine
  modified_base 71: mod_base = OTHER; note = 2'-O-Methyl-uridine
  modified_base 72: mod_base = OTHER; note = 2'-O-Methyl-uridine
  modified_base 74: mod_base = OTHER; note = 2'-O-Methyl-adenosine
  modified_base 75: mod_base = OTHER; note = 2'-O-Methyl-adenosine
  modified_base 76: mod_base = OTHER; note = 2'-O-Methyl-adenosine
  modified_base 77: mod_base = OTHER; note = 2'-O-Methyl-adenosine
  modified_base 78: mod_base = OTHER; note = 2'-O-Methyl-adenosine
  modified_base 79: mod_base = OTHER; note = 2'-O-Methyl-guanosine
  modified_base 80: mod_base = OTHER; note = 2'-O-Methyl-uridine
  modified_base 81: mod_base = OTHER; note = 2'-O-Methyl-guanosine
  modified_base 83: mod_base = OTHER; note = 2'-O-Methyl-cytidine
  modified_base 84: mod_base = OTHER; note = 2'-O-Methyl-adenosine
  modified_base 85: mod_base = OTHER; note = 2'-O-Methyl-cytidine
  modified_base 86: mod_base = OTHER; note = 2'-O-Methyl-cytidine
  modified_base 87: mod_base = OTHER; note = 2'-O-Methyl-guanosine
  modified_base 88: mod_base = OTHER; note = 2'-O-Methyl-adenosine
  modified_base 89: mod_base = OTHER; note = 2'-O-Methyl-guanosine
  modified_base 90: mod_base = OTHER; note = 2'-O-Methyl-uridine
  modified_base 91: mod_base = OTHER; note = 2'-O-Methyl-cytidine
  modified_base 92: mod_base = OTHER; note = 2'-O-Methyl-guanosine
  modified_base 93: mod_base = OTHER; note = 2'-O-Methyl-guanosine
  modified_base 94: mod_base = OTHER; note = 2'-O-Methyl-uridine
  modified_base 95: mod_base = OTHER; note = 2'-O-Methyl-guanosine
  modified_base 96: mod_base = OTHER; note = 2'-O-Methyl-cytidine
  modified_base 97: mod_base = OTHER; note = 2'-O-Methyl-uridine
  modified_base 98: mod_base = OTHER; note = 2'-O-Methyl-uridine phosphorothioate
  modified_base 99: mod_base = OTHER; note = 2'-O-Methyl-uridine phosphorothioate
  modified_base 100: mod_base = OTHER; note = 2'-O-Methyl-uridine

SEQ ID NO: 1753 - RNA, 103 nt, synthetic construct; identical to SEQ ID NO: 1699
  source 1..103: mol_type = other RNA; note = Description of Artificial Sequence: Synthetic polynucleotide
  modified_base 1: mod_base = OTHER; note = 2'-O-Methyl-guanosine phosphorothioate
  modified_base 2: mod_base = OTHER; note = 2'-O-Methyl-adenosine phosphorothioate
  modified_base 3: mod_base = OTHER; note = 2'-O-Methyl-guanosine phosphorothioate
  modified_base 21: mod_base = OTHER; note = 2'-O-Methyl-guanosine
  modified_base 28: mod_base = OTHER; note = 2'-O-Methyl-adenosine
  modified_base 29: mod_base = OTHER; note = 2'-O-Methyl-guanosine
  modified_base 30: mod_base = OTHER; note = 2'-O-Methyl-cytidine
  modified_base 31: mod_base = OTHER; note = 2'-O-Methyl-uridine
  modified_base 32: mod_base = OTHER; note = 2'-O-Methyl-adenosine
  modified_base 34: mod_base = OTHER; note = 2'-O-Methyl-adenosine
  modified_base 35: mod_base = OTHER; note = 2'-O-Methyl-adenosine
  modified_base 36: mod_base = OTHER; note = 2'-O-Methyl-adenosine
  modified_base 37: mod_base = OTHER; note = 2'-O-Methyl-uridine
  modified_base 38: mod_base = OTHER; note = 2'-O-Methyl-adenosine
  modified_base 39: mod_base = OTHER; note = 2'-O-Methyl-guanosine
  modified_base 40: mod_base = OTHER; note = 2'-O-Methyl-cytidine
  modified_base 41: mod_base = OTHER; note = 2'-O-Methyl-adenosine
  modified_base 42: mod_base = OTHER; note = 2'-O-Methyl-adenosine
  modified_base 45: mod_base = OTHER; note = uridine phosphorothioate
  modified_base 46: mod_base = OTHER; note = 2'-O-Methyl-adenosine
  modified_base 48: mod_base = OTHER; note = 2'-O-Methyl-adenosine
  modified_base 50: mod_base = OTHER; note = 2'-O-Methyl-uridine
  modified_base 52: mod_base = OTHER; note = 2'-O-Methyl-adenosine
  modified_base 53: mod_base = OTHER; note = 2'-O-Methyl-guanosine
  modified_base 54: mod_base = OTHER; note = 2'-O-Methyl-guanosine
  modified_base 57: mod_base = OTHER; note = 2'-O-Methyl-adenosine
  modified_base 61: mod_base = OTHER; note = 2'-O-Methyl-cytidine
  modified_base 66: mod_base = OTHER; note = 2'-O-Methyl-uridine
  modified_base 67: mod_base = OTHER; note = 2'-O-Methyl-cytidine
  modified_base 70: mod_base = OTHER; note = 2'-O-Methyl-cytidine
  modified_base 71: mod_base = OTHER; note = 2'-O-Methyl-uridine
  modified_base 72: mod_base = OTHER; note = 2'-O-Methyl-uridine
  modified_base 74: mod_base = OTHER; note = 2'-O-Methyl-adenosine
  modified_base 75: mod_base = OTHER; note = 2'-O-Methyl-adenosine
  modified_base 76: mod_base = OTHER; note = 2'-O-Methyl-adenosine
  modified_base 77: mod_base = OTHER; note = 2'-O-Methyl-adenosine
  modified_base 78: mod_base = OTHER; note = 2'-O-Methyl-adenosine
  modified_base 79: mod_base = OTHER; note = 2'-O-Methyl-guanosine
  modified_base 80: mod_base = OTHER; note = 2'-O-Methyl-uridine
  modified_base 82: mod_base = OTHER; note = 2'-O-Methyl-guanosine
  modified_base 83: mod_base = OTHER; note = 2'-O-Methyl-cytidine
  modified_base 84: mod_base = OTHER; note = 2'-O-Methyl-adenosine
  modified_base 85: mod_base = OTHER; note = 2'-O-Methyl-cytidine
  modified_base 86: mod_base = OTHER; note = 2'-O-Methyl-cytidine
  modified_base 87: mod_base = OTHER; note = 2'-O-Methyl-guanosine
  modified_base 89: mod_base = OTHER; note = 2'-O-Methyl-guanosine
  modified_base 92: mod_base = OTHER; note = 2'-O-Methyl-guanosine
  modified_base 93: mod_base = OTHER; note = 2'-O-Methyl-guanosine
  modified_base 94: mod_base = OTHER; note = 2'-O-Methyl-uridine
  modified_base 95: mod_base = OTHER; note = 2'-O-Methyl-guanosine
  modified_base 96: mod_base = OTHER; note = 2'-O-Methyl-cytidine
  modified_base 97: mod_base = OTHER; note = 2'-O-Methyl-uridine
  modified_base 98: mod_base = OTHER; note = 2'-O-Methyl-uridine phosphorothioate
  modified_base 99: mod_base = OTHER; note = 2'-O-Methyl-uridine phosphorothioate
  modified_base 100: mod_base = OTHER; note = 2'-O-Methyl-uridine

SEQ ID NO: 1754 - RNA, 103 nt, synthetic construct; identical to SEQ ID NO: 1700
  source 1..103: mol_type = other RNA; note = Description of Artificial Sequence: Synthetic polynucleotide
  modified_base 1: mod_base = OTHER; note = 2'-O-Methyl-cytidine phosphorothioate
  modified_base 2: mod_base = OTHER; note = 2'-O-Methyl-adenosine phosphorothioate
  modified_base 3: mod_base = OTHER; note = 2'-O-Methyl-guanosine phosphorothioate
  modified_base 21: mod_base = OTHER; note = 2'-O-Methyl-guanosine
  modified_base 28: mod_base = OTHER; note = 2'-O-Methyl-adenosine
  modified_base 29: mod_base = OTHER; note = 2'-O-Methyl-guanosine
  modified_base 30: mod_base = OTHER; note = 2'-O-Methyl-cytidine
  modified_base 31: mod_base = OTHER; note = 2'-O-Methyl-uridine
  modified_base 32: mod_base = OTHER; note = 2'-O-Methyl-adenosine
  modified_base 34: mod_base = OTHER; note = 2'-O-Methyl-adenosine
  modified_base 35: mod_base = OTHER; note = 2'-O-Methyl-adenosine
  modified_base 36: mod_base = OTHER; note = 2'-O-Methyl-adenosine
  modified_base 37: mod_base = OTHER; note = 2'-O-Methyl-uridine
  modified_base 38: mod_base = OTHER; note = 2'-O-Methyl-adenosine
  modified_base 39: mod_base = OTHER; note = 2'-O-Methyl-guanosine
  modified_base 40: mod_base = OTHER; note = 2'-O-Methyl-cytidine
  modified_base 41: mod_base = OTHER; note = 2'-O-Methyl-adenosine
  modified_base 42: mod_base = OTHER; note = 2'-O-Methyl-adenosine
  modified_base 45: mod_base = OTHER; note = uridine phosphorothioate
  modified_base 46: mod_base = OTHER; note = 2'-O-Methyl-adenosine
  modified_base 48: mod_base = OTHER; note = 2'-O-Methyl-adenosine
  modified_base 50: mod_base = OTHER; note = 2'-O-Methyl-uridine
  modified_base 52: mod_base = OTHER; note = 2'-O-Methyl-adenosine
  modified_base 53: mod_base = OTHER; note = 2'-O-Methyl-guanosine
  modified_base 54: mod_base = OTHER; note = 2'-O-Methyl-guanosine
  modified_base 55: mod_base = OTHER; note = 2'-O-Methyl-cytidine
  modified_base 56: mod_base = OTHER; note = 2'-O-Methyl-uridine
  modified_base 57: mod_base = OTHER; note = 2'-O-Methyl-adenosine
  modified_base 60: mod_base = OTHER; note = 2'-O-Methyl-cytidine
  modified_base 61: mod_base = OTHER; note = 2'-O-Methyl-cytidine
  modified_base 66: mod_base = OTHER; note = 2'-O-Methyl-uridine
  modified_base 67: mod_base = OTHER; note = 2'-O-Methyl-cytidine
  modified_base 70: mod_base = OTHER; note = 2'-O-Methyl-cytidine
  modified_base 71: mod_base = OTHER; note = 2'-O-Methyl-uridine
  modified_base 72: mod_base = OTHER; note = 2'-O-Methyl-uridine
  modified_base 74: mod_base = OTHER; note = 2'-O-Methyl-adenosine
  modified_base 75: mod_base = OTHER; note = 2'-O-Methyl-adenosine
  modified_base 76: mod_base = OTHER; note = 2'-O-Methyl-adenosine
  modified_base 77: mod_base = OTHER; note = 2'-O-Methyl-adenosine
  modified_base 78: mod_base = OTHER; note = 2'-O-Methyl-adenosine
  modified_base 79: mod_base = OTHER; note = 2'-O-Methyl-guanosine
  modified_base 80: mod_base = OTHER; note = 2'-O-Methyl-uridine
  modified_base 81: mod_base = OTHER; note = 2'-O-Methyl-guanosine
  modified_base 83: mod_base = OTHER; note = 2'-O-Methyl-cytidine
  modified_base 84: mod_base = OTHER; note = 2'-O-Methyl-adenosine
  modified_base 85: mod_base = OTHER; note = 2'-O-Methyl-cytidine
  modified_base 86: mod_base = OTHER; note = 2'-O-Methyl-cytidine
  modified_base 87: mod_base = OTHER; note = 2'-O-Methyl-guanosine
  modified_base 88: mod_base = OTHER; note = 2'-O-Methyl-adenosine
  modified_base 89: mod_base = OTHER; note = 2'-O-Methyl-guanosine
  modified_base 90: mod_base = OTHER; note = 2'-O-Methyl-uridine
  modified_base 91: mod_base = OTHER; note = 2'-O-Methyl-cytidine
  modified_base 92: mod_base = OTHER; note = 2'-O-Methyl-guanosine
  modified_base 93: mod_base = OTHER; note = 2'-O-Methyl-guanosine
  modified_base 94: mod_base = OTHER; note = 2'-O-Methyl-uridine
  modified_base 95: mod_base = OTHER; note = 2'-O-Methyl-guanosine
  modified_base 96: mod_base = OTHER; note = 2'-O-Methyl-cytidine
  modified_base 97: mod_base = OTHER; note = 2'-O-Methyl-uridine
  modified_base 98: mod_base = OTHER; note = 2'-O-Methyl-uridine phosphorothioate
  modified_base 99: mod_base = OTHER; note = 2'-O-Methyl-uridine phosphorothioate
  modified_base 100: mod_base = OTHER; note = 2'-O-Methyl-uridine

SEQ ID NO: 1755 - RNA, 103 nt, synthetic construct; identical to SEQ ID NO: 1643
  source 1..103: mol_type = other RNA; note = Description of Artificial Sequence: Synthetic polynucleotide
  modified_base 1: mod_base = OTHER; note = 2'-O-Methyl-cytidine phosphorothioate
  modified_base 2: mod_base = OTHER; note = 2'-O-Methyl-cytidine phosphorothioate
  modified_base 3: mod_base = OTHER; note = 2'-O-Methyl-cytidine phosphorothioate
  modified_base 21: mod_base = OTHER; note = 2'-O-Methyl-guanosine
  modified_base 25: mod_base = OTHER; note = uridine phosphorothioate
  modified_base 28: mod_base = OTHER; note = 2'-O-Methyl-adenosine
  modified_base 29: mod_base = OTHER; note = 2'-O-Methyl-guanosine
  modified_base 30: mod_base = OTHER; note = 2'-O-Methyl-cytidine
  modified_base 31: mod_base = OTHER; note = 2'-O-Methyl-uridine
  modified_base 32: mod_base = OTHER; note = 2'-O-Methyl-adenosine
  modified_base 34: mod_base = OTHER; note = 2'-O-Methyl-adenosine
  modified_base 35: mod_base = OTHER; note = 2'-O-Methyl-adenosine
  modified_base 36: mod_base = OTHER; note = 2'-O-Methyl-adenosine
  modified_base 37: mod_base = OTHER; note = 2'-O-Methyl-uridine
  modified_base 38: mod_base = OTHER; note = 2'-O-Methyl-adenosine
  modified_base 39: mod_base = OTHER; note = 2'-O-Methyl-guanosine
  modified_base 40: mod_base = OTHER; note = 2'-O-Methyl-cytidine
  modified_base 41: mod_base = OTHER; note = 2'-O-Methyl-adenosine
  modified_base 42: mod_base = OTHER; note = 2'-O-Methyl-adenosine
  modified_base 46: mod_base = OTHER; note = 2'-O-Methyl-adenosine
  modified_base 48: mod_base = OTHER; note = 2'-O-Methyl-adenosine
  modified_base 50: mod_base = OTHER; note = 2'-O-Methyl-uridine
  modified_base 52: mod_base = OTHER; note = 2'-O-Methyl-adenosine
  modified_base 53: mod_base = OTHER; note = 2'-O-Methyl-guanosine
  modified_base 54: mod_base = OTHER; note = 2'-O-Methyl-guanosine
  modified_base 57: mod_base = OTHER; note = 2'-O-Methyl-adenosine
  modified_base 61: mod_base = OTHER; note = 2'-O-Methyl-cytidine
  modified_base 66: mod_base = OTHER; note = 2'-O-Methyl-uridine
  modified_base 67: mod_base = OTHER; note = 2'-O-Methyl-cytidine
  modified_base 70: mod_base = OTHER; note = 2'-O-Methyl-cytidine
  modified_base 71: mod_base = OTHER; note = 2'-O-Methyl-uridine
  modified_base 72: mod_base = OTHER; note = 2'-O-Methyl-uridine
  modified_base 74: mod_base = OTHER; note = 2'-O-Methyl-adenosine
  modified_base 75: mod_base = OTHER; note = 2'-O-Methyl-adenosine
  modified_base 76: mod_base = OTHER; note = 2'-O-Methyl-adenosine
  modified_base 77: mod_base = OTHER; note = 2'-O-Methyl-adenosine
  modified_base 78: mod_base = OTHER; note = 2'-O-Methyl-adenosine
  modified_base 79: mod_base = OTHER; note = 2'-O-Methyl-guanosine
  modified_base 80: mod_base = OTHER; note = 2'-O-Methyl-uridine
  modified_base 82: mod_base = OTHER; note = 2'-O-Methyl-guanosine
  modified_base 83: mod_base = OTHER; note = 2'-O-Methyl-cytidine
  modified_base 84: mod_base = OTHER; note = 2'-O-Methyl-adenosine
  modified_base 85: mod_base = OTHER; note = 2'-O-Methyl-cytidine
  modified_base 86: mod_base = OTHER; note = 2'-O-Methyl-cytidine
  modified_base 87: mod_base = OTHER; note = 2'-O-Methyl-guanosine
  modified_base 89: mod_base = OTHER; note = 2'-O-Methyl-guanosine
  modified_base 92: mod_base = OTHER; note = 2'-O-Methyl-guanosine
  modified_base 93: mod_base = OTHER; note = 2'-O-Methyl-guanosine
  modified_base 94: mod_base = OTHER; note = 2'-O-Methyl-uridine
  modified_base 95: mod_base = OTHER; note = 2'-O-Methyl-guanosine
  modified_base 96: mod_base = OTHER; note = 2'-O-Methyl-cytidine
  modified_base 97: mod_base = OTHER; note = 2'-O-Methyl-uridine
  modified_base 98: mod_base = OTHER; note = 2'-O-Methyl-uridine phosphorothioate
  modified_base 99: mod_base = OTHER; note = 2'-O-Methyl-uridine phosphorothioate
  modified_base 100: mod_base = OTHER; note = 2'-O-Methyl-uridine

SEQ ID NO: 1756 - RNA, 103 nt, synthetic construct; identical to SEQ ID NO: 1699
  source 1..103: mol_type = other RNA; note = Description of Artificial Sequence: Synthetic polynucleotide
  modified_base 1: mod_base = OTHER; note = 2'-O-Methyl-guanosine phosphorothioate
  modified_base 2: mod_base = OTHER; note = 2'-O-Methyl-adenosine phosphorothioate
  modified_base 3: mod_base = OTHER; note = 2'-O-Methyl-guanosine phosphorothioate
  modified_base 21: mod_base = OTHER; note = 2'-O-Methyl-guanosine
  modified_base 25: mod_base = OTHER; note = uridine phosphorothioate
  modified_base 28: mod_base = OTHER; note = 2'-O-Methyl-adenosine
  modified_base 29: mod_base = OTHER; note = 2'-O-Methyl-guanosine
  modified_base 30: mod_base = OTHER; note = 2'-O-Methyl-cytidine
  modified_base 31: mod_base = OTHER; note = 2'-O-Methyl-uridine
  modified_base 32: mod_base = OTHER; note = 2'-O-Methyl-adenosine
  modified_base 34: mod_base = OTHER; note = 2'-O-Methyl-adenosine
  modified_base 35: mod_base = OTHER; note = 2'-O-Methyl-adenosine
  modified_base 36: mod_base = OTHER; note = 2'-O-Methyl-adenosine
  modified_base 37: mod_base = OTHER; note = 2'-O-Methyl-uridine
  modified_base 38: mod_base = OTHER; note = 2'-O-Methyl-adenosine
  modified_base 39: mod_base = OTHER; note = 2'-O-Methyl-guanosine
  modified_base 40: mod_base = OTHER; note = 2'-O-Methyl-cytidine
  modified_base 41: mod_base = OTHER; note = 2'-O-Methyl-adenosine
  modified_base 42: mod_base = OTHER; note = 2'-O-Methyl-adenosine
  modified_base 46: mod_base = OTHER; note = 2'-O-Methyl-adenosine
  modified_base 48: mod_base = OTHER; note = 2'-O-Methyl-adenosine
  modified_base 50: mod_base = OTHER; note = 2'-O-Methyl-uridine
  modified_base 52: mod_base = OTHER; note = 2'-O-Methyl-adenosine
  modified_base 53: mod_base = OTHER; note = 2'-O-Methyl-guanosine
  modified_base 54: mod_base = OTHER; note = 2'-O-Methyl-guanosine
  modified_base 57: mod_base = OTHER; note = 2'-O-Methyl-adenosine
  modified_base 61: mod_base = OTHER; note = 2'-O-Methyl-cytidine
  modified_base 66: mod_base = OTHER; note = 2'-O-Methyl-uridine
  modified_base 67: mod_base = OTHER; note = 2'-O-Methyl-cytidine
  modified_base 70: mod_base = OTHER; note = 2'-O-Methyl-cytidine
  modified_base 71: mod_base = OTHER; note = 2'-O-Methyl-uridine
  modified_base 72: mod_base = OTHER; note = 2'-O-Methyl-uridine
  modified_base 74: mod_base = OTHER; note = 2'-O-Methyl-adenosine
  modified_base 75: mod_base = OTHER; note = 2'-O-Methyl-adenosine
  modified_base 76: mod_base = OTHER; note = 2'-O-Methyl-adenosine
  modified_base 77: mod_base = OTHER; note = 2'-O-Methyl-adenosine
  modified_base 78: mod_base = OTHER; note = 2'-O-Methyl-adenosine
  modified_base 79: mod_base = OTHER; note = 2'-O-Methyl-guanosine
  modified_base 80: mod_base = OTHER; note = 2'-O-Methyl-uridine
  modified_base 82: mod_base = OTHER; note = 2'-O-Methyl-guanosine
  modified_base 83: mod_base = OTHER; note = 2'-O-Methyl-cytidine
  modified_base 84: mod_base = OTHER; note = 2'-O-Methyl-adenosine
  modified_base 85: mod_base = OTHER; note = 2'-O-Methyl-cytidine
  modified_base 86: mod_base = OTHER; note = 2'-O-Methyl-cytidine
  modified_base 87: mod_base = OTHER; note = 2'-O-Methyl-guanosine
  modified_base 89: mod_base = OTHER; note = 2'-O-Methyl-guanosine
  modified_base 92: mod_base = OTHER; note = 2'-O-Methyl-guanosine
  modified_base 93: mod_base = OTHER; note = 2'-O-Methyl-guanosine
  modified_base 94: mod_base = OTHER; note = 2'-O-Methyl-uridine
  modified_base 95: mod_base = OTHER; note = 2'-O-Methyl-guanosine
  modified_base 96: mod_base = OTHER; note = 2'-O-Methyl-cytidine
  modified_base 97: mod_base = OTHER; note = 2'-O-Methyl-uridine
  modified_base 98: mod_base = OTHER; note = 2'-O-Methyl-uridine phosphorothioate
  modified_base 99: mod_base = OTHER; note = 2'-O-Methyl-uridine phosphorothioate
  modified_base 100: mod_base = OTHER; note = 2'-O-Methyl-uridine

SEQ ID NO: 1757 - RNA, 103 nt, synthetic construct; identical to SEQ ID NO: 1700
  source 1..103: mol_type = other RNA; note = Description of Artificial Sequence: Synthetic polynucleotide
  modified_base 1: mod_base = OTHER; note = 2'-O-Methyl-cytidine phosphorothioate
  modified_base 2: mod_base = OTHER; note = 2'-O-Methyl-adenosine phosphorothioate
  modified_base 3: mod_base = OTHER; note = 2'-O-Methyl-guanosine phosphorothioate
  modified_base 21: mod_base = OTHER; note = 2'-O-Methyl-guanosine
  modified_base 25: mod_base = OTHER; note = uridine phosphorothioate
  modified_base 28: mod_base = OTHER; note = 2'-O-Methyl-adenosine
  modified_base 29: mod_base = OTHER; note = 2'-O-Methyl-guanosine
  modified_base 30: mod_base = OTHER; note = 2'-O-Methyl-cytidine
  modified_base 31: mod_base = OTHER; note = 2'-O-Methyl-uridine
  modified_base 32: mod_base = OTHER; note = 2'-O-Methyl-adenosine
  modified_base 34: mod_base = OTHER; note = 2'-O-Methyl-adenosine
  modified_base 35: mod_base = OTHER; note = 2'-O-Methyl-adenosine
  modified_base 36: mod_base = OTHER; note = 2'-O-Methyl-adenosine
  modified_base 37: mod_base = OTHER; note = 2'-O-Methyl-uridine
  modified_base 38: mod_base = OTHER; note = 2'-O-Methyl-adenosine
  modified_base 39: mod_base = OTHER; note = 2'-O-Methyl-guanosine
  modified_base 40: mod_base = OTHER; note = 2'-O-Methyl-cytidine
  modified_base 41: mod_base = OTHER; note = 2'-O-Methyl-adenosine
  modified_base 42: mod_base = OTHER; note = 2'-O-Methyl-adenosine
  modified_base 46: mod_base = OTHER; note = 2'-O-Methyl-adenosine
  modified_base 48: mod_base = OTHER; note = 2'-O-Methyl-adenosine
  modified_base 50: mod_base = OTHER; note = 2'-O-Methyl-uridine
  modified_base 52: mod_base = OTHER; note = 2'-O-Methyl-adenosine
  modified_base 53: mod_base = OTHER; note = 2'-O-Methyl-guanosine
  modified_base 54: mod_base = OTHER; note = 2'-O-Methyl-guanosine
  modified_base 55: mod_base = OTHER; note = 2'-O-Methyl-cytidine
  modified_base 56: mod_base = OTHER; note = 2'-O-Methyl-uridine
  modified_base 57: mod_base = OTHER; note = 2'-O-Methyl-adenosine
  modified_base 60: mod_base = OTHER; note = 2'-O-Methyl-cytidine
  modified_base 61: mod_base = OTHER; note = 2'-O-Methyl-cytidine
  modified_base 66: mod_base = OTHER; note = 2'-O-Methyl-uridine
  modified_base 67: mod_base = OTHER; note = 2'-O-Methyl-cytidine
  modified_base 70: mod_base = OTHER; note = 2'-O-Methyl-cytidine
  modified_base 71: mod_base = OTHER; note = 2'-O-Methyl-uridine
  modified_base 72: mod_base = OTHER; note = 2'-O-Methyl-uridine
  modified_base 74: mod_base = OTHER; note = 2'-O-Methyl-adenosine
  modified_base 75: mod_base = OTHER; note = 2'-O-Methyl-adenosine
  modified_base 76: mod_base = OTHER; note = 2'-O-Methyl-adenosine
  modified_base 77: mod_base = OTHER; note = 2'-O-Methyl-adenosine
  modified_base 78: mod_base = OTHER; note = 2'-O-Methyl-adenosine
  modified_base 79: mod_base = OTHER; note = 2'-O-Methyl-guanosine
  modified_base 80: mod_base = OTHER; note = 2'-O-Methyl-uridine
  modified_base 81: mod_base = OTHER; note = 2'-O-Methyl-guanosine
  modified_base 83: mod_base = OTHER; note = 2'-O-Methyl-cytidine
  modified_base 84: mod_base = OTHER; note = 2'-O-Methyl-adenosine
  modified_base 85: mod_base = OTHER; note = 2'-O-Methyl-cytidine
  modified_base 86: mod_base = OTHER; note = 2'-O-Methyl-cytidine
  modified_base 87: mod_base = OTHER; note = 2'-O-Methyl-guanosine
  modified_base 88: mod_base = OTHER; note = 2'-O-Methyl-adenosine
  modified_base 89: mod_base = OTHER; note = 2'-O-Methyl-guanosine
  modified_base 90: mod_base = OTHER; note = 2'-O-Methyl-uridine
  modified_base 91: mod_base = OTHER; note = 2'-O-Methyl-cytidine
  modified_base 92: mod_base = OTHER; note = 2'-O-Methyl-guanosine
  modified_base 93: mod_base = OTHER; note = 2'-O-Methyl-guanosine
  modified_base 94: mod_base = OTHER; note = 2'-O-Methyl-uridine
  modified_base 95: mod_base = OTHER; note = 2'-O-Methyl-guanosine
  modified_base 96: mod_base = OTHER; note = 2'-O-Methyl-cytidine
  modified_base 97: mod_base = OTHER; note = 2'-O-Methyl-uridine
  modified_base 98: mod_base = OTHER; note = 2'-O-Methyl-uridine phosphorothioate
  modified_base 99: mod_base = OTHER; note = 2'-O-Methyl-uridine phosphorothioate
  modified_base 100: mod_base = OTHER; note = 2'-O-Methyl-uridine

SEQ ID NO: 1758 - RNA, 103 nt, synthetic construct; identical to SEQ ID NO: 1699
  source 1..103: mol_type = other RNA; note = Description of Artificial Sequence: Synthetic polynucleotide
  modified_base 1: mod_base = OTHER; note = 2'-O-Methyl-guanosine phosphorothioate
  modified_base 2: mod_base = OTHER; note = 2'-O-Methyl-adenosine phosphorothioate
  modified_base 3: mod_base = OTHER; note = 2'-O-Methyl-guanosine phosphorothioate
  modified_base 21: mod_base = OTHER; note = 2'-O-Methyl-guanosine
  modified_base 28: mod_base = OTHER; note = 2'-O-Methyl-adenosine
  modified_base 29: mod_base = OTHER; note = 2'-O-Methyl-guanosine
  modified_base 30: mod_base = OTHER; note = 2'-O-Methyl-cytidine
  modified_base 31: mod_base = OTHER; note = 2'-O-Methyl-uridine
  modified_base 32: mod_base = OTHER; note = 2'-O-Methyl-adenosine
  modified_base 34: mod_base = OTHER; note = 2'-O-Methyl-adenosine
  modified_base 35: mod_base = OTHER; note = 2'-O-Methyl-adenosine
  modified_base 36: mod_base = OTHER; note = 2'-O-Methyl-adenosine
  modified_base 37: mod_base = OTHER; note = 2'-O-Methyl-uridine
  modified_base 38: mod_base = OTHER; note = 2'-O-Methyl-adenosine
  modified_base 39: mod_base = OTHER; note = 2'-O-Methyl-guanosine
  modified_base 40: mod_base = OTHER; note = 2'-O-Methyl-cytidine
  modified_base 41: mod_base = OTHER; note = 2'-O-Methyl-adenosine
  modified_base 42: mod_base = OTHER; note = 2'-O-Methyl-adenosine
  modified_base 45: mod_base = OTHER; note = uridine phosphorothioate
  modified_base 46: mod_base = OTHER; note = 2'-O-Methyl-adenosine
  modified_base 48: mod_base = OTHER; note = 2'-O-Methyl-adenosine
  modified_base 50: mod_base = OTHER; note = 2'-O-Methyl-uridine
  modified_base 52: mod_base = OTHER; note = 2'-O-Methyl-adenosine
  modified_base 53: mod_base = OTHER; note = 2'-O-Methyl-guanosine
  modified_base 54: mod_base = OTHER; note = 2'-O-Methyl-guanosine
  modified_base 57: mod_base = OTHER; note = 2'-O-Methyl-adenosine
  modified_base 61: mod_base = OTHER; note = 2'-O-Methyl-cytidine
  modified_base 64: mod_base = OTHER; note = uridine phosphorothioate
  modified_base 66: mod_base = OTHER; note = 2'-O-Methyl-uridine
  modified_base 67: mod_base = OTHER; note = 2'-O-Methyl-cytidine
  modified_base 70: mod_base = OTHER; note = 2'-O-Methyl-cytidine
  modified_base 71: mod_base = OTHER; note = 2'-O-Methyl-uridine
  modified_base 72: mod_base = OTHER; note = 2'-O-Methyl-uridine
  modified_base 74: mod_base = OTHER; note = 2'-O-Methyl-adenosine
  modified_base 75: mod_base = OTHER; note = 2'-O-Methyl-adenosine
  modified_base 76: mod_base = OTHER; note = 2'-O-Methyl-adenosine
  modified_base 77: mod_base = OTHER; note = 2'-O-Methyl-adenosine
  modified_base 78: mod_base = OTHER; note = 2'-O-Methyl-adenosine
  modified_base 79: mod_base = OTHER; note = 2'-O-Methyl-guanosine
  modified_base 80: mod_base = OTHER; note = 2'-O-Methyl-uridine
  modified_base 82: mod_base = OTHER; note = 2'-O-Methyl-guanosine
  modified_base 83: mod_base = OTHER; note = 2'-O-Methyl-cytidine
  modified_base 84: mod_base = OTHER; note = 2'-O-Methyl-adenosine
  modified_base 85: mod_base = OTHER; note = 2'-O-Methyl-cytidine
  modified_base 86: mod_base = OTHER; note = 2'-O-Methyl-cytidine
  modified_base 87: mod_base = OTHER; note = 2'-O-Methyl-guanosine
  modified_base 89: mod_base = OTHER; note = 2'-O-Methyl-guanosine
  modified_base 92: mod_base = OTHER; note = 2'-O-Methyl-guanosine
  modified_base 93: mod_base = OTHER; note = 2'-O-Methyl-guanosine
  modified_base 94: mod_base = OTHER; note = 2'-O-Methyl-uridine
  modified_base 95: mod_base = OTHER; note = 2'-O-Methyl-guanosine
  modified_base 96: mod_base = OTHER; note = 2'-O-Methyl-cytidine
  modified_base 97: mod_base = OTHER; note = 2'-O-Methyl-uridine
  modified_base 98: mod_base = OTHER; note = 2'-O-Methyl-uridine phosphorothioate
  modified_base 99: mod_base = OTHER; note = 2'-O-Methyl-uridine phosphorothioate
  modified_base 100: mod_base = OTHER; note = 2'-O-Methyl-uridine

SEQ ID NO: 1759 - RNA, 103 nt, synthetic construct; identical to SEQ ID NO: 1700
  source 1..103: mol_type = other RNA; note = Description of Artificial Sequence: Synthetic polynucleotide
  modified_base 1: mod_base = OTHER; note = 2'-O-Methyl-cytidine phosphorothioate
  modified_base 2: mod_base = OTHER; note = 2'-O-Methyl-adenosine phosphorothioate
  modified_base 3: mod_base = OTHER; note = 2'-O-Methyl-guanosine phosphorothioate
  modified_base 21: mod_base = OTHER; note = 2'-O-Methyl-guanosine
  modified_base 28: mod_base = OTHER; note = 2'-O-Methyl-adenosine
  modified_base 29: mod_base = OTHER; note = 2'-O-Methyl-guanosine
  modified_base 30: mod_base = OTHER; note = 2'-O-Methyl-cytidine
  modified_base 31: mod_base = OTHER; note = 2'-O-Methyl-uridine
  modified_base 32: mod_base = OTHER; note = 2'-O-Methyl-adenosine
  modified_base 34: mod_base = OTHER; note = 2'-O-Methyl-adenosine
  modified_base 35: mod_base = OTHER; note = 2'-O-Methyl-adenosine
  modified_base 36: mod_base = OTHER; note = 2'-O-Methyl-adenosine
  modified_base 37: mod_base = OTHER; note = 2'-O-Methyl-uridine
  modified_base 38: mod_base = OTHER; note = 2'-O-Methyl-adenosine
  modified_base 39: mod_base = OTHER; note = 2'-O-Methyl-guanosine
  modified_base 40: mod_base = OTHER; note = 2'-O-Methyl-cytidine
  modified_base 41: mod_base = OTHER; note = 2'-O-Methyl-adenosine
  modified_base 42: mod_base = OTHER; note = 2'-O-Methyl-adenosine
  modified_base 45: mod_base = OTHER; note = uridine phosphorothioate
  modified_base 46: mod_base = OTHER; note = 2'-O-Methyl-adenosine
  modified_base 48: mod_base = OTHER; note = 2'-O-Methyl-adenosine
  modified_base 50: mod_base = OTHER; note = 2'-O-Methyl-uridine
  modified_base 52: mod_base = OTHER; note = 2'-O-Methyl-adenosine
  modified_base 53: mod_base = OTHER; note = 2'-O-Methyl-guanosine
  modified_base 54: mod_base = OTHER; note = 2'-O-Methyl-guanosine
  modified_base 55: mod_base = OTHER; note = 2'-O-Methyl-cytidine
  modified_base 56: mod_base = OTHER; note = 2'-O-Methyl-uridine
  modified_base 57: mod_base = OTHER; note = 2'-O-Methyl-adenosine
  modified_base 60: mod_base = OTHER; note = 2'-O-Methyl-cytidine
  modified_base 61: mod_base = OTHER; note = 2'-O-Methyl-cytidine
  modified_base 64: mod_base = OTHER; note = uridine phosphorothioate
  modified_base 66: mod_base = OTHER; note = 2'-O-Methyl-uridine
  modified_base 67: mod_base = OTHER; note = 2'-O-Methyl-cytidine
  modified_base 70: mod_base = OTHER; note = 2'-O-Methyl-cytidine
  modified_base 71: mod_base = OTHER; note = 2'-O-Methyl-uridine
  modified_base 72: mod_base = OTHER; note = 2'-O-Methyl-uridine
  modified_base 74: mod_base = OTHER; note = 2'-O-Methyl-adenosine
  modified_base 75: mod_base = OTHER; note = 2'-O-Methyl-adenosine
  modified_base 76: mod_base = OTHER; note = 2'-O-Methyl-adenosine
  modified_base 77: mod_base = OTHER; note = 2'-O-Methyl-adenosine
  modified_base 78: mod_base = OTHER; note = 2'-O-Methyl-adenosine
  modified_base 79: mod_base = OTHER; note = 2'-O-Methyl-guanosine
  modified_base 80: mod_base = OTHER; note = 2'-O-Methyl-uridine
  modified_base 81: mod_base = OTHER; note = 2'-O-Methyl-guanosine
  modified_base 83: mod_base = OTHER; note = 2'-O-Methyl-cytidine
  modified_base 84: mod_base = OTHER; note = 2'-O-Methyl-adenosine
  modified_base 85: mod_base = OTHER; note = 2'-O-Methyl-cytidine
  modified_base 86: mod_base = OTHER; note = 2'-O-Methyl-cytidine
  modified_base 87: mod_base = OTHER; note = 2'-O-Methyl-guanosine
  modified_base 88: mod_base = OTHER; note = 2'-O-Methyl-adenosine
  modified_base 89: mod_base = OTHER; note = 2'-O-Methyl-guanosine
  modified_base 90: mod_base = OTHER; note = 2'-O-Methyl-uridine
  modified_base 91: mod_base = OTHER; note = 2'-O-Methyl-cytidine
  modified_base 92: mod_base = OTHER; note = 2'-O-Methyl-guanosine
  modified_base 93: mod_base = OTHER; note = 2'-O-Methyl-guanosine
  modified_base 94: mod_base = OTHER; note = 2'-O-Methyl-uridine
  modified_base 95: mod_base = OTHER; note = 2'-O-Methyl-guanosine
  modified_base 96: mod_base = OTHER; note = 2'-O-Methyl-cytidine
  modified_base 97: mod_base = OTHER; note = 2'-O-Methyl-uridine
  modified_base 98: mod_base = OTHER; note = 2'-O-Methyl-uridine phosphorothioate
  modified_base 99: mod_base = OTHER; note = 2'-O-Methyl-uridine phosphorothioate
  modified_base 100: mod_base = OTHER; note = 2'-O-Methyl-uridine

SEQ ID NO: 1760 - RNA, 103 nt, synthetic construct; identical to SEQ ID NO: 1700
  source 1..103: mol_type = other RNA; note = Description of Artificial Sequence: Synthetic polynucleotide
  modified_base 1: mod_base = OTHER; note = 2'-O-Methyl-cytidine phosphorothioate
  modified_base 2: mod_base = OTHER; note = 2'-O-Methyl-adenosine phosphorothioate
  modified_base 3: mod_base = OTHER; note = 2'-O-Methyl-guanosine phosphorothioate
  modified_base 21: mod_base = OTHER; note = 2'-O-Methyl-guanosine
  modified_base 28: mod_base = OTHER; note = 2'-O-Methyl-adenosine
  modified_base 29: mod_base = OTHER; note = 2'-O-Methyl-guanosine
  modified_base 30: mod_base = OTHER; note = 2'-O-Methyl-cytidine
  modified_base 31: mod_base = OTHER; note = 2'-O-Methyl-uridine
  modified_base 32: mod_base = OTHER; note = 2'-O-Methyl-adenosine
  modified_base 34: mod_base = OTHER; note = 2'-O-Methyl-adenosine
  modified_base 35: mod_base = OTHER; note = 2'-O-Methyl-adenosine
  modified_base 36: mod_base = OTHER; note = 2'-O-Methyl-adenosine
  modified_base 37: mod_base = OTHER; note = 2'-O-Methyl-uridine
  modified_base 38: mod_base = OTHER; note = 2'-O-Methyl-adenosine
  modified_base 39: mod_base = OTHER; note = 2'-O-Methyl-guanosine
  modified_base 40: mod_base = OTHER; note = 2'-O-Methyl-cytidine
  modified_base 41: mod_base = OTHER; note = 2'-O-Methyl-adenosine
  modified_base 42: mod_base = OTHER; note = 2'-O-Methyl-adenosine
  modified_base 45: mod_base = OTHER; note = uridine phosphorothioate
  modified_base 46: mod_base = OTHER; note = 2'-O-Methyl-adenosine
  modified_base 48: mod_base = OTHER; note = 2'-O-Methyl-adenosine
  modified_base 50: mod_base = OTHER; note = 2'-O-Methyl-uridine
  modified_base 52: mod_base = OTHER; note = 2'-O-Methyl-adenosine
  modified_base 53: mod_base = OTHER; note = 2'-O-Methyl-guanosine
  modified_base 54: mod_base = OTHER; note = 2'-O-Methyl-guanosine
  modified_base 57: mod_base = OTHER; note = 2'-O-Methyl-adenosine
  modified_base 61: mod_base = OTHER; note = 2'-O-Methyl-cytidine
  modified_base 64: mod_base = OTHER; note = uridine phosphorothioate
  modified_base 66: mod_base = OTHER; note = 2'-O-Methyl-uridine
  modified_base 67: mod_base = OTHER; note = 2'-O-Methyl-cytidine
  modified_base 70: mod_base = OTHER; note = 2'-O-Methyl-cytidine
  modified_base 71: mod_base = OTHER; note = 2'-O-Methyl-uridine
  modified_base 72: mod_base = OTHER; note = 2'-O-Methyl-uridine
  modified_base 73: mod_base = OTHER; note = 2'-O-Methyl-guanosine
  modified_base 74: mod_base = OTHER; note = 2'-O-Methyl-adenosine
  modified_base 75: mod_base = OTHER; note = 2'-O-Methyl-adenosine
  modified_base 76: mod_base = OTHER; note = 2'-O-Methyl-adenosine
  modified_base 77: mod_base = OTHER; note = 2'-O-Methyl-adenosine
  modified_base 78: mod_base = OTHER; note = 2'-O-Methyl-adenosine
  modified_base 79: mod_base = OTHER; note = 2'-O-Methyl-guanosine
  modified_base 80: mod_base = OTHER; note = 2'-O-Methyl-uridine
  modified_base 82: mod_base = OTHER; note = 2'-O-Methyl-guanosine
  modified_base 83: mod_base = OTHER; note = 2'-O-Methyl-cytidine
  modified_base 84: mod_base = OTHER; note = 2'-O-Methyl-adenosine
  modified_base 85: mod_base = OTHER; note = 2'-O-Methyl-cytidine
  modified_base 86: mod_base = OTHER; note = 2'-O-Methyl-cytidine
  modified_base 87: mod_base = OTHER; note = 2'-O-Methyl-guanosine
  modified_base 89: mod_base = OTHER; note = 2'-O-Methyl-guanosine
  modified_base 92: mod_base = OTHER; note = 2'-O-Methyl-guanosine
  modified_base 93: mod_base = OTHER; note = 2'-O-Methyl-guanosine
  modified_base 94: mod_base = OTHER; note = 2'-O-Methyl-uridine
  modified_base 95: mod_base = OTHER; note = 2'-O-Methyl-guanosine
  modified_base 96: mod_base = OTHER; note = 2'-O-Methyl-cytidine
  modified_base 97: mod_base = OTHER; note = 2'-O-Methyl-uridine
  modified_base 98: mod_base = OTHER; note = 2'-O-Methyl-uridine phosphorothioate
  modified_base 99: mod_base = OTHER; note = 2'-O-Methyl-uridine phosphorothioate
  modified_base 100: mod_base = OTHER; note = 2'-O-Methyl-uridine

SEQ ID NO: 1761 - RNA, 103 nt, synthetic construct; identical to SEQ ID NO: 1643
  source 1..103: mol_type = other RNA; note = Description of Artificial Sequence: Synthetic polynucleotide
  modified_base 1: mod_base = OTHER; note = 2'-O-Methyl-cytidine phosphorothioate
  modified_base 2: mod_base = OTHER; note = 2'-O-Methyl-cytidine phosphorothioate
  modified_base 3: mod_base = OTHER; note = 2'-O-Methyl-cytidine phosphorothioate
  modified_base 21: mod_base = OTHER; note = 2'-O-Methyl-guanosine
  modified_base 25: mod_base = OTHER; note = uridine phosphorothioate
  modified_base 28: mod_base = OTHER; note = 2'-O-Methyl-adenosine
  modified_base 29: mod_base = OTHER; note = 2'-O-Methyl-guanosine
  modified_base 30: mod_base = OTHER; note = 2'-O-Methyl-cytidine
  modified_base 31: mod_base = OTHER; note = 2'-O-Methyl-uridine
  modified_base 32: mod_base = OTHER; note = 2'-O-Methyl-adenosine
  modified_base 34: mod_base = OTHER; note = 2'-O-Methyl-adenosine
  modified_base 35: mod_base = OTHER; note = 2'-O-Methyl-adenosine
  modified_base 36: mod_base = OTHER; note = 2'-O-Methyl-adenosine
  modified_base 37: mod_base = OTHER; note = 2'-O-Methyl-uridine
  modified_base 38: mod_base = OTHER; note = 2'-O-Methyl-adenosine
  modified_base 39: mod_base = OTHER; note = 2'-O-Methyl-guanosine
  modified_base 40: mod_base = OTHER; note = 2'-O-Methyl-cytidine
  modified_base 41: mod_base = OTHER; note = 2'-O-Methyl-adenosine
  modified_base 42: mod_base = OTHER; note = 2'-O-Methyl-adenosine
  modified_base 45: mod_base = OTHER; note = uridine phosphorothioate
  modified_base 46: mod_base = OTHER; note = 2'-O-Methyl-adenosine
  modified_base 48: mod_base = OTHER; note = 2'-O-Methyl-adenosine
  modified_base 50: mod_base = OTHER; note = 2'-O-Methyl-uridine
  modified_base 52: mod_base = OTHER; note = 2'-O-Methyl-adenosine
  modified_base 53: mod_base = OTHER; note = 2'-O-Methyl-guanosine
  modified_base 54: mod_base = OTHER; note = 2'-O-Methyl-guanosine
  modified_base 57: mod_base = OTHER; note = 2'-O-Methyl-adenosine
  modified_base 61: mod_base = OTHER; note = 2'-O-Methyl-cytidine
  modified_base 66: mod_base = OTHER; note = 2'-O-Methyl-uridine
  modified_base 67: mod_base = OTHER; note = 2'-O-Methyl-cytidine
  modified_base 70: mod_base = OTHER; note = 2'-O-Methyl-cytidine
  modified_base 71: mod_base = OTHER; note = 2'-O-Methyl-uridine
  modified_base 72: mod_base = OTHER; note = 2'-O-Methyl-uridine
  modified_base 74: mod_base = OTHER; note = 2'-O-Methyl-adenosine
  modified_base 75: mod_base = OTHER; note = 2'-O-Methyl-adenosine
  modified_base 76: mod_base = OTHER; note = 2'-O-Methyl-adenosine
  modified_base 77: mod_base = OTHER; note = 2'-O-Methyl-adenosine
  modified_base 78: mod_base = OTHER; note = 2'-O-Methyl-adenosine
  modified_base 79: mod_base = OTHER; note = 2'-O-Methyl-guanosine
  modified_base 80: mod_base = OTHER; note = 2'-O-Methyl-uridine
  modified_base 82: mod_base = OTHER; note = 2'-O-Methyl-guanosine
  modified_base 83: mod_base = OTHER; note = 2'-O-Methyl-cytidine
  modified_base 84: mod_base = OTHER; note = 2'-O-Methyl-adenosine
  modified_base 85: mod_base = OTHER; note = 2'-O-Methyl-cytidine
  modified_base 86: mod_base = OTHER; note = 2'-O-Methyl-cytidine
  modified_base 87: mod_base = OTHER; note = 2'-O-Methyl-guanosine
  modified_base 89: mod_base = OTHER; note = 2'-O-Methyl-guanosine
  modified_base 92: mod_base = OTHER; note = 2'-O-Methyl-guanosine
  modified_base 93: mod_base = OTHER; note = 2'-O-Methyl-guanosine
  modified_base 94: mod_base = OTHER; note = 2'-O-Methyl-uridine
  modified_base 95: mod_base = OTHER; note = 2'-O-Methyl-guanosine
  modified_base 96: mod_base = OTHER; note = 2'-O-Methyl-cytidine
  modified_base 97: mod_base = OTHER; note = 2'-O-Methyl-uridine
  modified_base 98: mod_base = OTHER; note = 2'-O-Methyl-uridine phosphorothioate
  modified_base 99: mod_base = OTHER; note = 2'-O-Methyl-uridine phosphorothioate
  modified_base 100: mod_base = OTHER; note = 2'-O-Methyl-uridine

SEQ ID NO: 1762 - RNA, 103 nt, synthetic construct; identical to SEQ ID NO: 1699
  source 1..103: mol_type = other RNA; note = Description of Artificial Sequence: Synthetic polynucleotide
  modified_base 1: mod_base = OTHER; note = 2'-O-Methyl-guanosine phosphorothioate
  modified_base 2: mod_base = OTHER; note = 2'-O-Methyl-adenosine phosphorothioate
  modified_base 3: mod_base = OTHER; note = 2'-O-Methyl-guanosine phosphorothioate
  modified_base 21: mod_base = OTHER; note = 2'-O-Methyl-guanosine
  modified_base 25: mod_base = OTHER; note = uridine phosphorothioate
  modified_base 28: mod_base = OTHER; note = 2'-O-Methyl-adenosine
  modified_base 29: mod_base = OTHER; note = 2'-O-Methyl-guanosine
  modified_base 30: mod_base = OTHER; note = 2'-O-Methyl-cytidine
  modified_base 31: mod_base = OTHER; note = 2'-O-Methyl-uridine
  modified_base 32: mod_base = OTHER; note = 2'-O-Methyl-adenosine
  modified_base 34: mod_base = OTHER; note = 2'-O-Methyl-adenosine
  modified_base 35: mod_base = OTHER; note = 2'-O-Methyl-adenosine
  modified_base 36: mod_base = OTHER; note = 2'-O-Methyl-adenosine
  modified_base 37: mod_base = OTHER; note = 2'-O-Methyl-uridine
  modified_base 38: mod_base = OTHER; note = 2'-O-Methyl-adenosine
  modified_base 39: mod_base = OTHER; note = 2'-O-Methyl-guanosine
  modified_base 40: mod_base = OTHER; note = 2'-O-Methyl-cytidine
  modified_base 41: mod_base = OTHER; note = 2'-O-Methyl-adenosine
  modified_base 42: mod_base = OTHER; note = 2'-O-Methyl-adenosine
  modified_base 45: mod_base = OTHER; note = uridine phosphorothioate
  modified_base 46: mod_base = OTHER; note = 2'-O-Methyl-adenosine
  modified_base 48: mod_base = OTHER; note = 2'-O-Methyl-adenosine
  modified_base 50: mod_base = OTHER; note = 2'-O-Methyl-uridine
  modified_base 52: mod_base = OTHER; note = 2'-O-Methyl-adenosine
  modified_base 53: mod_base = OTHER; note = 2'-O-Methyl-guanosine
  modified_base 54: mod_base = OTHER; note = 2'-O-Methyl-guanosine
  modified_base 57: mod_base = OTHER; note = 2'-O-Methyl-adenosine
  modified_base 61: mod_base = OTHER; note = 2'-O-Methyl-cytidine
  modified_base 66: mod_base = OTHER; note = 2'-O-Methyl-uridine
  modified_base 67: mod_base = OTHER; note = 2'-O-Methyl-cytidine
  modified_base 70: mod_base = OTHER; note = 2'-O-Methyl-cytidine
  modified_base 71: mod_base = OTHER; note = 2'-O-Methyl-uridine
  modified_base 72: mod_base = OTHER; note = 2'-O-Methyl-uridine
  modified_base 74: mod_base = OTHER; note = 2'-O-Methyl-adenosine
  modified_base 75: mod_base = OTHER; note = 2'-O-Methyl-adenosine
  modified_base 76: mod_base = OTHER; note = 2'-O-Methyl-adenosine
  modified_base 77: mod_base = OTHER; note = 2'-O-Methyl-adenosine
  modified_base 78: mod_base = OTHER; note = 2'-O-Methyl-adenosine
  modified_base 79: mod_base = OTHER; note = 2'-O-Methyl-guanosine
  modified_base 80: mod_base = OTHER; note = 2'-O-Methyl-uridine
  modified_base 82: mod_base = OTHER; note = 2'-O-Methyl-guanosine
  modified_base 83: mod_base = OTHER; note = 2'-O-Methyl-cytidine
  modified_base 84: mod_base = OTHER; note = 2'-O-Methyl-adenosine
  modified_base 85: mod_base = OTHER; note = 2'-O-Methyl-cytidine
  modified_base 86: mod_base = OTHER; note = 2'-O-Methyl-cytidine
  modified_base 87: mod_base = OTHER; note = 2'-O-Methyl-guanosine
  modified_base 89: mod_base = OTHER; note = 2'-O-Methyl-guanosine
  modified_base 92: mod_base = OTHER; note = 2'-O-Methyl-guanosine
  modified_base 93: mod_base = OTHER; note = 2'-O-Methyl-guanosine
  modified_base 94: mod_base = OTHER; note = 2'-O-Methyl-uridine
  modified_base 95: mod_base = OTHER; note = 2'-O-Methyl-guanosine
  modified_base 96: mod_base = OTHER; note = 2'-O-Methyl-cytidine
  modified_base 97: mod_base = OTHER; note = 2'-O-Methyl-uridine
  modified_base 98: mod_base = OTHER; note = 2'-O-Methyl-uridine phosphorothioate
  modified_base 99: mod_base = OTHER; note = 2'-O-Methyl-uridine phosphorothioate
  modified_base 100: mod_base = OTHER; note = 2'-O-Methyl-uridine

SEQ ID NO: 1763 - RNA, 103 nt, synthetic construct; identical to SEQ ID NO: 1700
  source 1..103: mol_type = other RNA; note = Description of Artificial Sequence: Synthetic polynucleotide
  modified_base 1: mod_base = OTHER; note = 2'-O-Methyl-cytidine phosphorothioate
  modified_base 2: mod_base = OTHER; note = 2'-O-Methyl-adenosine phosphorothioate
  modified_base 3: mod_base = OTHER; note = 2'-O-Methyl-guanosine phosphorothioate
  modified_base 21: mod_base = OTHER; note = 2'-O-Methyl-guanosine
  modified_base 25: mod_base = OTHER; note = uridine phosphorothioate
  modified_base 28: mod_base = OTHER; note = 2'-O-Methyl-adenosine
  modified_base 29: mod_base = OTHER; note = 2'-O-Methyl-guanosine
  modified_base 30: mod_base = OTHER; note = 2'-O-Methyl-cytidine
  modified_base 31: mod_base = OTHER; note = 2'-O-Methyl-uridine
  modified_base 32: mod_base = OTHER; note = 2'-O-Methyl-adenosine
  modified_base 34: mod_base = OTHER; note = 2'-O-Methyl-adenosine
  modified_base 35: mod_base = OTHER; note = 2'-O-Methyl-adenosine
  modified_base 36: mod_base = OTHER; note = 2'-O-Methyl-adenosine
  modified_base 37: mod_base = OTHER; note = 2'-O-Methyl-uridine
  modified_base 38: mod_base = OTHER; note = 2'-O-Methyl-adenosine
  modified_base 39: mod_base = OTHER; note = 2'-O-Methyl-guanosine
  modified_base 40: mod_base = OTHER; note = 2'-O-Methyl-cytidine
  modified_base 41: mod_base = OTHER; note = 2'-O-Methyl-adenosine
  modified_base 42: mod_base = OTHER; note = 2'-O-Methyl-adenosine
  modified_base 45: mod_base = OTHER; note = uridine phosphorothioate
  modified_base 46: mod_base = OTHER; note = 2'-O-Methyl-adenosine
  modified_base 48: mod_base = OTHER; note = 2'-O-Methyl-adenosine
  modified_base 50: mod_base = OTHER; note = 2'-O-Methyl-uridine
  modified_base 52: mod_base = OTHER; note = 2'-O-Methyl-adenosine
  modified_base 53: mod_base = OTHER; note = 2'-O-Methyl-guanosine
  modified_base 54: mod_base = OTHER; note = 2'-O-Methyl-guanosine
  modified_base 55: mod_base = OTHER; note = 2'-O-Methyl-cytidine
  modified_base 56: mod_base = OTHER; note = 2'-O-Methyl-uridine
  modified_base 57: mod_base = OTHER; note = 2'-O-Methyl-adenosine
  modified_base 60: mod_base = OTHER; note = 2'-O-Methyl-cytidine
  modified_base 61: mod_base = OTHER; note = 2'-O-Methyl-cytidine
  modified_base 66: mod_base = OTHER; note = 2'-O-Methyl-uridine
  modified_base 67: mod_base = OTHER; note = 2'-O-Methyl-cytidine
  modified_base 70: mod_base = OTHER; note = 2'-O-Methyl-cytidine
  modified_base 71: mod_base = OTHER; note = 2'-O-Methyl-uridine
  modified_base 72: mod_base = OTHER; note = 2'-O-Methyl-uridine
  modified_base 74: mod_base = OTHER; note = 2'-O-Methyl-adenosine
  modified_base 75: mod_base = OTHER; note = 2'-O-Methyl-adenosine
  modified_base 76: mod_base = OTHER; note = 2'-O-Methyl-adenosine
  modified_base 77: mod_base = OTHER; note = 2'-O-Methyl-adenosine
  modified_base 78: mod_base = OTHER; note = 2'-O-Methyl-adenosine
  modified_base 79: mod_base = OTHER; note = 2'-O-Methyl-guanosine
  modified_base 80: mod_base = OTHER; note = 2'-O-Methyl-uridine
  modified_base 81: mod_base = OTHER; note = 2'-O-Methyl-guanosine
  modified_base 83: mod_base = OTHER; note = 2'-O-Methyl-cytidine
  modified_base 84: mod_base = OTHER; note = 2'-O-Methyl-adenosine
  modified_base 85: mod_base = OTHER; note = 2'-O-Methyl-cytidine
  modified_base 86: mod_base = OTHER; note = 2'-O-Methyl-cytidine
  modified_base 87: mod_base = OTHER; note = 2'-O-Methyl-guanosine
  modified_base 88: mod_base = OTHER; note = 2'-O-Methyl-adenosine
  modified_base 89: mod_base = OTHER; note = 2'-O-Methyl-guanosine
  modified_base 90: mod_base = OTHER; note = 2'-O-Methyl-uridine
  modified_base 91: mod_base = OTHER; note = 2'-O-Methyl-cytidine
  modified_base 92: mod_base = OTHER; note = 2'-O-Methyl-guanosine
  modified_base 93: mod_base = OTHER; note = 2'-O-Methyl-guanosine
  modified_base 94: mod_base = OTHER; note = 2'-O-Methyl-uridine
  modified_base 95: mod_base = OTHER; note = 2'-O-Methyl-guanosine
  modified_base 96: mod_base = OTHER; note = 2'-O-Methyl-cytidine
  modified_base 97: mod_base = OTHER; note = 2'-O-Methyl-uridine
  modified_base 98: mod_base = OTHER; note = 2'-O-Methyl-uridine phosphorothioate
  modified_base 99: mod_base = OTHER; note = 2'-O-Methyl-uridine phosphorothioate
  modified_base 100: mod_base = OTHER; note = 2'-O-Methyl-uridine

SEQ ID NO: 1764 - RNA, 103 nt, synthetic construct; identical to SEQ ID NO: 1643
  source 1..103: mol_type = other RNA; note = Description of Artificial Sequence: Synthetic polynucleotide
  modified_base 1: mod_base = OTHER; note = 2'-O-Methyl-cytidine phosphorothioate
  modified_base 2: mod_base = OTHER; note = 2'-O-Methyl-cytidine phosphorothioate
  modified_base 3: mod_base = OTHER; note = 2'-O-Methyl-cytidine phosphorothioate
  modified_base 21: mod_base = OTHER; note = 2'-O-Methyl-guanosine
  modified_base 25: mod_base = OTHER; note = uridine phosphorothioate
  modified_base 28: mod_base = OTHER; note = 2'-O-Methyl-adenosine
  modified_base 29: mod_base = OTHER; note = 2'-O-Methyl-guanosine
  modified_base 30: mod_base = OTHER; note = 2'-O-Methyl-cytidine
  modified_base 31: mod_base = OTHER; note = 2'-O-Methyl-uridine
  modified_base 32: mod_base = OTHER; note = 2'-O-Methyl-adenosine
  modified_base 34: mod_base = OTHER; note = 2'-O-Methyl-adenosine
  modified_base 35: mod_base = OTHER; note = 2'-O-Methyl-adenosine
  modified_base 36: mod_base = OTHER; note = 2'-O-Methyl-adenosine
  modified_base 37: mod_base = OTHER; note = 2'-O-Methyl-uridine
  modified_base 38: mod_base = OTHER; note = 2'-O-Methyl-adenosine
  modified_base 39: mod_base = OTHER; note = 2'-O-Methyl-guanosine
  modified_base 40: mod_base = OTHER; note = 2'-O-Methyl-cytidine
  modified_base 41: mod_base = OTHER; note = 2'-O-Methyl-adenosine
  modified_base 42: mod_base = OTHER; note = 2'-O-Methyl-adenosine
  modified_base 46: mod_base = OTHER; note = 2'-O-Methyl-adenosine
  modified_base 48: mod_base = OTHER; note = 2'-O-Methyl-adenosine
  modified_base 50: mod_base = OTHER; note = 2'-O-Methyl-uridine
  modified_base 52: mod_base = OTHER; note = 2'-O-Methyl-adenosine
  modified_base 53: mod_base = OTHER; note = 2'-O-Methyl-guanosine
  modified_base 54: mod_base = OTHER; note = 2'-O-Methyl-guanosine
  modified_base 57: mod_base = OTHER; note = 2'-O-Methyl-adenosine
  modified_base 61: mod_base = OTHER; note = 2'-O-Methyl-cytidine
  modified_base 64: mod_base = OTHER; note = uridine phosphorothioate
  modified_base 66: mod_base = OTHER; note = 2'-O-Methyl-uridine
  modified_base 67: mod_base = OTHER; note = 2'-O-Methyl-cytidine
  modified_base 70: mod_base = OTHER; note = 2'-O-Methyl-cytidine
  modified_base 71: mod_base = OTHER; note = 2'-O-Methyl-uridine
  modified_base 72: mod_base = OTHER; note = 2'-O-Methyl-uridine
  modified_base 74: mod_base = OTHER; note = 2'-O-Methyl-adenosine
  modified_base 75: mod_base = OTHER; note = 2'-O-Methyl-adenosine
  modified_base 76: mod_base = OTHER; note = 2'-O-Methyl-adenosine
  modified_base 77: mod_base = OTHER; note = 2'-O-Methyl-adenosine
  modified_base 78: mod_base = OTHER; note = 2'-O-Methyl-adenosine
  modified_base 79: mod_base = OTHER; note = 2'-O-Methyl-guanosine
  modified_base 80: mod_base = OTHER; note = 2'-O-Methyl-uridine
  modified_base 82: mod_base = OTHER; note = 2'-O-Methyl-guanosine
  modified_base 83: mod_base = OTHER; note = 2'-O-Methyl-cytidine
  modified_base 84: mod_base = OTHER; note = 2'-O-Methyl-adenosine
  modified_base 85: mod_base = OTHER; note = 2'-O-Methyl-cytidine
  modified_base 86: mod_base = OTHER; note = 2'-O-Methyl-cytidine
  modified_base 87: mod_base = OTHER; note = 2'-O-Methyl-guanosine
  modified_base 89: mod_base = OTHER; note = 2'-O-Methyl-guanosine
  modified_base 92: mod_base = OTHER; note = 2'-O-Methyl-guanosine
  modified_base 93: mod_base = OTHER; note = 2'-O-Methyl-guanosine
  modified_base 94: mod_base = OTHER; note = 2'-O-Methyl-uridine
  modified_base 95: mod_base = OTHER; note = 2'-O-Methyl-guanosine
  modified_base 96: mod_base = OTHER; note = 2'-O-Methyl-cytidine
  modified_base 97: mod_base = OTHER; note = 2'-O-Methyl-uridine
  modified_base 98: mod_base = OTHER; note = 2'-O-Methyl-uridine phosphorothioate
  modified_base 99: mod_base = OTHER; note = 2'-O-Methyl-uridine phosphorothioate
  modified_base 100: mod_base = OTHER; note = 2'-O-Methyl-uridine

SEQ ID NO: 1765 - RNA, 103 nt, synthetic construct; identical to SEQ ID NO: 1699
  source 1..103: mol_type = other RNA; note = Description of Artificial Sequence: Synthetic polynucleotide
  modified_base 1: mod_base = OTHER; note = 2'-O-Methyl-guanosine phosphorothioate
  modified_base 2: mod_base = OTHER; note = 2'-O-Methyl-adenosine phosphorothioate
  modified_base 3: mod_base = OTHER; note = 2'-O-Methyl-guanosine phosphorothioate
  modified_base 21: mod_base = OTHER; note = 2'-O-Methyl-guanosine
  modified_base 25: mod_base = OTHER; note = uridine phosphorothioate
  modified_base 28: mod_base = OTHER; note = 2'-O-Methyl-adenosine
  modified_base 29: mod_base = OTHER; note = 2'-O-Methyl-guanosine
  modified_base 30: mod_base = OTHER; note = 2'-O-Methyl-cytidine
  modified_base 31: mod_base = OTHER; note = 2'-O-Methyl-uridine
  modified_base 32: mod_base = OTHER; note = 2'-O-Methyl-adenosine
  modified_base 34: mod_base = OTHER; note = 2'-O-Methyl-adenosine
  modified_base 35: mod_base = OTHER; note = 2'-O-Methyl-adenosine
  modified_base 36: mod_base = OTHER; note = 2'-O-Methyl-adenosine
  modified_base 37: mod_base = OTHER; note = 2'-O-Methyl-uridine
  modified_base 38: mod_base = OTHER; note = 2'-O-Methyl-adenosine
  modified_base 39: mod_base = OTHER; note = 2'-O-Methyl-guanosine
  modified_base 40: mod_base = OTHER; note = 2'-O-Methyl-cytidine
  modified_base 41: mod_base = OTHER; note = 2'-O-Methyl-adenosine
  modified_base 42: mod_base = OTHER; note = 2'-O-Methyl-adenosine
  modified_base 46: mod_base = OTHER; note = 2'-O-Methyl-adenosine
  modified_base 48: mod_base = OTHER; note = 2'-O-Methyl-adenosine
  modified_base 50: mod_base = OTHER; note = 2'-O-Methyl-uridine
  modified_base 52: mod_base = OTHER; note = 2'-O-Methyl-adenosine
  modified_base 53: mod_base = OTHER; note = 2'-O-Methyl-guanosine
  modified_base 54: mod_base = OTHER; note = 2'-O-Methyl-guanosine
  modified_base 57: mod_base = OTHER; note = 2'-O-Methyl-adenosine
  modified_base 61: mod_base = OTHER; note = 2'-O-Methyl-cytidine
  modified_base 64: mod_base = OTHER; note = uridine phosphorothioate
  modified_base 66: mod_base = OTHER; note = 2'-O-Methyl-uridine
  modified_base 67: mod_base = OTHER; note = 2'-O-Methyl-cytidine
  modified_base 70: mod_base = OTHER; note = 2'-O-Methyl-cytidine
  modified_base 71: mod_base = OTHER; note = 2'-O-Methyl-uridine
  modified_base 72: mod_base = OTHER; note = 2'-O-Methyl-uridine
  modified_base 74: mod_base = OTHER; note = 2'-O-Methyl-adenosine
  modified_base 75: mod_base = OTHER; note = 2'-O-Methyl-adenosine
  modified_base 76: mod_base = OTHER; note = 2'-O-Methyl-adenosine
  modified_base 77: mod_base = OTHER; note = 2'-O-Methyl-adenosine
  modified_base 78: mod_base = OTHER; note = 2'-O-Methyl-adenosine
  modified_base 79: mod_base = OTHER; note = 2'-O-Methyl-guanosine
  modified_base 80: mod_base = OTHER; note = 2'-O-Methyl-uridine
  modified_base 82: mod_base = OTHER; note = 2'-O-Methyl-guanosine
  modified_base 83: mod_base = OTHER; note = 2'-O-Methyl-cytidine
  modified_base 84: mod_base = OTHER; note = 2'-O-Methyl-adenosine
  modified_base 85: mod_base = OTHER; note = 2'-O-Methyl-cytidine
  modified_base 86: mod_base = OTHER; note = 2'-O-Methyl-cytidine
  modified_base 87: mod_base = OTHER; note = 2'-O-Methyl-guanosine
  modified_base 89: mod_base = OTHER; note = 2'-O-Methyl-guanosine
  modified_base 92: mod_base = OTHER; note = 2'-O-Methyl-guanosine
  modified_base 93: mod_base = OTHER; note = 2'-O-Methyl-guanosine
  modified_base 94: mod_base = OTHER; note = 2'-O-Methyl-uridine
  modified_base 95: mod_base = OTHER; note = 2'-O-Methyl-guanosine
  modified_base 96: mod_base = OTHER; note = 2'-O-Methyl-cytidine
  modified_base 97: mod_base = OTHER; note = 2'-O-Methyl-uridine
  modified_base 98: mod_base = OTHER; note = 2'-O-Methyl-uridine phosphorothioate
  modified_base 99: mod_base = OTHER; note = 2'-O-Methyl-uridine phosphorothioate
  modified_base 100: mod_base = OTHER; note = 2'-O-Methyl-uridine

SEQ ID NO: 1766 - RNA, 103 nt, synthetic construct; identical to SEQ ID NO: 1700
  source 1..103: mol_type = other RNA; note = Description of Artificial Sequence: Synthetic polynucleotide
  modified_base 1: mod_base = OTHER; note = 2'-O-Methyl-cytidine phosphorothioate
  modified_base 2: mod_base = OTHER; note = 2'-O-Methyl-adenosine phosphorothioate
  modified_base 3: mod_base = OTHER; note = 2'-O-Methyl-guanosine phosphorothioate
  modified_base 21: mod_base = OTHER; note = 2'-O-Methyl-guanosine
  modified_base 25: mod_base = OTHER; note = uridine phosphorothioate
  modified_base 28: mod_base = OTHER; note = 2'-O-Methyl-adenosine
  modified_base 29: mod_base = OTHER; note = 2'-O-Methyl-guanosine
  modified_base 30: mod_base = OTHER; note = 2'-O-Methyl-cytidine
  modified_base 31: mod_base = OTHER; note = 2'-O-Methyl-uridine
  modified_base 32: mod_base = OTHER; note = 2'-O-Methyl-adenosine
  modified_base 34: mod_base = OTHER; note = 2'-O-Methyl-adenosine
  modified_base 35: mod_base = OTHER; note = 2'-O-Methyl-adenosine
  modified_base 36: mod_base = OTHER; note = 2'-O-Methyl-adenosine
  modified_base 37: mod_base = OTHER; note = 2'-O-Methyl-uridine
  modified_base 38: mod_base = OTHER; note = 2'-O-Methyl-adenosine
  modified_base 39: mod_base = OTHER; note = 2'-O-Methyl-guanosine
  modified_base 40: mod_base = OTHER; note = 2'-O-Methyl-cytidine
  modified_base 41: mod_base = OTHER; note = 2'-O-Methyl-adenosine
  modified_base 42: mod_base = OTHER; note = 2'-O-Methyl-adenosine
  modified_base 46: mod_base = OTHER; note = 2'-O-Methyl-adenosine
  modified_base 48: mod_base = OTHER; note = 2'-O-Methyl-adenosine
  modified_base 50: mod_base = OTHER; note = 2'-O-Methyl-uridine
  modified_base 52: mod_base = OTHER; note = 2'-O-Methyl-adenosine
  modified_base 53: mod_base = OTHER; note = 2'-O-Methyl-guanosine
  modified_base 54: mod_base = OTHER; note = 2'-O-Methyl-guanosine
  modified_base 55: mod_base = OTHER; note = 2'-O-Methyl-cytidine
  modified_base 56: mod_base = OTHER; note = 2'-O-Methyl-uridine
  modified_base 57: mod_base = OTHER; note = 2'-O-Methyl-adenosine
  modified_base 60: mod_base = OTHER; note = 2'-O-Methyl-cytidine
  modified_base 61: mod_base = OTHER; note = 2'-O-Methyl-cytidine
  modified_base 64: mod_base = OTHER; note = uridine phosphorothioate
  modified_base 66: mod_base = OTHER; note = 2'-O-Methyl-uridine
  modified_base 67: mod_base = OTHER; note = 2'-O-Methyl-cytidine
  modified_base 70: mod_base = OTHER; note = 2'-O-Methyl-cytidine
  modified_base 71: mod_base = OTHER; note = 2'-O-Methyl-uridine
  modified_base 72: mod_base = OTHER; note = 2'-O-Methyl-uridine
  modified_base 74: mod_base = OTHER; note = 2'-O-Methyl-adenosine
  modified_base 75: mod_base = OTHER; note = 2'-O-Methyl-adenosine
  modified_base 76: mod_base = OTHER; note = 2'-O-Methyl-adenosine
  modified_base 77: mod_base = OTHER; note = 2'-O-Methyl-adenosine
  modified_base 78: mod_base = OTHER; note = 2'-O-Methyl-adenosine
  modified_base 79: mod_base = OTHER; note = 2'-O-Methyl-guanosine
  modified_base 80: mod_base = OTHER; note = 2'-O-Methyl-uridine
  modified_base 81: mod_base = OTHER; note = 2'-O-Methyl-guanosine
  modified_base 83: mod_base = OTHER; note = 2'-O-Methyl-cytidine
  modified_base 84: mod_base = OTHER; note = 2'-O-Methyl-adenosine
  modified_base 85: mod_base = OTHER; note = 2'-O-Methyl-cytidine
  modified_base 86: mod_base = OTHER; note = 2'-O-Methyl-cytidine
  modified_base 87: mod_base = OTHER; note = 2'-O-Methyl-guanosine
  modified_base 88: mod_base = OTHER; note = 2'-O-Methyl-adenosine
  modified_base 89: mod_base = OTHER; note = 2'-O-Methyl-guanosine
  modified_base 90: mod_base = OTHER; note = 2'-O-Methyl-uridine
  modified_base 91: mod_base = OTHER; note = 2'-O-Methyl-cytidine
  modified_base 92: mod_base = OTHER; note = 2'-O-Methyl-guanosine
  modified_base 93: mod_base = OTHER; note = 2'-O-Methyl-guanosine
  modified_base 94: mod_base = OTHER; note = 2'-O-Methyl-uridine
  modified_base 95: mod_base = OTHER; note = 2'-O-Methyl-guanosine
  modified_base 96: mod_base = OTHER; note = 2'-O-Methyl-cytidine
  modified_base 97: mod_base = OTHER; note = 2'-O-Methyl-uridine
  modified_base 98: mod_base = OTHER; note = 2'-O-Methyl-uridine phosphorothioate
  modified_base 99: mod_base = OTHER; note = 2'-O-Methyl-uridine phosphorothioate
  modified_base 100: mod_base = OTHER; note = 2'-O-Methyl-uridine

SEQ ID NO: 1767 - RNA, 103 nt, synthetic construct; identical to SEQ ID NO: 1643
  source 1..103: mol_type = other RNA; note = Description of Artificial Sequence: Synthetic polynucleotide
  modified_base 1: mod_base = OTHER; note = 2'-O-Methyl-cytidine phosphorothioate
  modified_base 2: mod_base = OTHER; note = 2'-O-Methyl-cytidine phosphorothioate
  modified_base 3: mod_base = OTHER; note = 2'-O-Methyl-cytidine phosphorothioate
  modified_base 21: mod_base = OTHER; note = 2'-O-Methyl-guanosine
  modified_base 25: mod_base = OTHER; note = uridine phosphorothioate
  modified_base 28: mod_base = OTHER; note = 2'-O-Methyl-adenosine
  modified_base 29: mod_base = OTHER; note = 2'-O-Methyl-guanosine
  modified_base 30: mod_base = OTHER; note = 2'-O-Methyl-cytidine
  modified_base 31: mod_base = OTHER; note = 2'-O-Methyl-uridine
  modified_base 32: mod_base = OTHER; note = 2'-O-Methyl-adenosine
  modified_base 34: mod_base = OTHER; note = 2'-O-Methyl-adenosine
  modified_base 35: mod_base = OTHER; note = 2'-O-Methyl-adenosine
  modified_base 36: mod_base = OTHER; note = 2'-O-Methyl-adenosine
  modified_base 37: mod_base = OTHER; note = 2'-O-Methyl-uridine
  modified_base 38: mod_base = OTHER; note = 2'-O-Methyl-adenosine
  modified_base 39: mod_base = OTHER; note = 2'-O-Methyl-guanosine
  modified_base 40: mod_base = OTHER; note = 2'-O-Methyl-cytidine
  modified_base 41: mod_base = OTHER; note = 2'-O-Methyl-adenosine
  modified_base 42: mod_base = OTHER; note = 2'-O-Methyl-adenosine
  modified_base 45: mod_base = OTHER; note = uridine phosphorothioate
  modified_base 46: mod_base = OTHER; note = 2'-O-Methyl-adenosine
  modified_base 48: mod_base = OTHER; note = 2'-O-Methyl-adenosine
  modified_base 50: mod_base = OTHER; note = 2'-O-Methyl-uridine
  modified_base 52: mod_base = OTHER; note = 2'-O-Methyl-adenosine
  modified_base 53: mod_base = OTHER; note = 2'-O-Methyl-guanosine
  modified_base 54: mod_base = OTHER; note = 2'-O-Methyl-guanosine
  modified_base 57: mod_base = OTHER; note = 2'-O-Methyl-adenosine
  modified_base 61: mod_base = OTHER; note = 2'-O-Methyl-cytidine
  modified_base 64: mod_base = OTHER; note = uridine phosphorothioate
  modified_base 66: mod_base = OTHER; note = 2'-O-Methyl-uridine
  modified_base 67: mod_base = OTHER; note = 2'-O-Methyl-cytidine
  modified_base 70: mod_base = OTHER; note = 2'-O-Methyl-cytidine
  modified_base 71: mod_base = OTHER; note = 2'-O-Methyl-uridine
  modified_base 72: mod_base = OTHER; note = 2'-O-Methyl-uridine
  modified_base 74: mod_base = OTHER; note = 2'-O-Methyl-adenosine
  modified_base 75: mod_base = OTHER; note = 2'-O-Methyl-adenosine
  modified_base 76: mod_base = OTHER; note = 2'-O-Methyl-adenosine
  modified_base 77: mod_base = OTHER; note = 2'-O-Methyl-adenosine
  modified_base 78: mod_base = OTHER; note = 2'-O-Methyl-adenosine
  modified_base 79: mod_base = OTHER; note = 2'-O-Methyl-guanosine
  modified_base 80: mod_base = OTHER; note = 2'-O-Methyl-uridine
  modified_base 82: mod_base = OTHER; note = 2'-O-Methyl-guanosine
  modified_base 83: mod_base = OTHER; note = 2'-O-Methyl-cytidine
  modified_base 84: mod_base = OTHER; note = 2'-O-Methyl-adenosine
  modified_base 85: mod_base = OTHER; note = 2'-O-Methyl-cytidine
  modified_base 86: mod_base = OTHER; note = 2'-O-Methyl-cytidine
  modified_base 87: mod_base = OTHER; note = 2'-O-Methyl-guanosine
  modified_base 89: mod_base = OTHER; note = 2'-O-Methyl-guanosine
  modified_base 92: mod_base = OTHER; note = 2'-O-Methyl-guanosine
  modified_base 93: mod_base = OTHER; note = 2'-O-Methyl-guanosine
  modified_base 94: mod_base = OTHER; note = 2'-O-Methyl-uridine
  modified_base 95: mod_base = OTHER; note = 2'-O-Methyl-guanosine
  modified_base 96: mod_base = OTHER; note = 2'-O-Methyl-cytidine
  modified_base 97: mod_base = OTHER; note = 2'-O-Methyl-uridine
  modified_base 98: mod_base = OTHER; note = 2'-O-Methyl-uridine phosphorothioate
  modified_base 99: mod_base = OTHER; note = 2'-O-Methyl-uridine phosphorothioate
  modified_base 100: mod_base = OTHER; note = 2'-O-Methyl-uridine

SEQ ID NO: 1768 - RNA, 103 nt, synthetic construct; identical to SEQ ID NO: 1699
  source 1..103: mol_type = other RNA; note = Description of Artificial Sequence: Synthetic polynucleotide
  modified_base 1: mod_base = OTHER; note = 2'-O-Methyl-guanosine phosphorothioate
  modified_base 2: mod_base = OTHER; note = 2'-O-Methyl-adenosine phosphorothioate
  modified_base 3: mod_base = OTHER; note = 2'-O-Methyl-guanosine phosphorothioate
  modified_base 21: mod_base = OTHER; note = 2'-O-Methyl-guanosine
  modified_base 25: mod_base = OTHER; note = uridine phosphorothioate
  modified_base 28: mod_base = OTHER; note = 2'-O-Methyl-adenosine
  modified_base 29: mod_base = OTHER; note = 2'-O-Methyl-guanosine
  modified_base 30: mod_base = OTHER; note = 2'-O-Methyl-cytidine
  modified_base 31: mod_base = OTHER; note = 2'-O-Methyl-uridine
  modified_base 32: mod_base = OTHER; note = 2'-O-Methyl-adenosine
  modified_base 34: mod_base = OTHER; note = 2'-O-Methyl-adenosine
  modified_base 35: mod_base = OTHER; note = 2'-O-Methyl-adenosine
  modified_base 36: mod_base = OTHER; note = 2'-O-Methyl-adenosine
  modified_base 37: mod_base = OTHER; note = 2'-O-Methyl-uridine
  modified_base 38: mod_base = OTHER; note = 2'-O-Methyl-adenosine
  modified_base 39: mod_base = OTHER; note = 2'-O-Methyl-guanosine
  modified_base 40: mod_base = OTHER; note = 2'-O-Methyl-cytidine
  modified_base 41: mod_base = OTHER; note = 2'-O-Methyl-adenosine
  modified_base 42: mod_base = OTHER; note = 2'-O-Methyl-adenosine
  modified_base 45: mod_base = OTHER; note = uridine phosphorothioate
  modified_base 46: mod_base = OTHER; note = 2'-O-Methyl-adenosine
  modified_base 48: mod_base = OTHER; note = 2'-O-Methyl-adenosine
  modified_base 50: mod_base = OTHER; note = 2'-O-Methyl-uridine
  modified_base 52: mod_base = OTHER; note = 2'-O-Methyl-adenosine
  modified_base 53: mod_base = OTHER; note = 2'-O-Methyl-guanosine
  modified_base 54: mod_base = OTHER; note = 2'-O-Methyl-guanosine
  modified_base 57: mod_base = OTHER; note = 2'-O-Methyl-adenosine
  modified_base 61: mod_base = OTHER; note = 2'-O-Methyl-cytidine
  modified_base 64: mod_base = OTHER; note = uridine phosphorothioate
  modified_base 66: mod_base = OTHER; note = 2'-O-Methyl-uridine
  modified_base 67: mod_base = OTHER; note = 2'-O-Methyl-cytidine
  modified_base 70: mod_base = OTHER; note = 2'-O-Methyl-cytidine
  modified_base 71: mod_base = OTHER; note = 2'-O-Methyl-uridine
  modified_base 72: mod_base = OTHER; note = 2'-O-Methyl-uridine
  modified_base 74: mod_base = OTHER; note = 2'-O-Methyl-adenosine
  modified_base 75: mod_base = OTHER; note = 2'-O-Methyl-adenosine
  modified_base 76: mod_base = OTHER; note = 2'-O-Methyl-adenosine
  modified_base 77: mod_base = OTHER; note = 2'-O-Methyl-adenosine
  modified_base 78: mod_base = OTHER; note = 2'-O-Methyl-adenosine
  modified_base 79: mod_base = OTHER; note = 2'-O-Methyl-guanosine
  modified_base 80: mod_base = OTHER; note = 2'-O-Methyl-uridine
  modified_base 82: mod_base = OTHER; note = 2'-O-Methyl-guanosine
  modified_base 83: mod_base = OTHER; note = 2'-O-Methyl-cytidine
  modified_base 84: mod_base = OTHER; note = 2'-O-Methyl-adenosine
  modified_base 85: mod_base = OTHER; note = 2'-O-Methyl-cytidine
  modified_base 86: mod_base = OTHER; note = 2'-O-Methyl-cytidine
  modified_base 87: mod_base = OTHER; note = 2'-O-Methyl-guanosine
  modified_base 89: mod_base = OTHER; note = 2'-O-Methyl-guanosine
  modified_base 92: mod_base = OTHER; note = 2'-O-Methyl-guanosine
  modified_base 93: mod_base = OTHER; note = 2'-O-Methyl-guanosine
  modified_base 94: mod_base = OTHER; note = 2'-O-Methyl-uridine
  modified_base 95: mod_base = OTHER; note = 2'-O-Methyl-guanosine
  modified_base 96: mod_base = OTHER; note = 2'-O-Methyl-cytidine
  modified_base 97: mod_base = OTHER; note = 2'-O-Methyl-uridine
  modified_base 98: mod_base = OTHER; note = 2'-O-Methyl-uridine phosphorothioate
  modified_base 99: mod_base = OTHER; note = 2'-O-Methyl-uridine phosphorothioate
  modified_base 100: mod_base = OTHER; note = 2'-O-Methyl-uridine

SEQ ID NO: 1769 - RNA, 103 nt, synthetic construct; identical to SEQ ID NO: 1700
  source 1..103: mol_type = other RNA; note = Description of Artificial Sequence: Synthetic polynucleotide
  modified_base 1: mod_base = OTHER; note = 2'-O-Methyl-cytidine phosphorothioate
  modified_base 2: mod_base = OTHER; note = 2'-O-Methyl-adenosine phosphorothioate
  modified_base 3: mod_base = OTHER; note = 2'-O-Methyl-guanosine phosphorothioate
  modified_base 21: mod_base = OTHER; note = 2'-O-Methyl-guanosine
  modified_base 25: mod_base = OTHER; note = uridine phosphorothioate
  modified_base 28: mod_base = OTHER; note = 2'-O-Methyl-adenosine
  modified_base 29: mod_base = OTHER; note = 2'-O-Methyl-guanosine
  modified_base 30: mod_base = OTHER; note = 2'-O-Methyl-cytidine
  modified_base 31: mod_base = OTHER; note = 2'-O-Methyl-uridine
  modified_base 32: mod_base = OTHER; note = 2'-O-Methyl-adenosine
  modified_base 34: mod_base = OTHER; note = 2'-O-Methyl-adenosine
  modified_base 35: mod_base = OTHER; note = 2'-O-Methyl-adenosine
  modified_base 36: mod_base = OTHER; note = 2'-O-Methyl-adenosine
  modified_base 37: mod_base = OTHER; note = 2'-O-Methyl-uridine
  modified_base 38: mod_base = OTHER; note = 2'-O-Methyl-adenosine
  modified_base 39: mod_base = OTHER; note = 2'-O-Methyl-guanosine
  modified_base 40: mod_base = OTHER; note = 2'-O-Methyl-cytidine
  modified_base 41: mod_base = OTHER; note = 2'-O-Methyl-adenosine
  modified_base 42: mod_base = OTHER; note = 2'-O-Methyl-adenosine
  modified_base 45: mod_base = OTHER; note = uridine phosphorothioate
  modified_base 46: mod_base = OTHER; note = 2'-O-Methyl-adenosine
  modified_base 48: mod_base = OTHER; note = 2'-O-Methyl-adenosine
  modified_base 50: mod_base = OTHER; note = 2'-O-Methyl-uridine
  modified_base 52: mod_base = OTHER; note = 2'-O-Methyl-adenosine
  modified_base 53: mod_base = OTHER; note = 2'-O-Methyl-guanosine
  modified_base 54: mod_base = OTHER; note = 2'-O-Methyl-guanosine
  modified_base 55: mod_base = OTHER; note = 2'-O-Methyl-cytidine
  modified_base 56: mod_base = OTHER; note = 2'-O-Methyl-uridine
  modified_base 57: mod_base = OTHER; note = 2'-O-Methyl-adenosine
  modified_base 60: mod_base = OTHER; note = 2'-O-Methyl-cytidine
  modified_base 61: mod_base = OTHER; note = 2'-O-Methyl-cytidine
  modified_base 64: mod_base = OTHER; note = uridine phosphorothioate
  modified_base 66: mod_base = OTHER; note = 2'-O-Methyl-uridine
  modified_base 67: mod_base = OTHER; note = 2'-O-Methyl-cytidine
  modified_base 70: mod_base = OTHER; note = 2'-O-Methyl-cytidine
  modified_base 71: mod_base = OTHER; note = 2'-O-Methyl-uridine
  modified_base 72: mod_base = OTHER; note = 2'-O-Methyl-uridine
  modified_base 74: mod_base = OTHER; note = 2'-O-Methyl-adenosine
  modified_base 75: mod_base = OTHER; note = 2'-O-Methyl-adenosine
  modified_base 76: mod_base = OTHER; note = 2'-O-Methyl-adenosine
  modified_base 77: mod_base = OTHER; note = 2'-O-Methyl-adenosine
  modified_base 78: mod_base = OTHER; note = 2'-O-Methyl-adenosine
  modified_base 79: mod_base = OTHER; note = 2'-O-Methyl-guanosine
  modified_base 80: mod_base = OTHER; note = 2'-O-Methyl-uridine
  modified_base 81: mod_base = OTHER; note = 2'-O-Methyl-guanosine
  modified_base 83: mod_base = OTHER; note = 2'-O-Methyl-cytidine
  modified_base 84: mod_base = OTHER; note = 2'-O-Methyl-adenosine
  modified_base 85: mod_base = OTHER; note = 2'-O-Methyl-cytidine
  modified_base 86: mod_base = OTHER; note = 2'-O-Methyl-cytidine
  modified_base 87: mod_base = OTHER; note = 2'-O-Methyl-guanosine
  modified_base 88: mod_base = OTHER; note = 2'-O-Methyl-adenosine
  modified_base 89: mod_base = OTHER; note = 2'-O-Methyl-guanosine
  modified_base 90: mod_base = OTHER; note = 2'-O-Methyl-uridine
  modified_base 91: mod_base = OTHER; note = 2'-O-Methyl-cytidine
  modified_base 92: mod_base = OTHER; note = 2'-O-Methyl-guanosine
  modified_base 93: mod_base = OTHER; note = 2'-O-Methyl-guanosine
  modified_base 94: mod_base = OTHER; note = 2'-O-Methyl-uridine
  modified_base 95: mod_base = OTHER; note = 2'-O-Methyl-guanosine
  modified_base 96: mod_base = OTHER; note = 2'-O-Methyl-cytidine
  modified_base 97: mod_base = OTHER; note = 2'-O-Methyl-uridine
  modified_base 98: mod_base = OTHER; note = 2'-O-Methyl-uridine phosphorothioate
  modified_base 99: mod_base = OTHER; note = 2'-O-Methyl-uridine phosphorothioate
  modified_base 100: mod_base = OTHER; note = 2'-O-Methyl-uridine

SEQ ID NO: 1770 - RNA, 103 nt, synthetic construct; identical to SEQ ID NO: 1700
  source 1..103: mol_type = other RNA; note = Description of Artificial Sequence: Synthetic polynucleotide
  modified_base 1: mod_base = OTHER; note = 2'-O-Methyl-cytidine phosphorothioate
  modified_base 2: mod_base = OTHER; note = 2'-O-Methyl-adenosine phosphorothioate
  modified_base 3: mod_base = OTHER; note = 2'-O-Methyl-guanosine
  modified_base 21: mod_base = OTHER; note = 2'-O-Methyl-guanosine
  modified_base 28: mod_base = OTHER; note = 2'-O-Methyl-adenosine
  modified_base 29: mod_base = OTHER; note = 2'-O-Methyl-guanosine
  modified_base 30: mod_base = OTHER; note = 2'-O-Methyl-cytidine
  modified_base 31: mod_base = OTHER; note = 2'-O-Methyl-uridine
  modified_base 32: mod_base = OTHER; note = 2'-O-Methyl-adenosine
  modified_base 34: mod_base = OTHER; note = 2'-O-Methyl-adenosine
  modified_base 35: mod_base = OTHER; note = 2'-O-Methyl-adenosine
  modified_base 36: mod_base = OTHER; note = 2'-O-Methyl-adenosine
  modified_base 37: mod_base = OTHER; note = 2'-O-Methyl-uridine
  modified_base 38: mod_base = OTHER; note = 2'-O-Methyl-adenosine
  modified_base 39: mod_base = OTHER; note = 2'-O-Methyl-guanosine
  modified_base 40: mod_base = OTHER; note = 2'-O-Methyl-cytidine
  modified_base 41: mod_base = OTHER; note = 2'-O-Methyl-adenosine
  modified_base 42: mod_base = OTHER; note = 2'-O-Methyl-adenosine
  modified_base 46: mod_base = OTHER; note = 2'-O-Methyl-adenosine
  modified_base 48: mod_base = OTHER; note = 2'-O-Methyl-adenosine
  modified_base 50: mod_base = OTHER; note = 2'-O-Methyl-uridine
  modified_base 52: mod_base = OTHER; note = 2'-O-Methyl-adenosine
  modified_base 53: mod_base = OTHER; note = 2'-O-Methyl-guanosine
  modified_base 54: mod_base = OTHER; note = 2'-O-Methyl-guanosine
  modified_base 57: mod_base = OTHER; note = 2'-O-Methyl-adenosine
  modified_base 61: mod_base = OTHER; note = 2'-O-Methyl-cytidine
  modified_base 66: mod_base = OTHER; note = 2'-O-Methyl-uridine
  modified_base 67: mod_base = OTHER; note = 2'-O-Methyl-cytidine
  modified_base 70: mod_base = OTHER; note = 2'-O-Methyl-cytidine
  modified_base 71: mod_base = OTHER; note = 2'-O-Methyl-uridine
  modified_base 72: mod_base = OTHER; note = 2'-O-Methyl-uridine
  modified_base 74: mod_base = OTHER; note = 2'-O-Methyl-adenosine
  modified_base 75: mod_base = OTHER; note = 2'-O-Methyl-adenosine
  modified_base 76: mod_base = OTHER; note = 2'-O-Methyl-adenosine
  modified_base 77: mod_base = OTHER; note = 2'-O-Methyl-adenosine
  modified_base 78: mod_base = OTHER; note = 2'-O-Methyl-adenosine
  modified_base 79: mod_base = OTHER; note = 2'-O-Methyl-guanosine
  modified_base 80: mod_base = OTHER; note = 2'-O-Methyl-uridine
  modified_base 82: mod_base = OTHER; note = 2'-O-Methyl-guanosine
  modified_base 83: mod_base = OTHER; note = 2'-O-Methyl-cytidine
  modified_base 84: mod_base = OTHER; note = 2'-O-Methyl-adenosine
  modified_base 85: mod_base = OTHER; note = 2'-O-Methyl-cytidine
  modified_base 86: mod_base = OTHER; note = 2'-O-Methyl-cytidine
  modified_base 87: mod_base = OTHER; note = 2'-O-Methyl-guanosine
  modified_base 89: mod_base = OTHER; note = 2'-O-Methyl-guanosine
  modified_base 92: mod_base = OTHER; note = 2'-O-Methyl-guanosine
  modified_base 93: mod_base = OTHER; note = 2'-O-Methyl-guanosine
  modified_base 94: mod_base = OTHER; note = 2'-O-Methyl-uridine
  modified_base 95: mod_base = OTHER; note = 2'-O-Methyl-guanosine
  modified_base 96: mod_base = OTHER; note = 2'-O-Methyl-cytidine
  modified_base 97: mod_base = OTHER; note = 2'-O-Methyl-uridine
  modified_base 98: mod_base = OTHER; note = 2'-O-Methyl-uridine phosphorothioate
  modified_base 99: mod_base = OTHER; note = 2'-O-Methyl-uridine phosphorothioate
  modified_base 100: mod_base = OTHER; note = 2'-O-Methyl-uridine

SEQ ID NO: 1771 - RNA, 103 nt, synthetic construct; identical to SEQ ID NO: 1700
  source 1..103: mol_type = other RNA; note = Description of Artificial Sequence: Synthetic polynucleotide
  modified_base 1: mod_base = OTHER; note = 2'-O-Methyl-cytidine phosphorothioate
  modified_base 2: mod_base = OTHER; note = 2'-O-Methyl-adenosine phosphorothioate
  modified_base 3: mod_base = OTHER; note = 2'-O-Methyl-guanosine
  modified_base 21: mod_base = OTHER; note = 2'-O-Methyl-guanosine
  modified_base 28: mod_base = OTHER; note = 2'-O-Methyl-adenosine
  modified_base 29: mod_base = OTHER; note = 2'-O-Methyl-guanosine
  modified_base 30: mod_base = OTHER; note = 2'-O-Methyl-cytidine
  modified_base 31: mod_base = OTHER; note = 2'-O-Methyl-uridine
  modified_base 32: mod_base = OTHER; note = 2'-O-Methyl-adenosine
  modified_base 33: mod_base = OTHER; note = 2'-O-Methyl-guanosine
  modified_base 34: mod_base = OTHER; note = 2'-O-Methyl-adenosine
  modified_base 35: mod_base = OTHER; note = 2'-O-Methyl-adenosine
  modified_base 36: mod_base = OTHER; note = 2'-O-Methyl-adenosine
  modified_base 37: mod_base = OTHER; note = 2'-O-Methyl-uridine
  modified_base 38: mod_base = OTHER; note = 2'-O-Methyl-adenosine
  modified_base 39: mod_base = OTHER; note = 2'-O-Methyl-guanosine
  modified_base 40: mod_base = OTHER; note = 2'-O-Methyl-cytidine
  modified_base 41: mod_base = OTHER; note = 2'-O-Methyl-adenosine
  modified_base 42: mod_base = OTHER; note = 2'-O-Methyl-adenosine
  modified_base 46: mod_base = OTHER; note = 2'-O-Methyl-adenosine
  modified_base 48: mod_base = OTHER; note = 2'-O-Methyl-adenosine
  modified_base 50: mod_base = OTHER; note = 2'-O-Methyl-uridine
  modified_base 52: mod_base = OTHER; note = 2'-O-Methyl-adenosine
  modified_base 53: mod_base = OTHER; note = 2'-O-Methyl-guanosine
  modified_base 54: mod_base = OTHER; note = 2'-O-Methyl-guanosine
  modified_base 55: mod_base = OTHER; note = 2'-O-Methyl-cytidine
  modified_base 56: mod_base = OTHER; note = 2'-O-Methyl-uridine
  modified_base 57: mod_base = OTHER; note = 2'-O-Methyl-adenosine
  modified_base 60: mod_base = OTHER; note = 2'-O-Methyl-cytidine
  modified_base 61: mod_base = OTHER; note = 2'-O-Methyl-cytidine
  modified_base 66: mod_base = OTHER; note = 2'-O-Methyl-uridine
  modified_base 67: mod_base = OTHER; note = 2'-O-Methyl-cytidine
  modified_base 70: mod_base = OTHER; note = 2'-O-Methyl-cytidine
  modified_base 71: mod_base = OTHER; note = 2'-O-Methyl-uridine
  modified_base 72: mod_base = OTHER; note = 2'-O-Methyl-uridine
  modified_base 73: mod_base = OTHER; note = 2'-O-Methyl-guanosine
  modified_base 74: mod_base = OTHER; note = 2'-O-Methyl-adenosine
  modified_base 75: mod_base = OTHER; note = 2'-O-Methyl-adenosine
  modified_base 76: mod_base = OTHER; note = 2'-O-Methyl-adenosine
  modified_base 77: mod_base = OTHER; note = 2'-O-Methyl-adenosine
  modified_base 78: mod_base = OTHER; note = 2'-O-Methyl-adenosine
  modified_base 79: mod_base = OTHER; note = 2'-O-Methyl-guanosine
  modified_base 80: mod_base = OTHER; note = 2'-O-Methyl-uridine
  modified_base 81: mod_base = OTHER; note = 2'-O-Methyl-guanosine
  modified_base 83: mod_base = OTHER; note = 2'-O-Methyl-cytidine
  modified_base 84: mod_base = OTHER; note = 2'-O-Methyl-adenosine
  modified_base 85: mod_base = OTHER; note = 2'-O-Methyl-cytidine
  modified_base 86: mod_base = OTHER; note = 2'-O-Methyl-cytidine
  modified_base 87: mod_base = OTHER; note = 2'-O-Methyl-guanosine
  modified_base 88: mod_base = OTHER; note = 2'-O-Methyl-adenosine
  modified_base 89: mod_base = OTHER; note = 2'-O-Methyl-guanosine
  modified_base 90: mod_base = OTHER; note = 2'-O-Methyl-uridine
  modified_base 91: mod_base = OTHER; note = 2'-O-Methyl-cytidine
  modified_base 92: mod_base = OTHER; note = 2'-O-Methyl-guanosine
  modified_base 93: mod_base = OTHER; note = 2'-O-Methyl-guanosine
  modified_base 94: mod_base = OTHER; note = 2'-O-Methyl-uridine
  modified_base 95: mod_base = OTHER; note = 2'-O-Methyl-guanosine
  modified_base 96: mod_base = OTHER; note = 2'-O-Methyl-cytidine
  modified_base 97: mod_base = OTHER; note = 2'-O-Methyl-uridine
  modified_base 98: mod_base = OTHER; note = 2'-O-Methyl-uridine phosphorothioate
  modified_base 99: mod_base = OTHER; note = 2'-O-Methyl-uridine phosphorothioate
  modified_base 100: mod_base = OTHER; note = 2'-O-Methyl-uridine

SEQ ID NO: 1772 - RNA, 103 nt, synthetic construct; identical to SEQ ID NO: 1643
  source 1..103: mol_type = other RNA; note = Description of Artificial Sequence: Synthetic polynucleotide
  modified_base 1: mod_base = OTHER; note = 2'-O-Methyl-cytidine phosphorothioate
  modified_base 2: mod_base = OTHER; note = 2'-O-Methyl-cytidine phosphorothioate
  modified_base 3: mod_base = OTHER; note = 2'-O-Methyl-cytidine
  modified_base 21: mod_base = OTHER; note = 2'-O-Methyl-guanosine
  modified_base 28: mod_base = OTHER; note = 2'-O-Methyl-adenosine
  modified_base 29: mod_base = OTHER; note = 2'-O-Methyl-guanosine
  modified_base 30: mod_base = OTHER; note = 2'-O-Methyl-cytidine
  modified_base 31: mod_base = OTHER; note = 2'-O-Methyl-uridine
  modified_base 32: mod_base = OTHER; note = 2'-O-Methyl-adenosine
  modified_base 34: mod_base = OTHER; note = 2'-O-Methyl-adenosine
  modified_base 35: mod_base = OTHER; note = 2'-O-Methyl-adenosine
  modified_base 36: mod_base = OTHER; note = 2'-O-Methyl-adenosine
  modified_base 37: mod_base = OTHER; note = 2'-O-Methyl-uridine
  modified_base 38: mod_base = OTHER; note = 2'-O-Methyl-adenosine
  modified_base 39: mod_base = OTHER; note = 2'-O-Methyl-guanosine
  modified_base 40: mod_base = OTHER; note = 2'-O-Methyl-cytidine
  modified_base 41: mod_base = OTHER; note = 2'-O-Methyl-adenosine
  modified_base 42: mod_base = OTHER; note = 2'-O-Methyl-adenosine
  modified_base 46: mod_base = OTHER; note = 2'-O-Methyl-adenosine
  modified_base 48: mod_base = OTHER; note = 2'-O-Methyl-adenosine
  modified_base 50: mod_base = OTHER; note = 2'-O-Methyl-uridine
  modified_base 52: mod_base = OTHER; note = 2'-O-Methyl-adenosine
  modified_base 53: mod_base = OTHER; note = 2'-O-Methyl-guanosine
  modified_base 54: mod_base = OTHER; note = 2'-O-Methyl-guanosine
  modified_base 57: mod_base = OTHER; note = 2'-O-Methyl-adenosine
  modified_base 61: mod_base = OTHER; note = 2'-O-Methyl-cytidine
  modified_base 66: mod_base = OTHER; note = 2'-O-Methyl-uridine
  modified_base 67: mod_base = OTHER; note = 2'-O-Methyl-cytidine
  modified_base 70: mod_base = OTHER; note = 2'-O-Methyl-cytidine
  modified_base 71: mod_base = OTHER; note = 2'-O-Methyl-uridine
  modified_base 72: mod_base = OTHER; note = 2'-O-Methyl-uridine
  modified_base 74: mod_base = OTHER; note = 2'-O-Methyl-adenosine
  modified_base 75: mod_base = OTHER; note = 2'-O-Methyl-adenosine
  modified_base 76: mod_base = OTHER; note = 2'-O-Methyl-adenosine
  modified_base 77: mod_base = OTHER; note = 2'-O-Methyl-adenosine
  modified_base 78: mod_base = OTHER; note = 2'-O-Methyl-adenosine
  modified_base 79: mod_base = OTHER; note = 2'-O-Methyl-guanosine
  modified_base 80: mod_base = OTHER; note = 2'-O-Methyl-uridine
  modified_base 82: mod_base = OTHER; note = 2'-O-Methyl-guanosine
  modified_base 83: mod_base = OTHER; note = 2'-O-Methyl-cytidine
  modified_base 84: mod_base = OTHER; note = 2'-O-Methyl-adenosine
  modified_base 85: mod_base = OTHER; note = 2'-O-Methyl-cytidine
  modified_base 86: mod_base = OTHER; note = 2'-O-Methyl-cytidine
  modified_base 87: mod_base = OTHER; note = 2'-O-Methyl-guanosine
  modified_base 89: mod_base = OTHER; note = 2'-O-Methyl-guanosine
  modified_base 92: mod_base = OTHER; note = 2'-O-Methyl-guanosine
  modified_base 93: mod_base = OTHER; note = 2'-O-Methyl-guanosine
  modified_base 94: mod_base = OTHER; note = 2'-O-Methyl-uridine
  modified_base 95: mod_base = OTHER; note = 2'-O-Methyl-guanosine
  modified_base 96: mod_base = OTHER; note = 2'-O-Methyl-cytidine
  modified_base 97: mod_base = OTHER; note = 2'-O-Methyl-uridine
  modified_base 98: mod_base = OTHER; note = 2'-O-Methyl-uridine phosphorothioate
  modified_base 99: mod_base = OTHER; note = 2'-O-Methyl-uridine phosphorothioate
  modified_base 100: mod_base = OTHER; note = 2'-O-Methyl-uridine

SEQ ID NO: 1773 - RNA, 103 nt, synthetic construct; identical to SEQ ID NO: 1699
  source 1..103: mol_type = other RNA; note = Description of Artificial Sequence: Synthetic polynucleotide
  modified_base 1: mod_base = OTHER; note = 2'-O-Methyl-guanosine phosphorothioate
  modified_base 2: mod_base = OTHER; note = 2'-O-Methyl-adenosine phosphorothioate
  modified_base 3: mod_base = OTHER; note = 2'-O-Methyl-guanosine
  modified_base 21: mod_base = OTHER; note = 2'-O-Methyl-guanosine
  modified_base 28: mod_base = OTHER; note = 2'-O-Methyl-adenosine
  modified_base 29: mod_base = OTHER; note = 2'-O-Methyl-guanosine
  modified_base 30: mod_base = OTHER; note = 2'-O-Methyl-cytidine
  modified_base 31: mod_base = OTHER; note = 2'-O-Methyl-uridine
  modified_base 32: mod_base = OTHER; note = 2'-O-Methyl-adenosine
  modified_base 34: mod_base = OTHER; note = 2'-O-Methyl-adenosine
  modified_base 35: mod_base = OTHER; note = 2'-O-Methyl-adenosine
  modified_base 36: mod_base = OTHER; note = 2'-O-Methyl-adenosine
  modified_base 37: mod_base = OTHER; note = 2'-O-Methyl-uridine
  modified_base 38: mod_base = OTHER; note = 2'-O-Methyl-adenosine
  modified_base 39: mod_base = OTHER; note = 2'-O-Methyl-guanosine
  modified_base 40: mod_base = OTHER; note = 2'-O-Methyl-cytidine
  modified_base 41: mod_base = OTHER; note = 2'-O-Methyl-adenosine
  modified_base 42: mod_base = OTHER; note = 2'-O-Methyl-adenosine
  modified_base 46: mod_base = OTHER; note = 2'-O-Methyl-adenosine
  modified_base 48: mod_base = OTHER; note = 2'-O-Methyl-adenosine
  modified_base 50: mod_base = OTHER; note = 2'-O-Methyl-uridine
  modified_base 52: mod_base = OTHER; note = 2'-O-Methyl-adenosine
  modified_base 53: mod_base = OTHER; note = 2'-O-Methyl-guanosine
  modified_base 54: mod_base = OTHER; note = 2'-O-Methyl-guanosine
  modified_base 57: mod_base = OTHER; note = 2'-O-Methyl-adenosine
  modified_base 61: mod_base = OTHER; note = 2'-O-Methyl-cytidine
  modified_base 66: mod_base = OTHER; note = 2'-O-Methyl-uridine
  modified_base 67: mod_base = OTHER; note = 2'-O-Methyl-cytidine
  modified_base 70: mod_base = OTHER; note = 2'-O-Methyl-cytidine
  modified_base 71: mod_base = OTHER; note = 2'-O-Methyl-uridine
  modified_base 72: mod_base = OTHER; note = 2'-O-Methyl-uridine
  modified_base 74: mod_base = OTHER; note = 2'-O-Methyl-adenosine
  modified_base 75: mod_base = OTHER; note = 2'-O-Methyl-adenosine
  modified_base 76: mod_base = OTHER; note = 2'-O-Methyl-adenosine
  modified_base 77: mod_base = OTHER; note = 2'-O-Methyl-adenosine
  modified_base 78: mod_base = OTHER; note = 2'-O-Methyl-adenosine
  modified_base 79: mod_base = OTHER; note = 2'-O-Methyl-guanosine
  modified_base 80: mod_base = OTHER; note = 2'-O-Methyl-uridine
  modified_base 82: mod_base = OTHER; note = 2'-O-Methyl-guanosine
  modified_base 83: mod_base = OTHER; note = 2'-O-Methyl-cytidine
  modified_base 84: mod_base = OTHER; note = 2'-O-Methyl-adenosine
  modified_base 85: mod_base = OTHER; note = 2'-O-Methyl-cytidine
  modified_base 86: mod_base = OTHER; note = 2'-O-Methyl-cytidine
  modified_base 87: mod_base = OTHER; note = 2'-O-Methyl-guanosine
  modified_base 89: mod_base = OTHER; note = 2'-O-Methyl-guanosine
  modified_base 92: mod_base = OTHER; note = 2'-O-Methyl-guanosine
  modified_base 93: mod_base = OTHER; note = 2'-O-Methyl-guanosine
  modified_base 94: mod_base = OTHER; note = 2'-O-Methyl-uridine
  modified_base 95: mod_base = OTHER; note = 2'-O-Methyl-guanosine
  modified_base 96: mod_base = OTHER; note = 2'-O-Methyl-cytidine
  modified_base 97: mod_base = OTHER; note = 2'-O-Methyl-uridine
  modified_base 98: mod_base = OTHER; note = 2'-O-Methyl-uridine phosphorothioate
  modified_base 99: mod_base = OTHER; note = 2'-O-Methyl-uridine phosphorothioate
  modified_base 100: mod_base = OTHER; note = 2'-O-Methyl-uridine

SEQ ID NO: 1774 - RNA, 103 nt, synthetic construct; identical to SEQ ID NO: 1643
  source 1..103: mol_type = other RNA; note = Description of Artificial Sequence: Synthetic polynucleotide
  modified_base 1: mod_base = OTHER; note = 2'-O-Methyl-cytidine phosphorothioate
  modified_base 2: mod_base = OTHER; note = 2'-O-Methyl-cytidine phosphorothioate
  modified_base 3: mod_base = OTHER; note = 2'-O-Methyl-cytidine
  modified_base 21: mod_base = OTHER; note = 2'-O-Methyl-guanosine
  modified_base 28: mod_base = OTHER; note = 2'-O-Methyl-adenosine
  modified_base 29: mod_base = OTHER; note = 2'-O-Methyl-guanosine
  modified_base 30: mod_base = OTHER; note = 2'-O-Methyl-cytidine
  modified_base 31: mod_base = OTHER; note = 2'-O-Methyl-uridine
  modified_base 32: mod_base = OTHER; note = 2'-O-Methyl-adenosine
  modified_base 34: mod_base = OTHER; note = 2'-O-Methyl-adenosine
  modified_base 35: mod_base = OTHER; note = 2'-O-Methyl-adenosine
  modified_base 36: mod_base = OTHER; note = 2'-O-Methyl-adenosine
  modified_base 37: mod_base = OTHER; note = 2'-O-Methyl-uridine
  modified_base 38: mod_base = OTHER; note = 2'-O-Methyl-adenosine
  modified_base 39: mod_base = OTHER; note = 2'-O-Methyl-guanosine
  modified_base 40: mod_base = OTHER; note = 2'-O-Methyl-cytidine
  modified_base 41: mod_base = OTHER; note = 2'-O-Methyl-adenosine
  modified_base 42: mod_base = OTHER; note = 2'-O-Methyl-adenosine
  modified_base 46: mod_base = OTHER; note = 2'-O-Methyl-adenosine
  modified_base 48: mod_base = OTHER; note = 2'-O-Methyl-adenosine
  modified_base 50: mod_base = OTHER; note = 2'-O-Methyl-uridine
  modified_base 52: mod_base = OTHER; note = 2'-O-Methyl-adenosine
  modified_base 53: mod_base = OTHER; note = 2'-O-Methyl-guanosine
  modified_base 54: mod_base = OTHER; note = 2'-O-Methyl-guanosine
  modified_base 57: mod_base = OTHER; note = 2'-O-Methyl-adenosine
  modified_base 61: mod_base = OTHER; note = 2'-O-Methyl-cytidine
  modified_base 64: mod_base = OTHER; note = uridine phosphorothioate
  modified_base 66: mod_base = OTHER; note = 2'-O-Methyl-uridine
  modified_base 67: mod_base = OTHER; note = 2'-O-Methyl-cytidine
  modified_base 70: mod_base = OTHER; note = 2'-O-Methyl-cytidine
  modified_base 71: mod_base = OTHER; note = 2'-O-Methyl-uridine
  modified_base 72: mod_base = OTHER; note = 2'-O-Methyl-uridine
  modified_base 74: mod_base = OTHER; note = 2'-O-Methyl-adenosine
  modified_base 75: mod_base = OTHER; note = 2'-O-Methyl-adenosine
  modified_base 76: mod_base = OTHER; note = 2'-O-Methyl-adenosine
  modified_base 77: mod_base = OTHER; note = 2'-O-Methyl-adenosine
  modified_base 78: mod_base = OTHER; note = 2'-O-Methyl-adenosine
  modified_base 79: mod_base = OTHER; note = 2'-O-Methyl-guanosine
  modified_base 80: mod_base = OTHER; note = 2'-O-Methyl-uridine
  modified_base 82: mod_base = OTHER; note = 2'-O-Methyl-guanosine
  modified_base 83: mod_base = OTHER; note = 2'-O-Methyl-cytidine
  modified_base 84: mod_base = OTHER; note = 2'-O-Methyl-adenosine
  modified_base 85: mod_base = OTHER; note = 2'-O-Methyl-cytidine
  modified_base 86: mod_base = OTHER; note = 2'-O-Methyl-cytidine
  modified_base 87: mod_base = OTHER; note = 2'-O-Methyl-guanosine
  modified_base 89: mod_base = OTHER; note = 2'-O-Methyl-guanosine
  modified_base 92: mod_base = OTHER; note = 2'-O-Methyl-guanosine
  modified_base 93: mod_base = OTHER; note = 2'-O-Methyl-guanosine
  modified_base 94: mod_base = OTHER; note = 2'-O-Methyl-uridine
  modified_base 95: mod_base = OTHER; note = 2'-O-Methyl-guanosine
  modified_base 96: mod_base = OTHER; note = 2'-O-Methyl-cytidine
  modified_base 97: mod_base = OTHER; note = 2'-O-Methyl-uridine
  modified_base 98: mod_base = OTHER; note = 2'-O-Methyl-uridine phosphorothioate
  modified_base 99: mod_base = OTHER; note = 2'-O-Methyl-uridine phosphorothioate
  modified_base 100: mod_base = OTHER; note = 2'-O-Methyl-uridine

SEQ ID NO: 1775 - RNA, 103 nt, synthetic construct; identical to SEQ ID NO: 1699
  source 1..103: mol_type = other RNA; note = Description of Artificial Sequence: Synthetic polynucleotide
  modified_base 1: mod_base = OTHER; note = 2'-O-Methyl-guanosine phosphorothioate
  modified_base 2: mod_base = OTHER; note = 2'-O-Methyl-adenosine phosphorothioate
  modified_base 3: mod_base = OTHER; note = 2'-O-Methyl-guanosine
  modified_base 21: mod_base = OTHER; note = 2'-O-Methyl-guanosine
  modified_base 28: mod_base = OTHER; note = 2'-O-Methyl-adenosine
  modified_base 29: mod_base = OTHER; note = 2'-O-Methyl-guanosine
  modified_base 30: mod_base = OTHER; note = 2'-O-Methyl-cytidine
  modified_base 31: mod_base = OTHER; note = 2'-O-Methyl-uridine
  modified_base 32: mod_base = OTHER; note = 2'-O-Methyl-adenosine
  modified_base 34: mod_base = OTHER; note = 2'-O-Methyl-adenosine
  modified_base 35: mod_base = OTHER; note = 2'-O-Methyl-adenosine
  modified_base 36: mod_base = OTHER; note = 2'-O-Methyl-adenosine
  modified_base 37: mod_base = OTHER; note = 2'-O-Methyl-uridine
  modified_base 38: mod_base = OTHER; note = 2'-O-Methyl-adenosine
  modified_base 39: mod_base = OTHER; note = 2'-O-Methyl-guanosine
  modified_base 40: mod_base = OTHER; note = 2'-O-Methyl-cytidine
  modified_base 41: mod_base = OTHER; note = 2'-O-Methyl-adenosine
  modified_base 42: mod_base = OTHER; note = 2'-O-Methyl-adenosine
  modified_base 46: mod_base = OTHER; note = 2'-O-Methyl-adenosine
  modified_base 48: mod_base = OTHER; note = 2'-O-Methyl-adenosine
  modified_base 50: mod_base = OTHER; note = 2'-O-Methyl-uridine
  modified_base 52: mod_base = OTHER; note = 2'-O-Methyl-adenosine
  modified_base 53: mod_base = OTHER; note = 2'-O-Methyl-guanosine
  modified_base 54: mod_base = OTHER; note = 2'-O-Methyl-guanosine
  modified_base 57: mod_base = OTHER; note = 2'-O-Methyl-adenosine
  modified_base 61: mod_base = OTHER; note = 2'-O-Methyl-cytidine
  modified_base 64: mod_base = OTHER; note = uridine phosphorothioate
  modified_base 66: mod_base = OTHER; note = 2'-O-Methyl-uridine
  modified_base 67: mod_base = OTHER; note = 2'-O-Methyl-cytidine
  modified_base 70: mod_base = OTHER; note = 2'-O-Methyl-cytidine
  modified_base 71: mod_base = OTHER; note = 2'-O-Methyl-uridine
  modified_base 72: mod_base = OTHER; note = 2'-O-Methyl-uridine
  modified_base 74: mod_base = OTHER; note = 2'-O-Methyl-adenosine
  modified_base 75: mod_base = OTHER; note = 2'-O-Methyl-adenosine
  modified_base 76: mod_base = OTHER; note = 2'-O-Methyl-adenosine
  modified_base 77: mod_base = OTHER; note = 2'-O-Methyl-adenosine
  modified_base 78: mod_base = OTHER; note = 2'-O-Methyl-adenosine
  modified_base 79: mod_base = OTHER; note = 2'-O-Methyl-guanosine
  modified_base 80: mod_base = OTHER; note = 2'-O-Methyl-uridine
  modified_base 82: mod_base = OTHER; note = 2'-O-Methyl-guanosine
  modified_base 83: mod_base = OTHER; note = 2'-O-Methyl-cytidine
  modified_base 84: mod_base = OTHER; note = 2'-O-Methyl-adenosine
  modified_base 85: mod_base = OTHER; note = 2'-O-Methyl-cytidine
  modified_base 86: mod_base = OTHER; note = 2'-O-Methyl-cytidine
  modified_base 87: mod_base = OTHER; note = 2'-O-Methyl-guanosine
  modified_base 89: mod_base = OTHER; note = 2'-O-Methyl-guanosine
  modified_base 92: mod_base = OTHER; note = 2'-O-Methyl-guanosine
  modified_base 93: mod_base = OTHER; note = 2'-O-Methyl-guanosine
  modified_base 94: mod_base = OTHER; note = 2'-O-Methyl-uridine
  modified_base 95: mod_base = OTHER; note = 2'-O-Methyl-guanosine
  modified_base 96: mod_base = OTHER; note = 2'-O-Methyl-cytidine
  modified_base 97: mod_base = OTHER; note = 2'-O-Methyl-uridine
  modified_base 98: mod_base = OTHER; note = 2'-O-Methyl-uridine phosphorothioate
  modified_base 99: mod_base = OTHER; note = 2'-O-Methyl-uridine phosphorothioate
  modified_base 100: mod_base = OTHER; note = 2'-O-Methyl-uridine

SEQ ID NO: 1776 - RNA, 103 nt, synthetic construct; identical to SEQ ID NO: 1700
  source 1..103: mol_type = other RNA; note = Description of Artificial Sequence: Synthetic polynucleotide
  modified_base 1: mod_base = OTHER; note = 2'-O-Methyl-cytidine phosphorothioate
  modified_base 2: mod_base = OTHER; note = 2'-O-Methyl-adenosine phosphorothioate
  modified_base 3: mod_base = OTHER; note = 2'-O-Methyl-guanosine
  modified_base 21: mod_base = OTHER; note = 2'-O-Methyl-guanosine
  modified_base 28: mod_base = OTHER; note = 2'-O-Methyl-adenosine
  modified_base 29: mod_base = OTHER; note = 2'-O-Methyl-guanosine
  modified_base 30: mod_base = OTHER; note = 2'-O-Methyl-cytidine
  modified_base 31: mod_base = OTHER; note = 2'-O-Methyl-uridine
  modified_base 32: mod_base = OTHER; note = 2'-O-Methyl-adenosine
  modified_base 34: mod_base = OTHER; note = 2'-O-Methyl-adenosine
  modified_base 35: mod_base = OTHER; note = 2'-O-Methyl-adenosine
  modified_base 36: mod_base = OTHER; note = 2'-O-Methyl-adenosine
  modified_base 37: mod_base = OTHER; note = 2'-O-Methyl-uridine
  modified_base 38: mod_base = OTHER; note = 2'-O-Methyl-adenosine
  modified_base 39: mod_base = OTHER; note = 2'-O-Methyl-guanosine
  modified_base 40: mod_base = OTHER; note = 2'-O-Methyl-cytidine
  modified_base 41: mod_base = OTHER; note = 2'-O-Methyl-adenosine
  modified_base 42: mod_base = OTHER; note = 2'-O-Methyl-adenosine
  modified_base 46: mod_base = OTHER; note = 2'-O-Methyl-adenosine
  modified_base 48: mod_base = OTHER; note = 2'-O-Methyl-adenosine
  modified_base 50: mod_base = OTHER; note = 2'-O-Methyl-uridine
  modified_base 52: mod_base = OTHER; note = 2'-O-Methyl-adenosine
  modified_base 53: mod_base = OTHER; note = 2'-O-Methyl-guanosine
  modified_base 54: mod_base = OTHER; note = 2'-O-Methyl-guanosine
  modified_base 55: mod_base = OTHER; note = 2'-O-Methyl-cytidine
  modified_base 56: mod_base = OTHER; note = 2'-O-Methyl-uridine
  modified_base 57: mod_base = OTHER; note = 2'-O-Methyl-adenosine
  modified_base 60: mod_base = OTHER; note = 2'-O-Methyl-cytidine
  modified_base 61: mod_base = OTHER; note = 2'-O-Methyl-cytidine
  modified_base 64: mod_base = OTHER; note = uridine phosphorothioate
  modified_base 66: mod_base = OTHER; note = 2'-O-Methyl-uridine
  modified_base 67: mod_base = OTHER; note = 2'-O-Methyl-cytidine
  modified_base 70: mod_base = OTHER; note = 2'-O-Methyl-cytidine
  modified_base 71: mod_base = OTHER; note = 2'-O-Methyl-uridine
  modified_base 72: mod_base = OTHER; note = 2'-O-Methyl-uridine
  modified_base 74: mod_base = OTHER; note = 2'-O-Methyl-adenosine
  modified_base 75: mod_base = OTHER; note = 2'-O-Methyl-adenosine
  modified_base 76: mod_base = OTHER; note = 2'-O-Methyl-adenosine
  modified_base 77: mod_base = OTHER; note = 2'-O-Methyl-adenosine
  modified_base 78: mod_base = OTHER; note = 2'-O-Methyl-adenosine
  modified_base 79: mod_base = OTHER; note = 2'-O-Methyl-guanosine
  modified_base 80: mod_base = OTHER; note = 2'-O-Methyl-uridine
  modified_base 81: mod_base = OTHER; note = 2'-O-Methyl-guanosine
  modified_base 83: mod_base = OTHER; note = 2'-O-Methyl-cytidine
  modified_base 84: mod_base = OTHER; note = 2'-O-Methyl-adenosine
  modified_base 85: mod_base = OTHER; note = 2'-O-Methyl-cytidine
  modified_base 86: mod_base = OTHER; note = 2'-O-Methyl-cytidine
  modified_base 87: mod_base = OTHER; note = 2'-O-Methyl-guanosine
  modified_base 88: mod_base = OTHER; note = 2'-O-Methyl-adenosine
  modified_base 89: mod_base = OTHER; note = 2'-O-Methyl-guanosine
  modified_base 90: mod_base = OTHER; note = 2'-O-Methyl-uridine
  modified_base 91: mod_base = OTHER; note = 2'-O-Methyl-cytidine
  modified_base 92: mod_base = OTHER; note = 2'-O-Methyl-guanosine
  modified_base 93: mod_base = OTHER; note = 2'-O-Methyl-guanosine
  modified_base 94: mod_base = OTHER; note = 2'-O-Methyl-uridine
  modified_base 95: mod_base = OTHER; note = 2'-O-Methyl-guanosine
  modified_base 96: mod_base = OTHER; note = 2'-O-Methyl-cytidine
  modified_base 97: mod_base = OTHER; note = 2'-O-Methyl-uridine
  modified_base 98: mod_base = OTHER; note = 2'-O-Methyl-uridine phosphorothioate
  modified_base 99: mod_base = OTHER; note = 2'-O-Methyl-uridine phosphorothioate
  modified_base 100: mod_base = OTHER; note = 2'-O-Methyl-uridine

SEQ ID NO: 1777 - RNA, 103 nt, synthetic construct; identical to SEQ ID NO: 1643
  source 1..103: mol_type = other RNA; note = Description of Artificial Sequence: Synthetic polynucleotide
  modified_base 1: mod_base = OTHER; note = 2'-O-Methyl-cytidine phosphorothioate
  modified_base 2: mod_base = OTHER; note = 2'-O-Methyl-cytidine phosphorothioate
  modified_base 3: mod_base = OTHER; note = 2'-O-Methyl-cytidine
  modified_base 21: mod_base = OTHER; note = 2'-O-Methyl-guanosine
  modified_base 28: mod_base = OTHER; note = 2'-O-Methyl-adenosine
  modified_base 29: mod_base = OTHER; note = 2'-O-Methyl-guanosine
  modified_base 30: mod_base = OTHER; note = 2'-O-Methyl-cytidine
  modified_base 31: mod_base = OTHER; note = 2'-O-Methyl-uridine
  modified_base 32: mod_base = OTHER; note = 2'-O-Methyl-adenosine
  modified_base 34: mod_base = OTHER; note = 2'-O-Methyl-adenosine
  modified_base 35: mod_base = OTHER; note = 2'-O-Methyl-adenosine
  modified_base 36: mod_base = OTHER; note = 2'-O-Methyl-adenosine
  modified_base 37: mod_base = OTHER; note = 2'-O-Methyl-uridine
  modified_base 38: mod_base = OTHER; note = 2'-O-Methyl-adenosine
  modified_base 39: mod_base = OTHER; note = 2'-O-Methyl-guanosine
  modified_base 40: mod_base = OTHER; note = 2'-O-Methyl-cytidine
  modified_base 41: mod_base = OTHER; note = 2'-O-Methyl-adenosine
  modified_base 42: mod_base = OTHER; note = 2'-O-Methyl-adenosine
  modified_base 45: mod_base = OTHER; note = uridine phosphorothioate
  modified_base 46: mod_base = OTHER; note = 2'-O-Methyl-adenosine
  modified_base 48: mod_base = OTHER; note = 2'-O-Methyl-adenosine
  modified_base 50: mod_base = OTHER; note = 2'-O-Methyl-uridine
  modified_base 52: mod_base = OTHER; note = 2'-O-Methyl-adenosine
  modified_base 53: mod_base = OTHER; note = 2'-O-Methyl-guanosine
  modified_base 54: mod_base = OTHER; note = 2'-O-Methyl-guanosine
  modified_base 57: mod_base = OTHER; note = 2'-O-Methyl-adenosine
  modified_base 61: mod_base = OTHER; note = 2'-O-Methyl-cytidine
  modified_base 66: mod_base = OTHER; note = 2'-O-Methyl-uridine
  modified_base 67: mod_base = OTHER; note = 2'-O-Methyl-cytidine
  modified_base 70: mod_base = OTHER; note = 2'-O-Methyl-cytidine
  modified_base 71: mod_base = OTHER; note = 2'-O-Methyl-uridine
  modified_base 72: mod_base = OTHER; note = 2'-O-Methyl-uridine
  modified_base 74: mod_base = OTHER; note = 2'-O-Methyl-adenosine
  modified_base 75: mod_base = OTHER; note = 2'-O-Methyl-adenosine
  modified_base 76: mod_base = OTHER; note = 2'-O-Methyl-adenosine
  modified_base 77: mod_base = OTHER; note = 2'-O-Methyl-adenosine
  modified_base 78: mod_base = OTHER; note = 2'-O-Methyl-adenosine
  modified_base 79: mod_base = OTHER; note = 2'-O-Methyl-guanosine
  modified_base 80: mod_base = OTHER; note = 2'-O-Methyl-uridine
  modified_base 82: mod_base = OTHER; note = 2'-O-Methyl-guanosine
  modified_base 83: mod_base = OTHER; note = 2'-O-Methyl-cytidine
  modified_base 84: mod_base = OTHER; note = 2'-O-Methyl-adenosine
  modified_base 85: mod_base = OTHER; note = 2'-O-Methyl-cytidine
  modified_base 86: mod_base = OTHER; note = 2'-O-Methyl-cytidine
  modified_base 87: mod_base = OTHER; note = 2'-O-Methyl-guanosine
  modified_base 89: mod_base = OTHER; note = 2'-O-Methyl-guanosine
  modified_base 92: mod_base = OTHER; note = 2'-O-Methyl-guanosine
  modified_base 93: mod_base = OTHER; note = 2'-O-Methyl-guanosine
  modified_base 94: mod_base = OTHER; note = 2'-O-Methyl-uridine
  modified_base 95: mod_base = OTHER; note = 2'-O-Methyl-guanosine
  modified_base 96: mod_base = OTHER; note = 2'-O-Methyl-cytidine
  modified_base 97: mod_base = OTHER; note = 2'-O-Methyl-uridine
  modified_base 98: mod_base = OTHER; note = 2'-O-Methyl-uridine phosphorothioate
  modified_base 99: mod_base = OTHER; note = 2'-O-Methyl-uridine phosphorothioate
  modified_base 100: mod_base = OTHER; note = 2'-O-Methyl-uridine

SEQ ID NO: 1778 - RNA, 103 nt, synthetic construct; identical to SEQ ID NO: 1699
  source 1..103: mol_type = other RNA; note = Description of Artificial Sequence: Synthetic polynucleotide
  modified_base 1: mod_base = OTHER; note = 2'-O-Methyl-guanosine phosphorothioate
  modified_base 2: mod_base = OTHER; note = 2'-O-Methyl-adenosine phosphorothioate
  modified_base 3: mod_base = OTHER; note = 2'-O-Methyl-guanosine
  modified_base 21: mod_base = OTHER; note = 2'-O-Methyl-guanosine
  modified_base 28: mod_base = OTHER; note = 2'-O-Methyl-adenosine
  modified_base 29: mod_base = OTHER; note = 2'-O-Methyl-guanosine
  modified_base 30: mod_base = OTHER; note = 2'-O-Methyl-cytidine
  modified_base 31: mod_base = OTHER; note = 2'-O-Methyl-uridine
  modified_base 32: mod_base = OTHER; note = 2'-O-Methyl-adenosine
  modified_base 34: mod_base = OTHER; note = 2'-O-Methyl-adenosine
  modified_base 35: mod_base = OTHER; note = 2'-O-Methyl-adenosine
  modified_base 36: mod_base = OTHER; note = 2'-O-Methyl-adenosine
  modified_base 37: mod_base = OTHER; note = 2'-O-Methyl-uridine
  modified_base 38: mod_base = OTHER; note = 2'-O-Methyl-adenosine
  modified_base 39: mod_base = OTHER; note = 2'-O-Methyl-guanosine
  modified_base 40: mod_base = OTHER; note = 2'-O-Methyl-cytidine
  modified_base 41: mod_base = OTHER; note = 2'-O-Methyl-adenosine
  modified_base 42: mod_base = OTHER; note = 2'-O-Methyl-adenosine
  modified_base 45: mod_base = OTHER; note = uridine phosphorothioate
  modified_base 46: mod_base = OTHER; note = 2'-O-Methyl-adenosine
  modified_base 48: mod_base = OTHER; note = 2'-O-Methyl-adenosine
  modified_base 50: mod_base = OTHER; note = 2'-O-Methyl-uridine
  modified_base 52: mod_base = OTHER; note = 2'-O-Methyl-adenosine
  modified_base 53: mod_base = OTHER; note = 2'-O-Methyl-guanosine
  modified_base 54: mod_base = OTHER; note = 2'-O-Methyl-guanosine
  modified_base 57: mod_base = OTHER; note = 2'-O-Methyl-adenosine
  modified_base 61: mod_base = OTHER; note = 2'-O-Methyl-cytidine
  modified_base 66: mod_base = OTHER; note = 2'-O-Methyl-uridine
  modified_base 67: mod_base = OTHER; note = 2'-O-Methyl-cytidine
  modified_base 70: mod_base = OTHER; note = 2'-O-Methyl-cytidine
  modified_base 71: mod_base = OTHER; note = 2'-O-Methyl-uridine
  modified_base 72: mod_base = OTHER; note = 2'-O-Methyl-uridine
  modified_base 74: mod_base = OTHER; note = 2'-O-Methyl-adenosine
  modified_base 75: mod_base = OTHER; note = 2'-O-Methyl-adenosine
  modified_base 76: mod_base = OTHER; note = 2'-O-Methyl-adenosine
  modified_base 77: mod_base = OTHER; note = 2'-O-Methyl-adenosine
  modified_base 78: mod_base = OTHER; note = 2'-O-Methyl-adenosine
  modified_base 79: mod_base = OTHER; note = 2'-O-Methyl-guanosine
  modified_base 80: mod_base = OTHER; note = 2'-O-Methyl-uridine
  modified_base 82: mod_base = OTHER; note = 2'-O-Methyl-guanosine
  modified_base 83: mod_base = OTHER; note = 2'-O-Methyl-cytidine
  modified_base 84: mod_base = OTHER; note = 2'-O-Methyl-adenosine
  modified_base 85: mod_base = OTHER; note = 2'-O-Methyl-cytidine
  modified_base 86: mod_base = OTHER; note = 2'-O-Methyl-cytidine
  modified_base 87: mod_base = OTHER; note = 2'-O-Methyl-guanosine
  modified_base 89: mod_base = OTHER; note = 2'-O-Methyl-guanosine
  modified_base 92: mod_base = OTHER; note = 2'-O-Methyl-guanosine
  modified_base 93: mod_base = OTHER; note = 2'-O-Methyl-guanosine
  modified_base 94: mod_base = OTHER; note = 2'-O-Methyl-uridine
  modified_base 95: mod_base = OTHER; note = 2'-O-Methyl-guanosine
  modified_base 96: mod_base = OTHER; note = 2'-O-Methyl-cytidine
  modified_base 97: mod_base = OTHER; note = 2'-O-Methyl-uridine
  modified_base 98: mod_base = OTHER; note = 2'-O-Methyl-uridine phosphorothioate
  modified_base 99: mod_base = OTHER; note = 2'-O-Methyl-uridine phosphorothioate
  modified_base 100: mod_base = OTHER; note = 2'-O-Methyl-uridine

SEQ ID NO: 1779 - RNA, 103 nt, synthetic construct; identical to SEQ ID NO: 1700
  source 1..103: mol_type = other RNA; note = Description of Artificial Sequence: Synthetic polynucleotide
  modified_base 1: mod_base = OTHER; note = 2'-O-Methyl-cytidine phosphorothioate
  modified_base 2: mod_base = OTHER; note = 2'-O-Methyl-adenosine phosphorothioate
  modified_base 3: mod_base = OTHER; note = 2'-O-Methyl-guanosine
  modified_base 21: mod_base = OTHER; note = 2'-O-Methyl-guanosine
  modified_base 28: mod_base = OTHER; note = 2'-O-Methyl-adenosine
  modified_base 29: mod_base = OTHER; note = 2'-O-Methyl-guanosine
  modified_base 30: mod_base = OTHER; note = 2'-O-Methyl-cytidine
  modified_base 31: mod_base = OTHER; note = 2'-O-Methyl-uridine
  modified_base 32: mod_base = OTHER; note = 2'-O-Methyl-adenosine
  modified_base 34: mod_base = OTHER; note = 2'-O-Methyl-adenosine
  modified_base 35: mod_base = OTHER; note = 2'-O-Methyl-adenosine
  modified_base 36: mod_base = OTHER; note = 2'-O-Methyl-adenosine
  modified_base 37: mod_base = OTHER; note = 2'-O-Methyl-uridine
  modified_base 38: mod_base = OTHER; note = 2'-O-Methyl-adenosine
  modified_base 39: mod_base = OTHER; note = 2'-O-Methyl-guanosine
  modified_base 40: mod_base = OTHER; note = 2'-O-Methyl-cytidine
  modified_base 41: mod_base = OTHER; note = 2'-O-Methyl-adenosine
  modified_base 42: mod_base = OTHER; note = 2'-O-Methyl-adenosine
  modified_base 45: mod_base = OTHER; note = uridine phosphorothioate
  modified_base 46: mod_base = OTHER; note = 2'-O-Methyl-adenosine
  modified_base 48: mod_base = OTHER; note = 2'-O-Methyl-adenosine
  modified_base 50: mod_base = OTHER; note = 2'-O-Methyl-uridine
  modified_base 52: mod_base = OTHER; note = 2'-O-Methyl-adenosine
  modified_base 53: mod_base = OTHER; note = 2'-O-Methyl-guanosine
  modified_base 54: mod_base = OTHER; note = 2'-O-Methyl-guanosine
  modified_base 55: mod_base = OTHER; note = 2'-O-Methyl-cytidine
  modified_base 56: mod_base = OTHER; note = 2'-O-Methyl-uridine
  modified_base 57: mod_base = OTHER; note = 2'-O-Methyl-adenosine
  modified_base 60: mod_base = OTHER; note = 2'-O-Methyl-cytidine
  modified_base 61: mod_base = OTHER; note = 2'-O-Methyl-cytidine
  modified_base 66: mod_base = OTHER; note = 2'-O-Methyl-uridine
  modified_base 67: mod_base = OTHER; note = 2'-O-Methyl-cytidine
  modified_base 70: mod_base = OTHER; note = 2'-O-Methyl-cytidine
  modified_base 71: mod_base = OTHER; note = 2'-O-Methyl-uridine
  modified_base 72: mod_base = OTHER; note = 2'-O-Methyl-uridine
  modified_base 74: mod_base = OTHER; note = 2'-O-Methyl-adenosine
  modified_base 75: mod_base = OTHER; note = 2'-O-Methyl-adenosine
  modified_base 76: mod_base = OTHER; note = 2'-O-Methyl-adenosine
  modified_base 77: mod_base = OTHER; note = 2'-O-Methyl-adenosine
  modified_base 78: mod_base = OTHER; note = 2'-O-Methyl-adenosine
  modified_base 79: mod_base = OTHER; note = 2'-O-Methyl-guanosine
  modified_base 80: mod_base = OTHER; note = 2'-O-Methyl-uridine
  modified_base 81: mod_base = OTHER; note = 2'-O-Methyl-guanosine
  modified_base 83: mod_base = OTHER; note = 2'-O-Methyl-cytidine
  modified_base 84: mod_base = OTHER; note = 2'-O-Methyl-adenosine
  modified_base 85: mod_base = OTHER; note = 2'-O-Methyl-cytidine
  modified_base 86: mod_base = OTHER; note = 2'-O-Methyl-cytidine
  modified_base 87: mod_base = OTHER; note = 2'-O-Methyl-guanosine
  modified_base 88: mod_base = OTHER; note = 2'-O-Methyl-adenosine
  modified_base 89: mod_base = OTHER; note = 2'-O-Methyl-guanosine
  modified_base 90: mod_base = OTHER; note = 2'-O-Methyl-uridine
  modified_base 91: mod_base = OTHER; note = 2'-O-Methyl-cytidine
  modified_base 92: mod_base = OTHER; note = 2'-O-Methyl-guanosine
  modified_base 93: mod_base = OTHER; note = 2'-O-Methyl-guanosine
  modified_base 94: mod_base = OTHER; note = 2'-O-Methyl-uridine
  modified_base 95: mod_base = OTHER; note = 2'-O-Methyl-guanosine
  modified_base 96: mod_base = OTHER; note = 2'-O-Methyl-cytidine
  modified_base 97: mod_base = OTHER; note = 2'-O-Methyl-uridine
  modified_base 98: mod_base = OTHER; note = 2'-O-Methyl-uridine phosphorothioate
  modified_base 99: mod_base = OTHER; note = 2'-O-Methyl-uridine phosphorothioate
  modified_base 100: mod_base = OTHER; note = 2'-O-Methyl-uridine

SEQ ID NO: 1780 - RNA, 103 nt, synthetic construct; identical to SEQ ID NO: 1643
  source 1..103: mol_type = other RNA; note = Description of Artificial Sequence: Synthetic polynucleotide
  modified_base 1: mod_base = OTHER; note = 2'-O-Methyl-cytidine phosphorothioate
  modified_base 2: mod_base = OTHER; note = 2'-O-Methyl-cytidine phosphorothioate
  modified_base 3: mod_base = OTHER; note = 2'-O-Methyl-cytidine
  modified_base 21: mod_base = OTHER; note = 2'-O-Methyl-guanosine
  modified_base 25: mod_base = OTHER; note = uridine phosphorothioate
  modified_base 28: mod_base = OTHER; note = 2'-O-Methyl-adenosine
  modified_base 29: mod_base = OTHER; note = 2'-O-Methyl-guanosine
  modified_base 30: mod_base = OTHER; note = 2'-O-Methyl-cytidine
  modified_base 31: mod_base = OTHER; note = 2'-O-Methyl-uridine
  modified_base 32: mod_base = OTHER; note = 2'-O-Methyl-adenosine
  modified_base 34: mod_base = OTHER; note = 2'-O-Methyl-adenosine
  modified_base 35: mod_base = OTHER; note = 2'-O-Methyl-adenosine
  modified_base 36: mod_base = OTHER; note = 2'-O-Methyl-adenosine
  modified_base 37: mod_base = OTHER; note = 2'-O-Methyl-uridine
  modified_base 38: mod_base = OTHER; note = 2'-O-Methyl-adenosine
  modified_base 39: mod_base = OTHER; note = 2'-O-Methyl-guanosine
  modified_base 40: mod_base = OTHER; note = 2'-O-Methyl-cytidine
  modified_base 41: mod_base = OTHER; note = 2'-O-Methyl-adenosine
  modified_base 42: mod_base = OTHER; note = 2'-O-Methyl-adenosine
  modified_base 46: mod_base = OTHER; note = 2'-O-Methyl-adenosine
  modified_base 48: mod_base = OTHER; note = 2'-O-Methyl-adenosine
  modified_base 50: mod_base = OTHER; note = 2'-O-Methyl-uridine
  modified_base 52: mod_base = OTHER; note = 2'-O-Methyl-adenosine
  modified_base 53: mod_base = OTHER; note = 2'-O-Methyl-guanosine
  modified_base 54: mod_base = OTHER; note = 2'-O-Methyl-guanosine
  modified_base 57: mod_base = OTHER; note = 2'-O-Methyl-adenosine
  modified_base 61: mod_base = OTHER; note = 2'-O-Methyl-cytidine
  modified_base 66: mod_base = OTHER; note = 2'-O-Methyl-uridine
  modified_base 67: mod_base = OTHER; note = 2'-O-Methyl-cytidine
  modified_base 70: mod_base = OTHER; note = 2'-O-Methyl-cytidine
  modified_base 71: mod_base = OTHER; note = 2'-O-Methyl-uridine
  modified_base 72: mod_base = OTHER; note = 2'-O-Methyl-uridine
  modified_base 74: mod_base = OTHER; note = 2'-O-Methyl-adenosine
  modified_base 75: mod_base = OTHER; note = 2'-O-Methyl-adenosine
  modified_base 76: mod_base = OTHER; note = 2'-O-Methyl-adenosine
  modified_base 77: mod_base = OTHER; note = 2'-O-Methyl-adenosine
  modified_base 78: mod_base = OTHER; note = 2'-O-Methyl-adenosine
  modified_base 79: mod_base = OTHER; note = 2'-O-Methyl-guanosine
  modified_base 80: mod_base = OTHER; note = 2'-O-Methyl-uridine
  modified_base 82: mod_base = OTHER; note = 2'-O-Methyl-guanosine
  modified_base 83: mod_base = OTHER; note = 2'-O-Methyl-cytidine
  modified_base 84: mod_base = OTHER; note = 2'-O-Methyl-adenosine
  modified_base 85: mod_base = OTHER; note = 2'-O-Methyl-cytidine
  modified_base 86: mod_base = OTHER; note = 2'-O-Methyl-cytidine
  modified_base 87: mod_base = OTHER; note = 2'-O-Methyl-guanosine
  modified_base 89: mod_base = OTHER; note = 2'-O-Methyl-guanosine
  modified_base 92: mod_base = OTHER; note = 2'-O-Methyl-guanosine
  modified_base 93: mod_base = OTHER; note = 2'-O-Methyl-guanosine
  modified_base 94: mod_base = OTHER; note = 2'-O-Methyl-uridine
  modified_base 95: mod_base = OTHER; note = 2'-O-Methyl-guanosine
  modified_base 96: mod_base = OTHER; note = 2'-O-Methyl-cytidine
  modified_base 97: mod_base = OTHER; note = 2'-O-Methyl-uridine
  modified_base 98: mod_base = OTHER; note = 2'-O-Methyl-uridine phosphorothioate
  modified_base 99: mod_base = OTHER; note = 2'-O-Methyl-uridine phosphorothioate
  modified_base 100: mod_base = OTHER; note = 2'-O-Methyl-uridine

SEQ ID NO: 1781 - RNA, 103 nt, synthetic construct; identical to SEQ ID NO: 1699
  source 1..103: mol_type = other RNA; note = Description of Artificial Sequence: Synthetic polynucleotide
  modified_base 1: mod_base = OTHER; note = 2'-O-Methyl-guanosine phosphorothioate
  modified_base 2: mod_base = OTHER; note = 2'-O-Methyl-adenosine phosphorothioate
  modified_base 3: mod_base = OTHER; note = 2'-O-Methyl-guanosine
  modified_base 21: mod_base = OTHER; note = 2'-O-Methyl-guanosine
  modified_base 25: mod_base = OTHER; note = uridine phosphorothioate
  modified_base 28: mod_base = OTHER; note = 2'-O-Methyl-adenosine
  modified_base 29: mod_base = OTHER; note = 2'-O-Methyl-guanosine
  modified_base 30: mod_base = OTHER; note = 2'-O-Methyl-cytidine
  modified_base 31: mod_base = OTHER; note = 2'-O-Methyl-uridine
  modified_base 32: mod_base = OTHER; note = 2'-O-Methyl-adenosine
  modified_base 34: mod_base = OTHER; note = 2'-O-Methyl-adenosine
  modified_base 35: mod_base = OTHER; note = 2'-O-Methyl-adenosine
  modified_base 36: mod_base = OTHER; note = 2'-O-Methyl-adenosine
  modified_base 37: mod_base = OTHER; note = 2'-O-Methyl-uridine
  modified_base 38: mod_base = OTHER; note = 2'-O-Methyl-adenosine
  modified_base 39: mod_base = OTHER; note = 2'-O-Methyl-guanosine
  modified_base 40: mod_base = OTHER; note = 2'-O-Methyl-cytidine
  modified_base 41: mod_base = OTHER; note = 2'-O-Methyl-adenosine
  modified_base 42: mod_base = OTHER; note = 2'-O-Methyl-adenosine
  modified_base 46: mod_base = OTHER; note = 2'-O-Methyl-adenosine
  modified_base 48: mod_base = OTHER; note = 2'-O-Methyl-adenosine
  modified_base 50: mod_base = OTHER; note = 2'-O-Methyl-uridine
  modified_base 52: mod_base = OTHER; note = 2'-O-Methyl-adenosine
  modified_base 53: mod_base = OTHER; note = 2'-O-Methyl-guanosine
  modified_base 54: mod_base = OTHER; note = 2'-O-Methyl-guanosine
  modified_base 57: mod_base = OTHER; note = 2'-O-Methyl-adenosine
  modified_base 61: mod_base = OTHER; note = 2'-O-Methyl-cytidine
  modified_base 66: mod_base = OTHER; note = 2'-O-Methyl-uridine
  modified_base 67: mod_base = OTHER; note = 2'-O-Methyl-cytidine
  modified_base 70: mod_base = OTHER; note = 2'-O-Methyl-cytidine
  modified_base 71: mod_base = OTHER; note = 2'-O-Methyl-uridine
  modified_base 72: mod_base = OTHER; note = 2'-O-Methyl-uridine
  modified_base 74: mod_base = OTHER; note = 2'-O-Methyl-adenosine
  modified_base 75: mod_base = OTHER; note = 2'-O-Methyl-adenosine
  modified_base 76: mod_base = OTHER; note = 2'-O-Methyl-adenosine
  modified_base 77: mod_base = OTHER; note = 2'-O-Methyl-adenosine
  modified_base 78: mod_base = OTHER; note = 2'-O-Methyl-adenosine
  modified_base 79: mod_base = OTHER; note = 2'-O-Methyl-guanosine
  modified_base 80: mod_base = OTHER; note = 2'-O-Methyl-uridine
  modified_base 82: mod_base = OTHER; note = 2'-O-Methyl-guanosine
  modified_base 83: mod_base = OTHER; note = 2'-O-Methyl-cytidine
  modified_base 84: mod_base = OTHER; note = 2'-O-Methyl-adenosine
  modified_base 85: mod_base = OTHER; note = 2'-O-Methyl-cytidine
  modified_base 86: mod_base = OTHER; note = 2'-O-Methyl-cytidine
  modified_base 87: mod_base = OTHER; note = 2'-O-Methyl-guanosine
  modified_base 89: mod_base = OTHER; note = 2'-O-Methyl-guanosine
  modified_base 92: mod_base = OTHER; note = 2'-O-Methyl-guanosine
  modified_base 93: mod_base = OTHER; note = 2'-O-Methyl-guanosine
  modified_base 94: mod_base = OTHER; note = 2'-O-Methyl-uridine
  modified_base 95: mod_base = OTHER; note = 2'-O-Methyl-guanosine
  modified_base 96: mod_base = OTHER; note = 2'-O-Methyl-cytidine
  modified_base 97: mod_base = OTHER; note = 2'-O-Methyl-uridine
  modified_base 98: mod_base = OTHER; note = 2'-O-Methyl-uridine phosphorothioate
  modified_base 99: mod_base = OTHER; note = 2'-O-Methyl-uridine phosphorothioate
  modified_base 100: mod_base = OTHER; note = 2'-O-Methyl-uridine

SEQ ID NO: 1782 - RNA, 103 nt, synthetic construct; identical to SEQ ID NO: 1700
  source 1..103: mol_type = other RNA; note = Description of Artificial Sequence: Synthetic polynucleotide
  modified_base 1: mod_base = OTHER; note = 2'-O-Methyl-cytidine phosphorothioate
  modified_base 2: mod_base = OTHER; note = 2'-O-Methyl-adenosine phosphorothioate
  modified_base 3: mod_base = OTHER; note = 2'-O-Methyl-guanosine
  modified_base 21: mod_base = OTHER; note = 2'-O-Methyl-guanosine
  modified_base 25: mod_base = OTHER; note = uridine phosphorothioate
  modified_base 28: mod_base = OTHER; note = 2'-O-Methyl-adenosine
  modified_base 29: mod_base = OTHER; note = 2'-O-Methyl-guanosine
  modified_base 30: mod_base = OTHER; note = 2'-O-Methyl-cytidine
  modified_base 31: mod_base = OTHER; note = 2'-O-Methyl-uridine
  modified_base 32: mod_base = OTHER; note = 2'-O-Methyl-adenosine
  modified_base 34: mod_base = OTHER; note = 2'-O-Methyl-adenosine
  modified_base 35: mod_base = OTHER; note = 2'-O-Methyl-adenosine
  modified_base 36: mod_base = OTHER; note = 2'-O-Methyl-adenosine
  modified_base 37: mod_base = OTHER; note = 2'-O-Methyl-uridine
  modified_base 38: mod_base = OTHER; note = 2'-O-Methyl-adenosine
  modified_base 39: mod_base = OTHER; note = 2'-O-Methyl-guanosine
  modified_base 40: mod_base = OTHER; note = 2'-O-Methyl-cytidine
  modified_base 41: mod_base = OTHER; note = 2'-O-Methyl-adenosine
  modified_base 42: mod_base = OTHER; note = 2'-O-Methyl-adenosine
  modified_base 46: mod_base = OTHER; note = 2'-O-Methyl-adenosine
  modified_base 48: mod_base = OTHER; note = 2'-O-Methyl-adenosine
  modified_base 50: mod_base = OTHER; note = 2'-O-Methyl-uridine
  modified_base 52: mod_base = OTHER; note = 2'-O-Methyl-adenosine
  modified_base 53: mod_base = OTHER; note = 2'-O-Methyl-guanosine
  modified_base 54: mod_base = OTHER; note = 2'-O-Methyl-guanosine
  modified_base 55: mod_base = OTHER; note = 2'-O-Methyl-cytidine
  modified_base 56: mod_base = OTHER; note = 2'-O-Methyl-uridine
  modified_base 57: mod_base = OTHER; note = 2'-O-Methyl-adenosine
  modified_base 60: mod_base = OTHER; note = 2'-O-Methyl-cytidine
  modified_base 61: mod_base = OTHER; note = 2'-O-Methyl-cytidine
  modified_base 66: mod_base = OTHER; note = 2'-O-Methyl-uridine
  modified_base 67: mod_base = OTHER; note = 2'-O-Methyl-cytidine
  modified_base 70: mod_base = OTHER; note = 2'-O-Methyl-cytidine
  modified_base 71: mod_base = OTHER; note = 2'-O-Methyl-uridine
  modified_base 72: mod_base = OTHER; note = 2'-O-Methyl-uridine
  modified_base 74: mod_base = OTHER; note = 2'-O-Methyl-adenosine
  modified_base 75: mod_base = OTHER; note = 2'-O-Methyl-adenosine
  modified_base 76: mod_base = OTHER; note = 2'-O-Methyl-adenosine
  modified_base 77: mod_base = OTHER; note = 2'-O-Methyl-adenosine
  modified_base 78: mod_base = OTHER; note = 2'-O-Methyl-adenosine
  modified_base 79: mod_base = OTHER; note = 2'-O-Methyl-guanosine
  modified_base 80: mod_base = OTHER; note = 2'-O-Methyl-uridine
  modified_base 81: mod_base = OTHER; note = 2'-O-Methyl-guanosine
  modified_base 83: mod_base = OTHER; note = 2'-O-Methyl-cytidine
  modified_base 84: mod_base = OTHER; note = 2'-O-Methyl-adenosine
  modified_base 85: mod_base = OTHER; note = 2'-O-Methyl-cytidine
  modified_base 86: mod_base = OTHER; note = 2'-O-Methyl-cytidine
  modified_base 87: mod_base = OTHER; note = 2'-O-Methyl-guanosine
  modified_base 88: mod_base = OTHER; note = 2'-O-Methyl-adenosine
  modified_base 89: mod_base = OTHER; note = 2'-O-Methyl-guanosine
  modified_base 90: mod_base = OTHER; note = 2'-O-Methyl-uridine
  modified_base 91: mod_base = OTHER; note = 2'-O-Methyl-cytidine
  modified_base 92: mod_base = OTHER; note = 2'-O-Methyl-guanosine
  modified_base 93: mod_base = OTHER; note = 2'-O-Methyl-guanosine
  modified_base 94: mod_base = OTHER; note = 2'-O-Methyl-uridine
  modified_base 95: mod_base = OTHER; note = 2'-O-Methyl-guanosine
  modified_base 96: mod_base = OTHER; note = 2'-O-Methyl-cytidine
  modified_base 97: mod_base = OTHER; note = 2'-O-Methyl-uridine
  modified_base 98: mod_base = OTHER; note = 2'-O-Methyl-uridine phosphorothioate
  modified_base 99: mod_base = OTHER; note = 2'-O-Methyl-uridine phosphorothioate
  modified_base 100: mod_base = OTHER; note = 2'-O-Methyl-uridine

SEQ ID NO: 1783 - RNA, 103 nt, synthetic construct; identical to SEQ ID NO: 1643
  source 1..103: mol_type = other RNA; note = Description of Artificial Sequence: Synthetic polynucleotide
  modified_base 1: mod_base = OTHER; note = 2'-O-Methyl-cytidine phosphorothioate
  modified_base 2: mod_base = OTHER; note = 2'-O-Methyl-cytidine phosphorothioate
  modified_base 3: mod_base = OTHER; note = 2'-O-Methyl-cytidine
  modified_base 21: mod_base = OTHER; note = 2'-O-Methyl-guanosine
  modified_base 28: mod_base = OTHER; note = 2'-O-Methyl-adenosine
  modified_base 29: mod_base = OTHER; note = 2'-O-Methyl-guanosine
  modified_base 30: mod_base = OTHER; note = 2'-O-Methyl-cytidine
  modified_base 31: mod_base = OTHER; note = 2'-O-Methyl-uridine
  modified_base 32: mod_base = OTHER; note = 2'-O-Methyl-adenosine
  modified_base 34: mod_base = OTHER; note = 2'-O-Methyl-adenosine
  modified_base 35: mod_base = OTHER; note = 2'-O-Methyl-adenosine
  modified_base 36: mod_base = OTHER; note = 2'-O-Methyl-adenosine
  modified_base 37: mod_base = OTHER; note = 2'-O-Methyl-uridine
  modified_base 38: mod_base = OTHER; note = 2'-O-Methyl-adenosine
  modified_base 39: mod_base = OTHER; note = 2'-O-Methyl-guanosine
  modified_base 40: mod_base = OTHER; note = 2'-O-Methyl-cytidine
  modified_base 41: mod_base = OTHER; note = 2'-O-Methyl-adenosine
  modified_base 42: mod_base = OTHER; note = 2'-O-Methyl-adenosine
  modified_base 45: mod_base = OTHER; note = uridine phosphorothioate
  modified_base 46: mod_base = OTHER; note = 2'-O-Methyl-adenosine
  modified_base 48: mod_base = OTHER; note = 2'-O-Methyl-adenosine
  modified_base 50: mod_base = OTHER; note = 2'-O-Methyl-uridine
  modified_base 52: mod_base = OTHER; note = 2'-O-Methyl-adenosine
  modified_base 53: mod_base = OTHER; note = 2'-O-Methyl-guanosine
  modified_base 54: mod_base = OTHER; note = 2'-O-Methyl-guanosine
  modified_base 57: mod_base = OTHER; note = 2'-O-Methyl-adenosine
  modified_base 61: mod_base = OTHER; note = 2'-O-Methyl-cytidine
  modified_base 64: mod_base = OTHER; note = uridine phosphorothioate
  modified_base 66: mod_base = OTHER; note = 2'-O-Methyl-uridine
  modified_base 67: mod_base = OTHER; note = 2'-O-Methyl-cytidine
  modified_base 70: mod_base = OTHER; note = 2'-O-Methyl-cytidine
  modified_base 71: mod_base = OTHER; note = 2'-O-Methyl-uridine
  modified_base 72: mod_base = OTHER; note = 2'-O-Methyl-uridine
  modified_base 74: mod_base = OTHER; note = 2'-O-Methyl-adenosine
  modified_base 75: mod_base = OTHER; note = 2'-O-Methyl-adenosine
  modified_base 76: mod_base = OTHER; note = 2'-O-Methyl-adenosine
  modified_base 77: mod_base = OTHER; note = 2'-O-Methyl-adenosine
  modified_base 78: mod_base = OTHER; note = 2'-O-Methyl-adenosine
  modified_base 79: mod_base = OTHER; note = 2'-O-Methyl-guanosine
  modified_base 80: mod_base = OTHER; note = 2'-O-Methyl-uridine
  modified_base 82: mod_base = OTHER; note = 2'-O-Methyl-guanosine
  modified_base 83: mod_base = OTHER; note = 2'-O-Methyl-cytidine
  modified_base 84: mod_base = OTHER; note = 2'-O-Methyl-adenosine
  modified_base 85: mod_base = OTHER; note = 2'-O-Methyl-cytidine
  modified_base 86: mod_base = OTHER; note = 2'-O-Methyl-cytidine
  modified_base 87: mod_base = OTHER; note = 2'-O-Methyl-guanosine
  modified_base 89: mod_base = OTHER; note = 2'-O-Methyl-guanosine
  modified_base 92: mod_base = OTHER; note = 2'-O-Methyl-guanosine
  modified_base 93: mod_base = OTHER; note = 2'-O-Methyl-guanosine
  modified_base 94: mod_base = OTHER; note = 2'-O-Methyl-uridine
  modified_base 95: mod_base = OTHER; note = 2'-O-Methyl-guanosine
  modified_base 96: mod_base = OTHER; note = 2'-O-Methyl-cytidine
  modified_base 97: mod_base = OTHER; note = 2'-O-Methyl-uridine
  modified_base 98: mod_base = OTHER; note = 2'-O-Methyl-uridine phosphorothioate
  modified_base 99: mod_base = OTHER; note = 2'-O-Methyl-uridine phosphorothioate
  modified_base 100: mod_base = OTHER; note = 2'-O-Methyl-uridine

SEQ ID NO: 1784 - RNA, 103 nt, synthetic construct; identical to SEQ ID NO: 1699
  source 1..103: mol_type = other RNA; note = Description of Artificial Sequence: Synthetic polynucleotide
  modified_base 1: mod_base = OTHER; note = 2'-O-Methyl-guanosine phosphorothioate
  modified_base 2: mod_base = OTHER; note = 2'-O-Methyl-adenosine phosphorothioate
  modified_base 3: mod_base = OTHER; note = 2'-O-Methyl-guanosine
  modified_base 21: mod_base = OTHER; note = 2'-O-Methyl-guanosine
  modified_base 28: mod_base = OTHER; note = 2'-O-Methyl-adenosine
  modified_base 29: mod_base = OTHER; note = 2'-O-Methyl-guanosine
  modified_base 30: mod_base = OTHER; note = 2'-O-Methyl-cytidine
  modified_base 31: mod_base = OTHER; note = 2'-O-Methyl-uridine
  modified_base 32: mod_base = OTHER; note = 2'-O-Methyl-adenosine
  modified_base 34: mod_base = OTHER; note = 2'-O-Methyl-adenosine
  modified_base 35: mod_base = OTHER; note = 2'-O-Methyl-adenosine
  modified_base 36: mod_base = OTHER; note = 2'-O-Methyl-adenosine
  modified_base 37: mod_base = OTHER; note = 2'-O-Methyl-uridine
  modified_base 38: mod_base = OTHER; note = 2'-O-Methyl-adenosine
  modified_base 39: mod_base = OTHER; note = 2'-O-Methyl-guanosine
  modified_base 40: mod_base = OTHER; note = 2'-O-Methyl-cytidine
  modified_base 41: mod_base = OTHER; note = 2'-O-Methyl-adenosine
  modified_base 42: mod_base = OTHER; note = 2'-O-Methyl-adenosine
  modified_base 45: mod_base = OTHER; note = uridine phosphorothioate
  modified_base 46: mod_base = OTHER; note = 2'-O-Methyl-adenosine
  modified_base 48: mod_base = OTHER; note = 2'-O-Methyl-adenosine
  modified_base 50: mod_base = OTHER; note = 2'-O-Methyl-uridine
  modified_base 52: mod_base = OTHER; note = 2'-O-Methyl-adenosine
  modified_base 53: mod_base = OTHER; note = 2'-O-Methyl-guanosine
  modified_base 54: mod_base = OTHER; note = 2'-O-Methyl-guanosine
  modified_base 57: mod_base = OTHER; note = 2'-O-Methyl-adenosine
  modified_base 61: mod_base = OTHER; note = 2'-O-Methyl-cytidine
  modified_base 64: mod_base = OTHER; note = uridine phosphorothioate
  modified_base 66: mod_base = OTHER; note = 2'-O-Methyl-uridine
  modified_base 67: mod_base = OTHER; note = 2'-O-Methyl-cytidine
  modified_base 70: mod_base = OTHER; note = 2'-O-Methyl-cytidine
  modified_base 71: mod_base = OTHER; note = 2'-O-Methyl-uridine
  modified_base 72: mod_base = OTHER; note = 2'-O-Methyl-uridine
  modified_base 74: mod_base = OTHER; note = 2'-O-Methyl-adenosine
  modified_base 75: mod_base = OTHER; note = 2'-O-Methyl-adenosine
  modified_base 76: mod_base = OTHER; note = 2'-O-Methyl-adenosine
  modified_base 77: mod_base = OTHER; note = 2'-O-Methyl-adenosine
  modified_base 78: mod_base = OTHER; note = 2'-O-Methyl-adenosine
  modified_base 79: mod_base = OTHER; note = 2'-O-Methyl-guanosine
  modified_base 80: mod_base = OTHER; note = 2'-O-Methyl-uridine
  modified_base 82: mod_base = OTHER; note = 2'-O-Methyl-guanosine
  modified_base 83: mod_base = OTHER; note = 2'-O-Methyl-cytidine
  modified_base 84: mod_base = OTHER; note = 2'-O-Methyl-adenosine
  modified_base 85: mod_base = OTHER; note = 2'-O-Methyl-cytidine
  modified_base 86: mod_base = OTHER; note = 2'-O-Methyl-cytidine
  modified_base 87: mod_base = OTHER; note = 2'-O-Methyl-guanosine
  modified_base 89: mod_base = OTHER; note = 2'-O-Methyl-guanosine
  modified_base 92: mod_base = OTHER; note = 2'-O-Methyl-guanosine
  modified_base 93: mod_base = OTHER; note = 2'-O-Methyl-guanosine
  modified_base 94: mod_base = OTHER; note = 2'-O-Methyl-uridine
  modified_base 95: mod_base = OTHER; note = 2'-O-Methyl-guanosine
  modified_base 96: mod_base = OTHER; note = 2'-O-Methyl-cytidine
  modified_base 97: mod_base = OTHER; note = 2'-O-Methyl-uridine
  modified_base 98: mod_base = OTHER; note = 2'-O-Methyl-uridine phosphorothioate
  modified_base 99: mod_base = OTHER; note = 2'-O-Methyl-uridine phosphorothioate
  modified_base 100: mod_base = OTHER; note = 2'-O-Methyl-uridine

SEQ ID NO: 1785 - RNA, 103 nt, synthetic construct; identical to SEQ ID NO: 1700
  source 1..103: mol_type = other RNA; note = Description of Artificial Sequence: Synthetic polynucleotide
  modified_base 1: mod_base = OTHER; note = 2'-O-Methyl-cytidine phosphorothioate
  modified_base 2: mod_base = OTHER; note = 2'-O-Methyl-adenosine phosphorothioate
  modified_base 3: mod_base = OTHER; note = 2'-O-Methyl-guanosine
  modified_base 21: mod_base = OTHER; note = 2'-O-Methyl-guanosine
  modified_base 28: mod_base = OTHER; note = 2'-O-Methyl-adenosine
  modified_base 29: mod_base = OTHER; note = 2'-O-Methyl-guanosine
  modified_base 30: mod_base = OTHER; note = 2'-O-Methyl-cytidine
  modified_base 31: mod_base = OTHER; note = 2'-O-Methyl-uridine
  modified_base 32: mod_base = OTHER; note = 2'-O-Methyl-adenosine
  modified_base 34: mod_base = OTHER; note = 2'-O-Methyl-adenosine
  modified_base 35: mod_base = OTHER; note = 2'-O-Methyl-adenosine
  modified_base 36: mod_base = OTHER; note = 2'-O-Methyl-adenosine
  modified_base 37: mod_base = OTHER; note = 2'-O-Methyl-uridine
  modified_base 38: mod_base = OTHER; note = 2'-O-Methyl-adenosine
  modified_base 39: mod_base = OTHER; note = 2'-O-Methyl-guanosine
  modified_base 40: mod_base = OTHER; note = 2'-O-Methyl-cytidine
  modified_base 41: mod_base = OTHER; note = 2'-O-Methyl-adenosine
  modified_base 42: mod_base = OTHER; note = 2'-O-Methyl-adenosine
  modified_base 45: mod_base = OTHER; note = uridine phosphorothioate
  modified_base 46: mod_base = OTHER; note = 2'-O-Methyl-adenosine
  modified_base 48: mod_base = OTHER; note = 2'-O-Methyl-adenosine
  modified_base 50: mod_base = OTHER; note = 2'-O-Methyl-uridine
  modified_base 52: mod_base = OTHER; note = 2'-O-Methyl-adenosine
  modified_base 53: mod_base = OTHER; note = 2'-O-Methyl-guanosine
  modified_base 54: mod_base = OTHER; note = 2'-O-Methyl-guanosine
  modified_base 55: mod_base = OTHER; note = 2'-O-Methyl-cytidine
  modified_base 56: mod_base = OTHER; note = 2'-O-Methyl-uridine
  modified_base 57: mod_base = OTHER; note = 2'-O-Methyl-adenosine
  modified_base 60: mod_base = OTHER; note = 2'-O-Methyl-cytidine
  modified_base 61: mod_base = OTHER; note = 2'-O-Methyl-cytidine
  modified_base 64: mod_base = OTHER; note = uridine phosphorothioate
  modified_base 66: mod_base = OTHER; note = 2'-O-Methyl-uridine
  modified_base 67: mod_base = OTHER; note = 2'-O-Methyl-cytidine
  modified_base 70: mod_base = OTHER; note = 2'-O-Methyl-cytidine
  modified_base 71: mod_base = OTHER; note = 2'-O-Methyl-uridine
  modified_base 72: mod_base = OTHER; note = 2'-O-Methyl-uridine
  modified_base 74: mod_base = OTHER; note = 2'-O-Methyl-adenosine
  modified_base 75: mod_base = OTHER; note = 2'-O-Methyl-adenosine
  modified_base 76: mod_base = OTHER; note = 2'-O-Methyl-adenosine
  modified_base 77: mod_base = OTHER; note = 2'-O-Methyl-adenosine
  modified_base 78: mod_base = OTHER; note = 2'-O-Methyl-adenosine
  modified_base 79: mod_base = OTHER; note = 2'-O-Methyl-guanosine
  modified_base 80: mod_base = OTHER; note = 2'-O-Methyl-uridine
  modified_base 81: mod_base = OTHER; note = 2'-O-Methyl-guanosine
  modified_base 83: mod_base = OTHER; note = 2'-O-Methyl-cytidine
  modified_base 84: mod_base = OTHER; note = 2'-O-Methyl-adenosine
  modified_base 85: mod_base = OTHER; note = 2'-O-Methyl-cytidine
  modified_base 86: mod_base = OTHER; note = 2'-O-Methyl-cytidine
  modified_base 87: mod_base = OTHER; note = 2'-O-Methyl-guanosine
  modified_base 88: mod_base = OTHER; note = 2'-O-Methyl-adenosine
  modified_base 89: mod_base = OTHER; note = 2'-O-Methyl-guanosine
  modified_base 90: mod_base = OTHER; note = 2'-O-Methyl-uridine
  modified_base 91: mod_base = OTHER; note = 2'-O-Methyl-cytidine
  modified_base 92: mod_base = OTHER; note = 2'-O-Methyl-guanosine
  modified_base 93: mod_base = OTHER; note = 2'-O-Methyl-guanosine
  modified_base 94: mod_base = OTHER; note = 2'-O-Methyl-uridine
  modified_base 95: mod_base = OTHER; note = 2'-O-Methyl-guanosine
  modified_base 96: mod_base = OTHER; note = 2'-O-Methyl-cytidine
  modified_base 97: mod_base = OTHER; note = 2'-O-Methyl-uridine
  modified_base 98: mod_base = OTHER; note = 2'-O-Methyl-uridine phosphorothioate
  modified_base 99: mod_base = OTHER; note = 2'-O-Methyl-uridine phosphorothioate
  modified_base 100: mod_base = OTHER; note = 2'-O-Methyl-uridine

SEQ ID NO: 1786 - RNA, 103 nt, synthetic construct; identical to SEQ ID NO: 1643
  source 1..103: mol_type = other RNA; note = Description of Artificial Sequence: Synthetic polynucleotide
  modified_base 1: mod_base = OTHER; note = 2'-O-Methyl-cytidine phosphorothioate
  modified_base 2: mod_base = OTHER; note = 2'-O-Methyl-cytidine phosphorothioate
  modified_base 3: mod_base = OTHER; note = 2'-O-Methyl-cytidine
  modified_base 21: mod_base = OTHER; note = 2'-O-Methyl-guanosine
  modified_base 25: mod_base = OTHER; note = uridine phosphorothioate
  modified_base 28: mod_base = OTHER; note = 2'-O-Methyl-adenosine
  modified_base 29: mod_base = OTHER; note = 2'-O-Methyl-guanosine
  modified_base 30: mod_base = OTHER; note = 2'-O-Methyl-cytidine
  modified_base 31: mod_base = OTHER; note = 2'-O-Methyl-uridine
  modified_base 32: mod_base = OTHER; note = 2'-O-Methyl-adenosine
  modified_base 34: mod_base = OTHER; note = 2'-O-Methyl-adenosine
  modified_base 35: mod_base = OTHER; note = 2'-O-Methyl-adenosine
  modified_base 36: mod_base = OTHER; note = 2'-O-Methyl-adenosine
  modified_base 37: mod_base = OTHER; note = 2'-O-Methyl-uridine
  modified_base 38: mod_base = OTHER; note = 2'-O-Methyl-adenosine
  modified_base 39: mod_base = OTHER; note = 2'-O-Methyl-guanosine
  modified_base 40: mod_base = OTHER; note = 2'-O-Methyl-cytidine
  modified_base 41: mod_base = OTHER; note = 2'-O-Methyl-adenosine
  modified_base 42: mod_base = OTHER; note = 2'-O-Methyl-adenosine
  modified_base 45: mod_base = OTHER; note = uridine phosphorothioate
  modified_base 46: mod_base = OTHER; note = 2'-O-Methyl-adenosine
  modified_base 48: mod_base = OTHER; note = 2'-O-Methyl-adenosine
  modified_base 50: mod_base = OTHER; note = 2'-O-Methyl-uridine
  modified_base 52: mod_base = OTHER; note = 2'-O-Methyl-adenosine
  modified_base 53: mod_base = OTHER; note = 2'-O-Methyl-guanosine
  modified_base 54: mod_base = OTHER; note = 2'-O-Methyl-guanosine
  modified_base 57: mod_base = OTHER; note = 2'-O-Methyl-adenosine
  modified_base 61: mod_base = OTHER; note = 2'-O-Methyl-cytidine
  modified_base 66: mod_base = OTHER; note = 2'-O-Methyl-uridine
  modified_base 67: mod_base = OTHER; note = 2'-O-Methyl-cytidine
  modified_base 70: mod_base = OTHER; note = 2'-O-Methyl-cytidine
  modified_base 71: mod_base = OTHER; note = 2'-O-Methyl-uridine
  modified_base 72: mod_base = OTHER; note = 2'-O-Methyl-uridine
  modified_base 74: mod_base = OTHER; note = 2'-O-Methyl-adenosine
  modified_base 75: mod_base = OTHER; note = 2'-O-Methyl-adenosine
  modified_base 76: mod_base = OTHER; note = 2'-O-Methyl-adenosine
  modified_base 77: mod_base = OTHER; note = 2'-O-Methyl-adenosine
  modified_base 78: mod_base = OTHER; note = 2'-O-Methyl-adenosine
  modified_base 79: mod_base = OTHER; note = 2'-O-Methyl-guanosine
  modified_base 80: mod_base = OTHER; note = 2'-O-Methyl-uridine
  modified_base 82: mod_base = OTHER; note = 2'-O-Methyl-guanosine
  modified_base 83: mod_base = OTHER; note = 2'-O-Methyl-cytidine
  modified_base 84: mod_base = OTHER; note = 2'-O-Methyl-adenosine
  modified_base 85: mod_base = OTHER; note = 2'-O-Methyl-cytidine
  modified_base 86: mod_base = OTHER; note = 2'-O-Methyl-cytidine
  modified_base 87: mod_base = OTHER; note = 2'-O-Methyl-guanosine
  modified_base 89: mod_base = OTHER; note = 2'-O-Methyl-guanosine
  modified_base 92: mod_base = OTHER; note = 2'-O-Methyl-guanosine
  modified_base 93: mod_base = OTHER; note = 2'-O-Methyl-guanosine
  modified_base 94: mod_base = OTHER; note = 2'-O-Methyl-uridine
  modified_base 95: mod_base = OTHER; note = 2'-O-Methyl-guanosine
  modified_base 96: mod_base = OTHER; note = 2'-O-Methyl-cytidine
  modified_base 97: mod_base = OTHER; note = 2'-O-Methyl-uridine
  modified_base 98: mod_base = OTHER; note = 2'-O-Methyl-uridine phosphorothioate
  modified_base 99: mod_base = OTHER; note = 2'-O-Methyl-uridine phosphorothioate
  modified_base 100: mod_base = OTHER; note = 2'-O-Methyl-uridine

SEQ ID NO: 1787 - RNA, 103 nt, synthetic construct; identical to SEQ ID NO: 1699
  source 1..103: mol_type = other RNA; note = Description of Artificial Sequence: Synthetic polynucleotide
  modified_base 1: mod_base = OTHER; note = 2'-O-Methyl-guanosine phosphorothioate
  modified_base 2: mod_base = OTHER; note = 2'-O-Methyl-adenosine phosphorothioate
  modified_base 3: mod_base = OTHER; note = 2'-O-Methyl-guanosine
  modified_base 21: mod_base = OTHER; note = 2'-O-Methyl-guanosine
  modified_base 25: mod_base = OTHER; note = uridine phosphorothioate
  modified_base 28: mod_base = OTHER; note = 2'-O-Methyl-adenosine
  modified_base 29: mod_base = OTHER; note = 2'-O-Methyl-guanosine
  modified_base 30: mod_base = OTHER; note = 2'-O-Methyl-cytidine
  modified_base 31: mod_base = OTHER; note = 2'-O-Methyl-uridine
  modified_base 32: mod_base = OTHER; note = 2'-O-Methyl-adenosine
  modified_base 34: mod_base = OTHER; note = 2'-O-Methyl-adenosine
  modified_base 35: mod_base = OTHER; note = 2'-O-Methyl-adenosine
  modified_base 36: mod_base = OTHER; note = 2'-O-Methyl-adenosine
  modified_base 37: mod_base = OTHER; note = 2'-O-Methyl-uridine
  modified_base 38: mod_base = OTHER; note = 2'-O-Methyl-adenosine
  modified_base 39: mod_base = OTHER; note = 2'-O-Methyl-guanosine
  modified_base 40: mod_base = OTHER; note = 2'-O-Methyl-cytidine
  modified_base 41: mod_base = OTHER; note = 2'-O-Methyl-adenosine
  modified_base 42: mod_base = OTHER; note = 2'-O-Methyl-adenosine
  modified_base 45: mod_base = OTHER; note = uridine phosphorothioate
  modified_base 46: mod_base = OTHER; note = 2'-O-Methyl-adenosine
  modified_base 48: mod_base = OTHER; note = 2'-O-Methyl-adenosine
  modified_base 50: mod_base = OTHER; note = 2'-O-Methyl-uridine
  modified_base 52: mod_base = OTHER; note = 2'-O-Methyl-adenosine
  modified_base 53: mod_base = OTHER; note = 2'-O-Methyl-guanosine
  modified_base 54: mod_base = OTHER; note = 2'-O-Methyl-guanosine
  modified_base 57: mod_base = OTHER; note = 2'-O-Methyl-adenosine
  modified_base 61: mod_base = OTHER; note = 2'-O-Methyl-cytidine
  modified_base 66: mod_base = OTHER; note = 2'-O-Methyl-uridine
  modified_base 67: mod_base = OTHER; note = 2'-O-Methyl-cytidine
  modified_base 70: mod_base = OTHER; note = 2'-O-Methyl-cytidine
  modified_base 71: mod_base = OTHER; note = 2'-O-Methyl-uridine
  modified_base 72: mod_base = OTHER; note = 2'-O-Methyl-uridine
  modified_base 74: mod_base = OTHER; note = 2'-O-Methyl-adenosine
  modified_base 75: mod_base = OTHER; note = 2'-O-Methyl-adenosine
  modified_base 76: mod_base = OTHER; note = 2'-O-Methyl-adenosine
  modified_base 77: mod_base = OTHER; note = 2'-O-Methyl-adenosine
  modified_base 78: mod_base = OTHER; note = 2'-O-Methyl-adenosine
  modified_base 79: mod_base = OTHER; note = 2'-O-Methyl-guanosine
  modified_base 80: mod_base = OTHER; note = 2'-O-Methyl-uridine
  modified_base 82: mod_base = OTHER; note = 2'-O-Methyl-guanosine
  modified_base 83: mod_base = OTHER; note = 2'-O-Methyl-cytidine
  modified_base 84: mod_base = OTHER; note = 2'-O-Methyl-adenosine
  modified_base 85: mod_base = OTHER; note = 2'-O-Methyl-cytidine
  modified_base 86: mod_base = OTHER; note = 2'-O-Methyl-cytidine
  modified_base 87: mod_base = OTHER; note = 2'-O-Methyl-guanosine
  modified_base 89: mod_base = OTHER; note = 2'-O-Methyl-guanosine
  modified_base 92: mod_base = OTHER; note = 2'-O-Methyl-guanosine
  modified_base 93: mod_base = OTHER; note = 2'-O-Methyl-guanosine
  modified_base 94: mod_base = OTHER; note = 2'-O-Methyl-uridine
  modified_base 95: mod_base = OTHER; note = 2'-O-Methyl-guanosine
  modified_base 96: mod_base = OTHER; note = 2'-O-Methyl-cytidine
  modified_base 97: mod_base = OTHER; note = 2'-O-Methyl-uridine
  modified_base 98: mod_base = OTHER; note = 2'-O-Methyl-uridine phosphorothioate
  modified_base 99: mod_base = OTHER; note = 2'-O-Methyl-uridine phosphorothioate
  modified_base 100: mod_base = OTHER; note = 2'-O-Methyl-uridine

SEQ ID NO: 1788 - RNA, 103 nt, synthetic construct; identical to SEQ ID NO: 1700
  source 1..103: mol_type = other RNA; note = Description of Artificial Sequence: Synthetic polynucleotide
  modified_base 1: mod_base = OTHER; note = 2'-O-Methyl-cytidine phosphorothioate
  modified_base 2: mod_base = OTHER; note = 2'-O-Methyl-adenosine phosphorothioate
  modified_base 3: mod_base = OTHER; note = 2'-O-Methyl-guanosine
  modified_base 21: mod_base = OTHER; note = 2'-O-Methyl-guanosine
  modified_base 25: mod_base = OTHER; note = uridine phosphorothioate
  modified_base 28: mod_base = OTHER; note = 2'-O-Methyl-adenosine
  modified_base 29: mod_base = OTHER; note = 2'-O-Methyl-guanosine
  modified_base 30: mod_base = OTHER; note = 2'-O-Methyl-cytidine
  modified_base 31: mod_base = OTHER; note = 2'-O-Methyl-uridine
  modified_base 32: mod_base = OTHER; note = 2'-O-Methyl-adenosine
  modified_base 34: mod_base = OTHER; note = 2'-O-Methyl-adenosine
  modified_base 35: mod_base = OTHER; note = 2'-O-Methyl-adenosine
  modified_base 36: mod_base = OTHER; note = 2'-O-Methyl-adenosine
  modified_base 37: mod_base = OTHER; note = 2'-O-Methyl-uridine
  modified_base 38: mod_base = OTHER; note = 2'-O-Methyl-adenosine
  modified_base 39: mod_base = OTHER; note = 2'-O-Methyl-guanosine
  modified_base 40: mod_base = OTHER; note = 2'-O-Methyl-cytidine
  modified_base 41: mod_base = OTHER; note = 2'-O-Methyl-adenosine
  modified_base 42: mod_base = OTHER; note = 2'-O-Methyl-adenosine
  modified_base 45: mod_base = OTHER; note = uridine phosphorothioate
  modified_base 46: mod_base = OTHER; note = 2'-O-Methyl-adenosine
  modified_base 48: mod_base = OTHER; note = 2'-O-Methyl-adenosine
  modified_base 50: mod_base = OTHER; note = 2'-O-Methyl-uridine
  modified_base 52: mod_base = OTHER; note = 2'-O-Methyl-adenosine
  modified_base 53: mod_base = OTHER; note = 2'-O-Methyl-guanosine
  modified_base 54: mod_base = OTHER; note = 2'-O-Methyl-guanosine
  modified_base 55: mod_base = OTHER; note = 2'-O-Methyl-cytidine
  modified_base 56: mod_base = OTHER; note = 2'-O-Methyl-uridine
  modified_base 57: mod_base = OTHER; note = 2'-O-Methyl-adenosine
  modified_base 60: mod_base = OTHER; note = 2'-O-Methyl-cytidine
  modified_base 61: mod_base = OTHER; note = 2'-O-Methyl-cytidine
  modified_base 66: mod_base = OTHER; note = 2'-O-Methyl-uridine
  modified_base 67: mod_base = OTHER; note = 2'-O-Methyl-cytidine
  modified_base 70: mod_base = OTHER; note = 2'-O-Methyl-cytidine
  modified_base 71: mod_base = OTHER; note = 2'-O-Methyl-uridine
  modified_base 72: mod_base = OTHER; note = 2'-O-Methyl-uridine
  modified_base 74: mod_base = OTHER; note = 2'-O-Methyl-adenosine
  modified_base 75: mod_base = OTHER; note = 2'-O-Methyl-adenosine
  modified_base 76: mod_base = OTHER; note = 2'-O-Methyl-adenosine
  modified_base 77: mod_base = OTHER; note = 2'-O-Methyl-adenosine
  modified_base 78: mod_base = OTHER; note = 2'-O-Methyl-adenosine
  modified_base 79: mod_base = OTHER; note = 2'-O-Methyl-guanosine
  modified_base 80: mod_base = OTHER; note = 2'-O-Methyl-uridine
  modified_base 81: mod_base = OTHER; note = 2'-O-Methyl-guanosine
  modified_base 83: mod_base = OTHER; note = 2'-O-Methyl-cytidine
  modified_base 84: mod_base = OTHER; note = 2'-O-Methyl-adenosine
  modified_base 85: mod_base = OTHER; note = 2'-O-Methyl-cytidine
  modified_base 86: mod_base = OTHER; note = 2'-O-Methyl-cytidine
  modified_base 87: mod_base = OTHER; note = 2'-O-Methyl-guanosine
  modified_base 88: mod_base = OTHER; note = 2'-O-Methyl-adenosine
  modified_base 89: mod_base = OTHER; note = 2'-O-Methyl-guanosine
  modified_base 90: mod_base = OTHER; note = 2'-O-Methyl-uridine
  modified_base 91: mod_base = OTHER; note = 2'-O-Methyl-cytidine
  modified_base 92: mod_base = OTHER; note = 2'-O-Methyl-guanosine
  modified_base 93: mod_base = OTHER; note = 2'-O-Methyl-guanosine
  modified_base 94: mod_base = OTHER; note = 2'-O-Methyl-uridine
  modified_base 95: mod_base = OTHER; note = 2'-O-Methyl-guanosine
  modified_base 96: mod_base = OTHER; note = 2'-O-Methyl-cytidine
  modified_base 97: mod_base = OTHER; note = 2'-O-Methyl-uridine
  modified_base 98: mod_base = OTHER; note = 2'-O-Methyl-uridine phosphorothioate
  modified_base 99: mod_base = OTHER; note = 2'-O-Methyl-uridine phosphorothioate
  modified_base 100: mod_base = OTHER; note = 2'-O-Methyl-uridine

SEQ ID NO: 1789 - RNA, 103 nt, synthetic construct; identical to SEQ ID NO: 1643
  source 1..103: mol_type = other RNA; note = Description of Artificial Sequence: Synthetic polynucleotide
  modified_base 1: mod_base = OTHER; note = 2'-O-Methyl-cytidine phosphorothioate
  modified_base 2: mod_base = OTHER; note = 2'-O-Methyl-cytidine phosphorothioate
  modified_base 3: mod_base = OTHER; note = 2'-O-Methyl-cytidine
  modified_base 21: mod_base = OTHER; note = 2'-O-Methyl-guanosine
  modified_base 25: mod_base = OTHER; note = uridine phosphorothioate
  modified_base 28: mod_base = OTHER; note = 2'-O-Methyl-adenosine
  modified_base 29: mod_base = OTHER; note = 2'-O-Methyl-guanosine
  modified_base 30: mod_base = OTHER; note = 2'-O-Methyl-cytidine
  modified_base 31: mod_base = OTHER; note = 2'-O-Methyl-uridine
  modified_base 32: mod_base = OTHER; note = 2'-O-Methyl-adenosine
  modified_base 34: mod_base = OTHER; note = 2'-O-Methyl-adenosine
  modified_base 35: mod_base = OTHER; note = 2'-O-Methyl-adenosine
  modified_base 36: mod_base = OTHER; note = 2'-O-Methyl-adenosine
  modified_base 37: mod_base = OTHER; note = 2'-O-Methyl-uridine
  modified_base 38: mod_base = OTHER; note = 2'-O-Methyl-adenosine
  modified_base 39: mod_base = OTHER; note = 2'-O-Methyl-guanosine
  modified_base 40: mod_base = OTHER; note = 2'-O-Methyl-cytidine
  modified_base 41: mod_base = OTHER; note = 2'-O-Methyl-adenosine
  modified_base 42: mod_base = OTHER; note = 2'-O-Methyl-adenosine
  modified_base 46: mod_base = OTHER; note = 2'-O-Methyl-adenosine
  modified_base 48: mod_base = OTHER; note = 2'-O-Methyl-adenosine
  modified_base 50: mod_base = OTHER; note = 2'-O-Methyl-uridine
  modified_base 52: mod_base = OTHER; note = 2'-O-Methyl-adenosine
  modified_base 53: mod_base = OTHER; note = 2'-O-Methyl-guanosine
  modified_base 54: mod_base = OTHER; note = 2'-O-Methyl-guanosine
  modified_base 57: mod_base = OTHER; note = 2'-O-Methyl-adenosine
  modified_base 61: mod_base = OTHER; note = 2'-O-Methyl-cytidine
  modified_base 64: mod_base = OTHER; note = uridine phosphorothioate
  modified_base 66: mod_base = OTHER; note = 2'-O-Methyl-uridine
  modified_base 67: mod_base = OTHER; note = 2'-O-Methyl-cytidine
  modified_base 70: mod_base = OTHER; note = 2'-O-Methyl-cytidine
  modified_base 71: mod_base = OTHER; note = 2'-O-Methyl-uridine
  modified_base 72: mod_base = OTHER; note = 2'-O-Methyl-uridine
  modified_base 74: mod_base = OTHER; note = 2'-O-Methyl-adenosine
  modified_base 75: mod_base = OTHER; note = 2'-O-Methyl-adenosine
  modified_base 76: mod_base = OTHER; note = 2'-O-Methyl-adenosine
  modified_base 77: mod_base = OTHER; note = 2'-O-Methyl-adenosine
  modified_base 78: mod_base = OTHER; note = 2'-O-Methyl-adenosine
  modified_base 79: mod_base = OTHER; note = 2'-O-Methyl-guanosine
  modified_base 80: mod_base = OTHER; note = 2'-O-Methyl-uridine
  modified_base 82: mod_base = OTHER; note = 2'-O-Methyl-guanosine
  modified_base 83: mod_base = OTHER; note = 2'-O-Methyl-cytidine
  modified_base 84: mod_base = OTHER; note = 2'-O-Methyl-adenosine
  modified_base 85: mod_base = OTHER; note = 2'-O-Methyl-cytidine
  modified_base 86: mod_base = OTHER; note = 2'-O-Methyl-cytidine
  modified_base 87: mod_base = OTHER; note = 2'-O-Methyl-guanosine
  modified_base 89: mod_base = OTHER; note = 2'-O-Methyl-guanosine
  modified_base 92: mod_base = OTHER; note = 2'-O-Methyl-guanosine
  modified_base 93: mod_base = OTHER; note = 2'-O-Methyl-guanosine
  modified_base 94: mod_base = OTHER; note = 2'-O-Methyl-uridine
  modified_base 95: mod_base = OTHER; note = 2'-O-Methyl-guanosine
  modified_base 96: mod_base = OTHER; note = 2'-O-Methyl-cytidine
  modified_base 97: mod_base = OTHER; note = 2'-O-Methyl-uridine
  modified_base 98: mod_base = OTHER; note = 2'-O-Methyl-uridine phosphorothioate
  modified_base 99: mod_base = OTHER; note = 2'-O-Methyl-uridine phosphorothioate
  modified_base 100: mod_base = OTHER; note = 2'-O-Methyl-uridine

SEQ ID NO: 1790 - RNA, 103 nt, synthetic construct; identical to SEQ ID NO: 1699
  source 1..103: mol_type = other RNA; note = Description of Artificial Sequence: Synthetic polynucleotide
  modified_base 1: mod_base = OTHER; note = 2'-O-Methyl-guanosine phosphorothioate
  modified_base 2: mod_base = OTHER; note = 2'-O-Methyl-adenosine phosphorothioate
  modified_base 3: mod_base = OTHER; note = 2'-O-Methyl-guanosine
  modified_base 21: mod_base = OTHER; note = 2'-O-Methyl-guanosine
  modified_base 25: mod_base = OTHER; note = uridine phosphorothioate
  modified_base 28: mod_base = OTHER; note = 2'-O-Methyl-adenosine
  modified_base 29: mod_base = OTHER; note = 2'-O-Methyl-guanosine
  modified_base 30: mod_base = OTHER; note = 2'-O-Methyl-cytidine
  modified_base 31: mod_base = OTHER; note = 2'-O-Methyl-uridine
  modified_base 32: mod_base = OTHER; note = 2'-O-Methyl-adenosine
  modified_base 34: mod_base = OTHER; note = 2'-O-Methyl-adenosine
  modified_base 35: mod_base = OTHER; note = 2'-O-Methyl-adenosine
  modified_base 36: mod_base = OTHER; note = 2'-O-Methyl-adenosine
  modified_base 37: mod_base = OTHER; note = 2'-O-Methyl-uridine
  modified_base 38: mod_base = OTHER; note = 2'-O-Methyl-adenosine
  modified_base 39: mod_base = OTHER; note = 2'-O-Methyl-guanosine
  modified_base 40: mod_base = OTHER; note = 2'-O-Methyl-cytidine
  modified_base 41: mod_base = OTHER; note = 2'-O-Methyl-adenosine
  modified_base 42: mod_base = OTHER; note = 2'-O-Methyl-adenosine
  modified_base 46: mod_base = OTHER; note = 2'-O-Methyl-adenosine
  modified_base 48: mod_base = OTHER; note = 2'-O-Methyl-adenosine
  modified_base 50: mod_base = OTHER; note = 2'-O-Methyl-uridine
  modified_base 52: mod_base = OTHER; note = 2'-O-Methyl-adenosine
  modified_base 53: mod_base = OTHER; note = 2'-O-Methyl-guanosine
  modified_base 54: mod_base = OTHER; note = 2'-O-Methyl-guanosine
  modified_base 57: mod_base = OTHER; note = 2'-O-Methyl-adenosine
  modified_base 61: mod_base = OTHER; note = 2'-O-Methyl-cytidine
  modified_base 64: mod_base = OTHER; note = uridine phosphorothioate
  modified_base 66: mod_base = OTHER; note = 2'-O-Methyl-uridine
  modified_base 67: mod_base = OTHER; note = 2'-O-Methyl-cytidine
  modified_base 70: mod_base = OTHER; note = 2'-O-Methyl-cytidine
  modified_base 71: mod_base = OTHER; note = 2'-O-Methyl-uridine
  modified_base 72: mod_base = OTHER; note = 2'-O-Methyl-uridine
  modified_base 74: mod_base = OTHER; note = 2'-O-Methyl-adenosine
  modified_base 75: mod_base = OTHER; note = 2'-O-Methyl-adenosine
  modified_base 76: mod_base = OTHER; note = 2'-O-Methyl-adenosine
  modified_base 77: mod_base = OTHER; note = 2'-O-Methyl-adenosine
  modified_base 78: mod_base = OTHER; note = 2'-O-Methyl-adenosine
  modified_base 79: mod_base = OTHER; note = 2'-O-Methyl-guanosine
  modified_base 80: mod_base = OTHER; note = 2'-O-Methyl-uridine
  modified_base 82: mod_base = OTHER; note = 2'-O-Methyl-guanosine
  modified_base 83: mod_base = OTHER; note = 2'-O-Methyl-cytidine
  modified_base 84: mod_base = OTHER; note = 2'-O-Methyl-adenosine
  modified_base 85: mod_base = OTHER; note = 2'-O-Methyl-cytidine
  modified_base 86: mod_base = OTHER; note = 2'-O-Methyl-cytidine
  modified_base 87: mod_base = OTHER; note = 2'-O-Methyl-guanosine
  modified_base 89: mod_base = OTHER; note = 2'-O-Methyl-guanosine
  modified_base 92: mod_base = OTHER; note = 2'-O-Methyl-guanosine
  modified_base 93: mod_base = OTHER; note = 2'-O-Methyl-guanosine
  modified_base 94: mod_base = OTHER; note = 2'-O-Methyl-uridine
  modified_base 95: mod_base = OTHER; note = 2'-O-Methyl-guanosine
  modified_base 96: mod_base = OTHER; note = 2'-O-Methyl-cytidine
  modified_base 97: mod_base = OTHER; note = 2'-O-Methyl-uridine
  modified_base 98: mod_base = OTHER; note = 2'-O-Methyl-uridine phosphorothioate
  modified_base 99: mod_base = OTHER; note = 2'-O-Methyl-uridine phosphorothioate
  modified_base 100: mod_base = OTHER; note = 2'-O-Methyl-uridine

SEQ ID NO: 1791 - RNA, 103 nt, synthetic construct; identical to SEQ ID NO: 1700
  source 1..103: mol_type = other RNA; note = Description of Artificial Sequence: Synthetic polynucleotide
  modified_base 1: mod_base = OTHER; note = 2'-O-Methyl-cytidine phosphorothioate
  modified_base 2: mod_base = OTHER; note = 2'-O-Methyl-adenosine phosphorothioate
  modified_base 3: mod_base = OTHER; note = 2'-O-Methyl-guanosine
  modified_base 21: mod_base = OTHER; note = 2'-O-Methyl-guanosine
  modified_base 25: mod_base = OTHER; note = uridine phosphorothioate
  modified_base 28: mod_base = OTHER; note = 2'-O-Methyl-adenosine
  modified_base 29: mod_base = OTHER; note = 2'-O-Methyl-guanosine
  modified_base 30: mod_base = OTHER; note = 2'-O-Methyl-cytidine
  modified_base 31: mod_base = OTHER; note = 2'-O-Methyl-uridine
  modified_base 32: mod_base = OTHER; note = 2'-O-Methyl-adenosine
  modified_base 34: mod_base = OTHER; note = 2'-O-Methyl-adenosine
  modified_base 35: mod_base = OTHER; note = 2'-O-Methyl-adenosine
  modified_base 36: mod_base = OTHER; note = 2'-O-Methyl-adenosine
  modified_base 37: mod_base = OTHER; note = 2'-O-Methyl-uridine
  modified_base 38: mod_base = OTHER; note = 2'-O-Methyl-adenosine
  modified_base 39: mod_base = OTHER; note = 2'-O-Methyl-guanosine
  modified_base 40: mod_base = OTHER; note = 2'-O-Methyl-cytidine
  modified_base 41: mod_base = OTHER; note = 2'-O-Methyl-adenosine
  modified_base 42: mod_base = OTHER; note = 2'-O-Methyl-adenosine
  modified_base 46: mod_base = OTHER; note = 2'-O-Methyl-adenosine
  modified_base 48: mod_base = OTHER; note = 2'-O-Methyl-adenosine
  modified_base 50: mod_base = OTHER; note = 2'-O-Methyl-uridine
  modified_base 52: mod_base = OTHER; note = 2'-O-Methyl-adenosine
  modified_base 53: mod_base = OTHER; note = 2'-O-Methyl-guanosine
  modified_base 54: mod_base = OTHER; note = 2'-O-Methyl-guanosine
  modified_base 55: mod_base = OTHER; note = 2'-O-Methyl-cytidine
  modified_base 56: mod_base = OTHER; note = 2'-O-Methyl-uridine
  modified_base 57: mod_base = OTHER; note = 2'-O-Methyl-adenosine
  modified_base 60: mod_base = OTHER; note = 2'-O-Methyl-cytidine
  modified_base 61: mod_base = OTHER; note = 2'-O-Methyl-cytidine
  modified_base 64: mod_base = OTHER; note = uridine phosphorothioate
  modified_base 66: mod_base = OTHER; note = 2'-O-Methyl-uridine
  modified_base 67: mod_base = OTHER; note = 2'-O-Methyl-cytidine
  modified_base 70: mod_base = OTHER; note = 2'-O-Methyl-cytidine
  modified_base 71: mod_base = OTHER; note = 2'-O-Methyl-uridine
  modified_base 72: mod_base = OTHER; note = 2'-O-Methyl-uridine
  modified_base 74: mod_base = OTHER; note = 2'-O-Methyl-adenosine
  modified_base 75: mod_base = OTHER; note = 2'-O-Methyl-adenosine
  modified_base 76: mod_base = OTHER; note = 2'-O-Methyl-adenosine
  modified_base 77: mod_base = OTHER; note = 2'-O-Methyl-adenosine
  modified_base 78: mod_base = OTHER; note = 2'-O-Methyl-adenosine
  modified_base 79: mod_base = OTHER; note = 2'-O-Methyl-guanosine
  modified_base 80: mod_base = OTHER; note = 2'-O-Methyl-uridine
  modified_base 81: mod_base = OTHER; note = 2'-O-Methyl-guanosine
  modified_base 83: mod_base = OTHER; note = 2'-O-Methyl-cytidine
  modified_base 84: mod_base = OTHER; note = 2'-O-Methyl-adenosine
  modified_base 85: mod_base = OTHER; note = 2'-O-Methyl-cytidine
  modified_base 86: mod_base = OTHER; note = 2'-O-Methyl-cytidine
  modified_base 87: mod_base = OTHER; note = 2'-O-Methyl-guanosine
  modified_base 88: mod_base = OTHER; note = 2'-O-Methyl-adenosine
  modified_base 89: mod_base = OTHER; note = 2'-O-Methyl-guanosine
  modified_base 90: mod_base = OTHER; note = 2'-O-Methyl-uridine
  modified_base 91: mod_base = OTHER; note = 2'-O-Methyl-cytidine
  modified_base 92: mod_base = OTHER; note = 2'-O-Methyl-guanosine
  modified_base 93: mod_base = OTHER; note = 2'-O-Methyl-guanosine
  modified_base 94: mod_base = OTHER; note = 2'-O-Methyl-uridine
  modified_base 95: mod_base = OTHER; note = 2'-O-Methyl-guanosine
  modified_base 96: mod_base = OTHER; note = 2'-O-Methyl-cytidine
  modified_base 97: mod_base = OTHER; note = 2'-O-Methyl-uridine
  modified_base 98: mod_base = OTHER; note = 2'-O-Methyl-uridine phosphorothioate
  modified_base 99: mod_base = OTHER; note = 2'-O-Methyl-uridine phosphorothioate
  modified_base 100: mod_base = OTHER; note = 2'-O-Methyl-uridine

SEQ ID NO: 1792 - RNA, 103 nt, synthetic construct; identical to SEQ ID NO: 1643
  source 1..103: mol_type = other RNA; note = Description of Artificial Sequence: Synthetic polynucleotide
  modified_base 1: mod_base = OTHER; note = 2'-O-Methyl-cytidine phosphorothioate
  modified_base 2: mod_base = OTHER; note = 2'-O-Methyl-cytidine phosphorothioate
  modified_base 3: mod_base = OTHER; note = 2'-O-Methyl-cytidine
  modified_base 21: mod_base = OTHER; note = 2'-O-Methyl-guanosine
  modified_base 25: mod_base = OTHER; note = uridine phosphorothioate
  modified_base 28: mod_base = OTHER; note = 2'-O-Methyl-adenosine
  modified_base 29: mod_base = OTHER; note = 2'-O-Methyl-guanosine
  modified_base 30: mod_base = OTHER; note = 2'-O-Methyl-cytidine
  modified_base 31: mod_base = OTHER; note = 2'-O-Methyl-uridine
  modified_base 32: mod_base = OTHER; note = 2'-O-Methyl-adenosine
  modified_base 34: mod_base = OTHER; note = 2'-O-Methyl-adenosine
  modified_base 35: mod_base = OTHER; note = 2'-O-Methyl-adenosine
  modified_base 36: mod_base = OTHER; note = 2'-O-Methyl-adenosine
  modified_base 37: mod_base = OTHER; note = 2'-O-Methyl-uridine
  modified_base 38: mod_base = OTHER; note = 2'-O-Methyl-adenosine
  modified_base 39: mod_base = OTHER; note = 2'-O-Methyl-guanosine
  modified_base 40: mod_base = OTHER; note = 2'-O-Methyl-cytidine
  modified_base 41: mod_base = OTHER; note = 2'-O-Methyl-adenosine
  modified_base 42: mod_base = OTHER; note = 2'-O-Methyl-adenosine
  modified_base 45: mod_base = OTHER; note = uridine phosphorothioate
  modified_base 46: mod_base = OTHER; note = 2'-O-Methyl-adenosine
  modified_base 48: mod_base = OTHER; note = 2'-O-Methyl-adenosine
  modified_base 50: mod_base = OTHER; note = 2'-O-Methyl-uridine
  modified_base 52: mod_base = OTHER; note = 2'-O-Methyl-adenosine
  modified_base 53: mod_base = OTHER; note = 2'-O-Methyl-guanosine
  modified_base 54: mod_base = OTHER; note = 2'-O-Methyl-guanosine
  modified_base 57: mod_base = OTHER; note = 2'-O-Methyl-adenosine
  modified_base 61: mod_base = OTHER; note = 2'-O-Methyl-cytidine
  modified_base 64: mod_base = OTHER; note = uridine phosphorothioate
  modified_base 66: mod_base = OTHER; note = 2'-O-Methyl-uridine
  modified_base 67: mod_base = OTHER; note = 2'-O-Methyl-cytidine
  modified_base 70: mod_base = OTHER; note = 2'-O-Methyl-cytidine
  modified_base 71: mod_base = OTHER; note = 2'-O-Methyl-uridine
  modified_base 72: mod_base = OTHER; note = 2'-O-Methyl-uridine
  modified_base 74: mod_base = OTHER; note = 2'-O-Methyl-adenosine
  modified_base 75: mod_base = OTHER; note = 2'-O-Methyl-adenosine
  modified_base 76: mod_base = OTHER; note = 2'-O-Methyl-adenosine
  modified_base 77: mod_base = OTHER; note = 2'-O-Methyl-adenosine
  modified_base 78: mod_base = OTHER; note = 2'-O-Methyl-adenosine
  modified_base 79: mod_base = OTHER; note = 2'-O-Methyl-guanosine
  modified_base 80: mod_base = OTHER; note = 2'-O-Methyl-uridine
  modified_base 82: mod_base = OTHER; note = 2'-O-Methyl-guanosine
  modified_base 83: mod_base = OTHER; note = 2'-O-Methyl-cytidine
  modified_base 84: mod_base = OTHER; note = 2'-O-Methyl-adenosine
  modified_base 85: mod_base = OTHER; note = 2'-O-Methyl-cytidine
  modified_base 86: mod_base = OTHER; note = 2'-O-Methyl-cytidine
  modified_base 87: mod_base = OTHER; note = 2'-O-Methyl-guanosine
  modified_base 89: mod_base = OTHER; note = 2'-O-Methyl-guanosine
  modified_base 92: mod_base = OTHER; note = 2'-O-Methyl-guanosine
  modified_base 93: mod_base = OTHER; note = 2'-O-Methyl-guanosine
  modified_base 94: mod_base = OTHER; note = 2'-O-Methyl-uridine
  modified_base 95: mod_base = OTHER; note = 2'-O-Methyl-guanosine
  modified_base 96: mod_base = OTHER; note = 2'-O-Methyl-cytidine
  modified_base 97: mod_base = OTHER; note = 2'-O-Methyl-uridine
  modified_base 98: mod_base = OTHER; note = 2'-O-Methyl-uridine phosphorothioate
  modified_base 99: mod_base = OTHER; note = 2'-O-Methyl-uridine phosphorothioate
  modified_base 100: mod_base = OTHER; note = 2'-O-Methyl-uridine

SEQ ID NO: 1793 - RNA, 103 nt, synthetic construct; identical to SEQ ID NO: 1699
  source 1..103: mol_type = other RNA; note = Description of Artificial Sequence: Synthetic polynucleotide
  modified_base 1: mod_base = OTHER; note = 2'-O-Methyl-guanosine phosphorothioate
  modified_base 2: mod_base = OTHER; note = 2'-O-Methyl-adenosine phosphorothioate
  modified_base 3: mod_base = OTHER; note = 2'-O-Methyl-guanosine
  modified_base 21: mod_base = OTHER; note = 2'-O-Methyl-guanosine
  modified_base 25: mod_base = OTHER; note = uridine phosphorothioate
  modified_base 28: mod_base = OTHER; note = 2'-O-Methyl-adenosine
  modified_base 29: mod_base = OTHER; note = 2'-O-Methyl-guanosine
  modified_base 30: mod_base = OTHER; note = 2'-O-Methyl-cytidine
  modified_base 31: mod_base = OTHER; note = 2'-O-Methyl-uridine
  modified_base 32: mod_base = OTHER; note = 2'-O-Methyl-adenosine
  modified_base 34: mod_base = OTHER; note = 2'-O-Methyl-adenosine
  modified_base 35: mod_base = OTHER; note = 2'-O-Methyl-adenosine
  modified_base 36: mod_base = OTHER; note = 2'-O-Methyl-adenosine
  modified_base 37: mod_base = OTHER; note = 2'-O-Methyl-uridine
  modified_base 38: mod_base = OTHER; note = 2'-O-Methyl-adenosine
  modified_base 39: mod_base = OTHER; note = 2'-O-Methyl-guanosine
  modified_base 40: mod_base = OTHER; note = 2'-O-Methyl-cytidine
  modified_base 41: mod_base = OTHER; note = 2'-O-Methyl-adenosine
  modified_base 42: mod_base = OTHER; note = 2'-O-Methyl-adenosine
  modified_base 45: mod_base = OTHER; note = uridine phosphorothioate
  modified_base 46: mod_base = OTHER; note = 2'-O-Methyl-adenosine
  modified_base 48: mod_base = OTHER; note = 2'-O-Methyl-adenosine
  modified_base 50: mod_base = OTHER; note = 2'-O-Methyl-uridine
  modified_base 52: mod_base = OTHER; note = 2'-O-Methyl-adenosine
  modified_base 53: mod_base = OTHER; note = 2'-O-Methyl-guanosine
  modified_base 54: mod_base = OTHER; note = 2'-O-Methyl-guanosine
  modified_base 57: mod_base = OTHER; note = 2'-O-Methyl-adenosine
  modified_base 61: mod_base = OTHER; note = 2'-O-Methyl-cytidine
  modified_base 64: mod_base = OTHER; note = uridine phosphorothioate
  modified_base 66: mod_base = OTHER; note = 2'-O-Methyl-uridine
  modified_base 67: mod_base = OTHER; note = 2'-O-Methyl-cytidine
  modified_base 70: mod_base = OTHER; note = 2'-O-Methyl-cytidine
  modified_base 71: mod_base = OTHER; note = 2'-O-Methyl-uridine
  modified_base 72: mod_base = OTHER; note = 2'-O-Methyl-uridine
  modified_base 74: mod_base = OTHER; note = 2'-O-Methyl-adenosine
  modified_base 75: mod_base = OTHER; note = 2'-O-Methyl-adenosine
  modified_base 76: mod_base = OTHER; note = 2'-O-Methyl-adenosine
  modified_base 77: mod_base = OTHER; note = 2'-O-Methyl-adenosine
  modified_base 78: mod_base = OTHER; note = 2'-O-Methyl-adenosine
  modified_base 79: mod_base = OTHER; note = 2'-O-Methyl-guanosine
  modified_base 80: mod_base = OTHER; note = 2'-O-Methyl-uridine
  modified_base 82: mod_base = OTHER; note = 2'-O-Methyl-guanosine
  modified_base 83: mod_base = OTHER; note = 2'-O-Methyl-cytidine
  modified_base 84: mod_base = OTHER; note = 2'-O-Methyl-adenosine
  modified_base 85: mod_base = OTHER; note = 2'-O-Methyl-cytidine
  modified_base 86: mod_base = OTHER; note = 2'-O-Methyl-cytidine
  modified_base 87: mod_base = OTHER; note = 2'-O-Methyl-guanosine
  modified_base 89: mod_base = OTHER; note = 2'-O-Methyl-guanosine
  modified_base 92: mod_base = OTHER; note = 2'-O-Methyl-guanosine
  modified_base 93: mod_base = OTHER; note = 2'-O-Methyl-guanosine
  modified_base 94: mod_base = OTHER; note = 2'-O-Methyl-uridine
  modified_base 95: mod_base = OTHER; note = 2'-O-Methyl-guanosine
  modified_base 96: mod_base = OTHER; note = 2'-O-Methyl-cytidine
  modified_base 97: mod_base = OTHER; note = 2'-O-Methyl-uridine
  modified_base 98: mod_base = OTHER; note = 2'-O-Methyl-uridine phosphorothioate
  modified_base 99: mod_base = OTHER; note = 2'-O-Methyl-uridine phosphorothioate
  modified_base 100: mod_base = OTHER; note = 2'-O-Methyl-uridine

SEQ ID NO: 1794 - RNA, 103 nt, synthetic construct; identical to SEQ ID NO: 1700
  source 1..103: mol_type = other RNA; note = Description of Artificial Sequence: Synthetic polynucleotide
  modified_base 1: mod_base = OTHER; note = 2'-O-Methyl-cytidine phosphorothioate
  modified_base 2: mod_base = OTHER; note = 2'-O-Methyl-adenosine phosphorothioate
  modified_base 3: mod_base = OTHER; note = 2'-O-Methyl-guanosine
  modified_base 21: mod_base = OTHER; note = 2'-O-Methyl-guanosine
  modified_base 25: mod_base = OTHER; note = uridine phosphorothioate
  modified_base 28: mod_base = OTHER; note = 2'-O-Methyl-adenosine
  modified_base 29: mod_base = OTHER; note = 2'-O-Methyl-guanosine
  modified_base 30: mod_base = OTHER; note = 2'-O-Methyl-cytidine
  modified_base 31: mod_base = OTHER; note = 2'-O-Methyl-uridine
  modified_base 32: mod_base = OTHER; note = 2'-O-Methyl-adenosine
  modified_base 34: mod_base = OTHER; note = 2'-O-Methyl-adenosine
  modified_base 35: mod_base = OTHER; note = 2'-O-Methyl-adenosine
  modified_base 36: mod_base = OTHER; note = 2'-O-Methyl-adenosine
  modified_base 37: mod_base = OTHER; note = 2'-O-Methyl-uridine
  modified_base 38: mod_base = OTHER; note = 2'-O-Methyl-adenosine
  modified_base 39: mod_base = OTHER; note = 2'-O-Methyl-guanosine
  modified_base 40: mod_base = OTHER; note = 2'-O-Methyl-cytidine
  modified_base 41: mod_base = OTHER; note = 2'-O-Methyl-adenosine
  modified_base 42: mod_base = OTHER; note = 2'-O-Methyl-adenosine
  modified_base 45: mod_base = OTHER; note = uridine phosphorothioate
  modified_base 46: mod_base = OTHER; note = 2'-O-Methyl-adenosine
  modified_base 48: mod_base = OTHER; note = 2'-O-Methyl-adenosine
  modified_base 50: mod_base = OTHER; note = 2'-O-Methyl-uridine
  modified_base 52: mod_base = OTHER; note = 2'-O-Methyl-adenosine
  modified_base 53: mod_base = OTHER; note = 2'-O-Methyl-guanosine
  modified_base 54: mod_base = OTHER; note = 2'-O-Methyl-guanosine
  modified_base 55: mod_base = OTHER; note = 2'-O-Methyl-cytidine
  modified_base 56: mod_base = OTHER; note = 2'-O-Methyl-uridine
  modified_base 57: mod_base = OTHER; note = 2'-O-Methyl-adenosine
  modified_base 60: mod_base = OTHER; note = 2'-O-Methyl-cytidine
  modified_base 61: mod_base = OTHER; note = 2'-O-Methyl-cytidine
  modified_base 64: mod_base = OTHER; note = uridine phosphorothioate
  modified_base 66: mod_base = OTHER; note = 2'-O-Methyl-uridine
  modified_base 67: mod_base = OTHER; note = 2'-O-Methyl-cytidine
  modified_base 70: mod_base = OTHER; note = 2'-O-Methyl-cytidine
  modified_base 71: mod_base = OTHER; note = 2'-O-Methyl-uridine
  modified_base 72: mod_base = OTHER; note = 2'-O-Methyl-uridine
  modified_base 74: mod_base = OTHER; note = 2'-O-Methyl-adenosine
  modified_base 75: mod_base = OTHER; note = 2'-O-Methyl-adenosine
  modified_base 76: mod_base = OTHER; note = 2'-O-Methyl-adenosine
  modified_base 77: mod_base = OTHER; note = 2'-O-Methyl-adenosine
  modified_base 78: mod_base = OTHER; note = 2'-O-Methyl-adenosine
  modified_base 79: mod_base = OTHER; note = 2'-O-Methyl-guanosine
  modified_base 80: mod_base = OTHER; note = 2'-O-Methyl-uridine
  modified_base 81: mod_base = OTHER; note = 2'-O-Methyl-guanosine
  modified_base 83: mod_base = OTHER; note = 2'-O-Methyl-cytidine
  modified_base 84: mod_base = OTHER; note = 2'-O-Methyl-adenosine
  modified_base 85: mod_base = OTHER; note = 2'-O-Methyl-cytidine
  modified_base 86: mod_base = OTHER; note = 2'-O-Methyl-cytidine
  modified_base 87: mod_base = OTHER; note = 2'-O-Methyl-guanosine
  modified_base 88: mod_base = OTHER; note = 2'-O-Methyl-adenosine
  modified_base 89: mod_base = OTHER; note = 2'-O-Methyl-guanosine
  modified_base 90: mod_base = OTHER; note = 2'-O-Methyl-uridine
  modified_base 91: mod_base = OTHER; note = 2'-O-Methyl-cytidine
  modified_base 92: mod_base = OTHER; note = 2'-O-Methyl-guanosine
  modified_base 93: mod_base = OTHER; note = 2'-O-Methyl-guanosine
  modified_base 94: mod_base = OTHER; note = 2'-O-Methyl-uridine
  modified_base 95: mod_base = OTHER; note = 2'-O-Methyl-guanosine
  modified_base 96: mod_base = OTHER; note = 2'-O-Methyl-cytidine
  modified_base 97: mod_base = OTHER; note = 2'-O-Methyl-uridine
  modified_base 98: mod_base = OTHER; note = 2'-O-Methyl-uridine phosphorothioate
  modified_base 99: mod_base = OTHER; note = 2'-O-Methyl-uridine phosphorothioate
  modified_base 100: mod_base = OTHER; note = 2'-O-Methyl-uridine

SEQ ID NO: 1795 - RNA, 103 nt, synthetic construct
  source 1..103: mol_type = other RNA; note = Description of Artificial Sequence: Synthetic polynucleotide
  modified_base 1: mod_base = OTHER; note = 2'-O-Methyl-cytidine phosphorothioate
  modified_base 2: mod_base = OTHER; note = 2'-O-Methyl-cytidine phosphorothioate
  modified_base 3: mod_base = OTHER; note = 2'-O-Methyl-cytidine phosphorothioate
  modified_base 21: mod_base = OTHER; note = 2'-O-Methyl-guanosine
  modified_base 28: mod_base = OTHER; note = 2'-O-Methyl-adenosine
  modified_base 29: mod_base = OTHER; note = 2'-O-Methyl-guanosine
  modified_base 30: mod_base = OTHER; note = 2'-O-Methyl-cytidine
  modified_base 31: mod_base = OTHER; note = 2'-O-Methyl-uridine
  modified_base 32: mod_base = OTHER; note = 2'-O-Methyl-adenosine
  modified_base 34: mod_base = OTHER; note = 2'-O-Methyl-adenosine
  modified_base 35: mod_base = OTHER; note = 2'-O-Methyl-adenosine
  modified_base 36: mod_base = OTHER; note = 2'-O-Methyl-adenosine
  modified_base 37: mod_base = OTHER; note = 2'-O-Methyl-uridine
  modified_base 38: mod_base = OTHER; note = 2'-O-Methyl-adenosine
  modified_base 39: mod_base = OTHER; note = 2'-O-Methyl-guanosine
  modified_base 40: mod_base = OTHER; note = 2'-O-Methyl-cytidine
  modified_base 41: mod_base = OTHER; note = 2'-O-Methyl-adenosine
  modified_base 42: mod_base = OTHER; note = 2'-O-Methyl-adenosine
  modified_base 46: mod_base = OTHER; note = 2'-O-Methyl-adenosine
  modified_base 48: mod_base = OTHER; note = 2'-O-Methyl-adenosine
  modified_base 50: mod_base = OTHER; note = 2'-O-Methyl-uridine
  modified_base 52: mod_base = OTHER; note = 2'-O-Methyl-adenosine
  modified_base 53: mod_base = OTHER; note = 2'-O-Methyl-guanosine
  modified_base 54: mod_base = OTHER; note = 2'-O-Methyl-guanosine
  modified_base 57: mod_base = OTHER; note = 2'-O-Methyl-adenosine
  modified_base 61: mod_base = OTHER; note = 2'-O-Methyl-cytidine
  modified_base 66: mod_base = OTHER; note = 2'-O-Methyl-uridine
  modified_base 67: mod_base = OTHER; note = 2'-O-Methyl-cytidine
  modified_base 70: mod_base = OTHER; note = 2'-O-Methyl-cytidine
  modified_base 71: mod_base = OTHER; note = 2'-O-Methyl-uridine
  modified_base 72: mod_base = OTHER; note = 2'-O-Methyl-uridine
  modified_base 74: mod_base = OTHER; note = 2'-O-Methyl-adenosine
  modified_base 75: mod_base = OTHER; note = 2'-O-Methyl-adenosine
  modified_base 76: mod_base = OTHER; note = 2'-O-Methyl-adenosine
  modified_base 77: mod_base = OTHER; note = 2'-O-Methyl-adenosine
  modified_base 78: mod_base = OTHER; note = 2'-O-Methyl-adenosine
  modified_base 79: mod_base = OTHER; note = 2'-O-Methyl-guanosine
  modified_base 80: mod_base = OTHER; note = 2'-O-Methyl-uridine
  modified_base 82: mod_base = OTHER; note = 2'-O-Methyl-guanosine
  modified_base 83: mod_base = OTHER; note = 2'-O-Methyl-cytidine
  modified_base 84: mod_base = OTHER; note = 2'-O-Methyl-adenosine
  modified_base 85: mod_base = OTHER; note = 2'-O-Methyl-cytidine
  modified_base 86: mod_base = OTHER; note = 2'-O-Methyl-cytidine
  modified_base 87: mod_base = OTHER; note = 2'-O-Methyl-guanosine
  modified_base 89: mod_base = OTHER; note = 2'-O-Methyl-guanosine
  modified_base 92: mod_base = OTHER; note = 2'-O-Methyl-guanosine
  modified_base 93: mod_base = OTHER; note = 2'-O-Methyl-guanosine
  modified_base 94: mod_base = OTHER; note = 2'-O-Methyl-uridine
  modified_base 95: mod_base = OTHER; note = 2'-O-Methyl-guanosine
  modified_base 96: mod_base = OTHER; note = 2'-O-Methyl-cytidine
  modified_base 97: mod_base = OTHER; note = 2'-O-Methyl-uridine phosphorothioate
  modified_base 98: mod_base = OTHER; note = 2'-O-Methyl-uridine phosphorothioate
  modified_base 99: mod_base = OTHER; note = 2'-O-Methyl-uridine phosphorothioate
  modified_base 100: mod_base = OTHER; note = 2'-O-Methyl-uridine
  misc_difference 101: note = modified_base - a, c, u, g, unknown or other - a, c, g, inosine, u, deoxyadenosine, deoxyguanosine, deoxycytidine, deoxyinosine, thymine, ribonebularine, 2'-O-methylnebularine, or 2'-deoxynebularine
  misc_difference 102: note = modified_base - a, c, u, g, unknown or other - a, c, g, inosine, u, deoxyadenosine, deoxyguanosine, deoxycytidine, deoxyinosine, thymine, ribonebularine, 2'-O-methylnebularine, or 2'-deoxynebularine
  misc_difference 103: note = modified_base - a, c, u, g, unknown or other - a, c, g, inosine, u, deoxyadenosine, deoxyguanosine, deoxycytidine, deoxyinosine, thymine, ribonebularine, 2'-O-methylnebularine, or 2'-deoxynebularine
cccataccttggagcaacgggttttagagctagaaatagcaagttaaaataaggctagtccgttatcaacttgaaaaagtggcaccgagtcggtgcttttnnn

SEQ ID NO: 1796 - RNA, 103 nt, synthetic construct
  source 1..103: mol_type = other RNA; note = Description of Artificial Sequence: Synthetic polynucleotide
  modified_base 1: mod_base = OTHER; note = 2'-O-Methyl-guanosine phosphorothioate
  modified_base 2: mod_base = OTHER; note = 2'-O-Methyl-adenosine phosphorothioate
  modified_base 3: mod_base = OTHER; note = 2'-O-Methyl-guanosine phosphorothioate
  modified_base 21: mod_base = OTHER; note = 2'-O-Methyl-guanosine
  modified_base 28: mod_base = OTHER; note = 2'-O-Methyl-adenosine
  modified_base 29: mod_base = OTHER; note = 2'-O-Methyl-guanosine
  modified_base 30: mod_base = OTHER; note = 2'-O-Methyl-cytidine
  modified_base 31: mod_base = OTHER; note = 2'-O-Methyl-uridine
  modified_base 32: mod_base = OTHER; note = 2'-O-Methyl-adenosine
  modified_base 34: mod_base = OTHER; note = 2'-O-Methyl-adenosine
  modified_base 35: mod_base = OTHER; note = 2'-O-Methyl-adenosine
  modified_base 36: mod_base = OTHER; note = 2'-O-Methyl-adenosine
  modified_base 37: mod_base = OTHER; note = 2'-O-Methyl-uridine
  modified_base 38: mod_base = OTHER; note = 2'-O-Methyl-adenosine
  modified_base 39: mod_base = OTHER; note = 2'-O-Methyl-guanosine
  modified_base 40: mod_base = OTHER; note = 2'-O-Methyl-cytidine
  modified_base 41: mod_base = OTHER; note = 2'-O-Methyl-adenosine
  modified_base 42: mod_base = OTHER; note = 2'-O-Methyl-adenosine
  modified_base 46: mod_base = OTHER; note = 2'-O-Methyl-adenosine
  modified_base 48: mod_base = OTHER; note = 2'-O-Methyl-adenosine
  modified_base 50: mod_base = OTHER; note = 2'-O-Methyl-uridine
  modified_base 52: mod_base = OTHER; note = 2'-O-Methyl-adenosine
  modified_base 53: mod_base = OTHER; note = 2'-O-Methyl-guanosine
  modified_base 54: mod_base = OTHER; note = 2'-O-Methyl-guanosine
  modified_base 57: mod_base = OTHER; note = 2'-O-Methyl-adenosine
  modified_base 61: mod_base = OTHER; note = 2'-O-Methyl-cytidine
  modified_base 66: mod_base = OTHER; note = 2'-O-Methyl-uridine
  modified_base 67: mod_base = OTHER; note = 2'-O-Methyl-cytidine
  modified_base 70: mod_base = OTHER; note = 2'-O-Methyl-cytidine
  modified_base 71: mod_base = OTHER; note = 2'-O-Methyl-uridine
  modified_base 72: mod_base = OTHER; note = 2'-O-Methyl-uridine
  modified_base 74: mod_base = OTHER; note = 2'-O-Methyl-adenosine
  modified_base 75: mod_base = OTHER; note = 2'-O-Methyl-adenosine
  modified_base 76: mod_base = OTHER; note = 2'-O-Methyl-adenosine
  modified_base 77: mod_base = OTHER; note = 2'-O-Methyl-adenosine
  modified_base 78: mod_base = OTHER; note = 2'-O-Methyl-adenosine
  modified_base 79: mod_base = OTHER; note = 2'-O-Methyl-guanosine
  modified_base 80: mod_base = OTHER; note = 2'-O-Methyl-uridine
  modified_base 82: mod_base = OTHER; note = 2'-O-Methyl-guanosine
  modified_base 83: mod_base = OTHER; note = 2'-O-Methyl-cytidine
  modified_base 84: mod_base = OTHER; note = 2'-O-Methyl-adenosine
  modified_base 85: mod_base = OTHER; note = 2'-O-Methyl-cytidine
  modified_base 86: mod_base = OTHER; note = 2'-O-Methyl-cytidine
  modified_base 87: mod_base = OTHER; note = 2'-O-Methyl-guanosine
  modified_base 89: mod_base = OTHER; note = 2'-O-Methyl-guanosine
  modified_base 92: mod_base = OTHER; note = 2'-O-Methyl-guanosine
  modified_base 93: mod_base = OTHER; note = 2'-O-Methyl-guanosine
  modified_base 94: mod_base = OTHER; note = 2'-O-Methyl-uridine
  modified_base 95: mod_base = OTHER; note = 2'-O-Methyl-guanosine
  modified_base 96: mod_base = OTHER; note = 2'-O-Methyl-cytidine
  modified_base 97: mod_base = OTHER; note = 2'-O-Methyl-uridine phosphorothioate
  modified_base 98: mod_base = OTHER; note = 2'-O-Methyl-uridine phosphorothioate
  modified_base 99: mod_base = OTHER; note = 2'-O-Methyl-uridine phosphorothioate
  modified_base 100: mod_base = OTHER; note = 2'-O-Methyl-uridine
  misc_difference 101: note = modified_base - a, c, u, g, unknown or other - a, c, g, inosine, u, deoxyadenosine, deoxyguanosine, deoxycytidine, deoxyinosine, thymine, ribonebularine, 2'-O-methylnebularine, or 2'-deoxynebularine
  misc_difference 102: note = modified_base - a, c, u, g, unknown or other - a, c, g, inosine, u, deoxyadenosine, deoxyguanosine, deoxycytidine, deoxyinosine, thymine, ribonebularine, 2'-O-methylnebularine, or 2'-deoxynebularine
  misc_difference 103: note = modified_base - a, c, u, g, unknown or other - a, c, g, inosine, u, deoxyadenosine, deoxyguanosine, deoxycytidine, deoxyinosine, thymine, ribonebularine, 2'-O-methylnebularine, or 2'-deoxynebularine
gagatacctgagtaactttcgttttagagctagaaatagcaagttaaaataaggctagtccgttatcaacttgaaaaagtggcaccgagtcggtgcttttnnn

SEQ ID NO: 1797 - RNA, 103 nt, synthetic construct
  source 1..103: mol_type = other RNA; note = Description of Artificial Sequence: Synthetic polynucleotide
  modified_base 1: mod_base = OTHER; note = 2'-O-Methyl-cytidine phosphorothioate
  modified_base 2: mod_base = OTHER; note = 2'-O-Methyl-adenosine phosphorothioate
  modified_base 3: mod_base = OTHER; note = 2'-O-Methyl-guanosine phosphorothioate
  modified_base 21: mod_base = OTHER; note = 2'-O-Methyl-guanosine
  modified_base 28: mod_base = OTHER; note = 2'-O-Methyl-adenosine
  modified_base 29: mod_base = OTHER; note = 2'-O-Methyl-guanosine
  modified_base 30: mod_base = OTHER; note = 2'-O-Methyl-cytidine
  modified_base 31: mod_base = OTHER; note = 2'-O-Methyl-uridine
  modified_base 32: mod_base = OTHER; note = 2'-O-Methyl-adenosine
  modified_base 34: mod_base = OTHER; note = 2'-O-Methyl-adenosine
  modified_base 35: mod_base = OTHER; note = 2'-O-Methyl-adenosine
  modified_base 36: mod_base = OTHER; note = 2'-O-Methyl-adenosine
  modified_base 37: mod_base = OTHER; note = 2'-O-Methyl-uridine
  modified_base 38: mod_base = OTHER; note = 2'-O-Methyl-adenosine
  modified_base 39: mod_base = OTHER; note = 2'-O-Methyl-guanosine
  modified_base 40: mod_base = OTHER; note = 2'-O-Methyl-cytidine
  modified_base 41: mod_base = OTHER; note = 2'-O-Methyl-adenosine
  modified_base 42: mod_base = OTHER; note = 2'-O-Methyl-adenosine
  modified_base 46: mod_base = OTHER; note = 2'-O-Methyl-adenosine
  modified_base 48: mod_base = OTHER; note = 2'-O-Methyl-adenosine
  modified_base 50: mod_base = OTHER; note = 2'-O-Methyl-uridine
  modified_base 52: mod_base = OTHER; note = 2'-O-Methyl-adenosine
  modified_base 53: mod_base = OTHER; note = 2'-O-Methyl-guanosine
  modified_base 54: mod_base = OTHER; note = 2'-O-Methyl-guanosine
  modified_base 55: mod_base = OTHER; note = 2'-O-Methyl-cytidine
  modified_base 56: mod_base = OTHER; note = 2'-O-Methyl-uridine
  modified_base 57: mod_base = OTHER; note = 2'-O-Methyl-adenosine
  modified_base 60: mod_base = OTHER; note = 2'-O-Methyl-cytidine
  modified_base 61: mod_base = OTHER; note = 2'-O-Methyl-cytidine
  modified_base 66: mod_base = OTHER; note = 2'-O-Methyl-uridine
  modified_base 67: mod_base = OTHER; note = 2'-O-Methyl-cytidine
  modified_base 70: mod_base = OTHER; note = 2'-O-Methyl-cytidine
  modified_base 71: mod_base = OTHER; note = 2'-O-Methyl-uridine
  modified_base 72: mod_base = OTHER; note = 2'-O-Methyl-uridine
  modified_base 74: mod_base = OTHER; note = 2'-O-Methyl-adenosine
  modified_base 75: mod_base = OTHER; note = 2'-O-Methyl-adenosine
  modified_base 76: mod_base = OTHER; note = 2'-O-Methyl-adenosine
  modified_base 77: mod_base = OTHER; note = 2'-O-Methyl-adenosine
  modified_base 78: mod_base = OTHER; note = 2'-O-Methyl-adenosine
  modified_base 79: mod_base = OTHER; note = 2'-O-Methyl-guanosine
  modified_base 80: mod_base = OTHER; note = 2'-O-Methyl-uridine
  modified_base 81: mod_base = OTHER; note = 2'-O-Methyl-guanosine
  modified_base 83: mod_base = OTHER; note = 2'-O-Methyl-cytidine
  modified_base 84: mod_base = OTHER; note = 2'-O-Methyl-adenosine
  modified_base 85: mod_base = OTHER; note = 2'-O-Methyl-cytidine
  modified_base 86: mod_base = OTHER; note = 2'-O-Methyl-cytidine
  modified_base 87: mod_base = OTHER; note = 2'-O-Methyl-guanosine
  modified_base 88: mod_base = OTHER; note = 2'-O-Methyl-adenosine
  modified_base 89: mod_base = OTHER; note = 2'-O-Methyl-guanosine
  modified_base 90: mod_base = OTHER; note = 2'-O-Methyl-uridine
  modified_base 91: mod_base = OTHER; note = 2'-O-Methyl-cytidine
  modified_base 92: mod_base = OTHER; note = 2'-O-Methyl-guanosine
  modified_base 93: mod_base = OTHER; note = 2'-O-Methyl-guanosine
  modified_base 94: mod_base = OTHER; note = 2'-O-Methyl-uridine
  modified_base 95: mod_base = OTHER; note = 2'-O-Methyl-guanosine
  modified_base 96: mod_base = OTHER; note = 2'-O-Methyl-cytidine
  modified_base 97: mod_base = OTHER; note = 2'-O-Methyl-uridine phosphorothioate
  modified_base 98: mod_base = OTHER; note = 2'-O-Methyl-uridine phosphorothioate
  modified_base 99: mod_base = OTHER; note = 2'-O-Methyl-uridine phosphorothioate
  modified_base 100: mod_base = OTHER; note = 2'-O-Methyl-uridine
  misc_difference 101: note = modified_base - a, c, u, g, unknown or other - a, c, g, inosine, u, deoxyadenosine, deoxyguanosine, deoxycytidine, deoxyinosine, thymine, ribonebularine, 2'-O-methylnebularine, or 2'-deoxynebularine
  misc_difference 102: note = modified_base - a, c, u, g, unknown or other - a, c, g, inosine, u, deoxyadenosine, deoxyguanosine, deoxycytidine, deoxyinosine, thymine, ribonebularine, 2'-O-methylnebularine, or 2'-deoxynebularine
  misc_difference 103: note = modified_base - a, c, u, g, unknown or other - a, c, g, inosine, u, deoxyadenosine, deoxyguanosine, deoxycytidine, deoxyinosine, thymine, ribonebularine, 2'-O-methylnebularine, or 2'-deoxynebularine
caggttccatgggatgctctgttttagagctagaaatagcaagttaaaataaggctagtccgttatcaacttgaaaaagtggcaccgagtcggtgcttttnnn

SEQ ID NO: 1798 - RNA, 103 nt, synthetic construct; identical to SEQ ID NO: 1795
  source 1..103: mol_type = other RNA; note = Description of Artificial Sequence: Synthetic polynucleotide
  modified_base 1: mod_base = OTHER; note = 2'-O-Methyl-cytidine phosphorothioate
  modified_base 2: mod_base = OTHER; note = 2'-O-Methyl-cytidine phosphorothioate
  modified_base 3: mod_base = OTHER; note = 2'-O-Methyl-cytidine phosphorothioate
  modified_base 21: mod_base = OTHER; note = 2'-O-Methyl-guanosine
  modified_base 28: mod_base = OTHER; note = 2'-O-Methyl-adenosine
  modified_base 29: mod_base = OTHER; note = 2'-O-Methyl-guanosine
  modified_base 30: mod_base = OTHER; note = 2'-O-Methyl-cytidine
  modified_base 31: mod_base = OTHER; note = 2'-O-Methyl-uridine
  modified_base 32: mod_base = OTHER; note = 2'-O-Methyl-adenosine
  modified_base 34: mod_base = OTHER; note = 2'-O-Methyl-adenosine
  modified_base 35: mod_base = OTHER; note = 2'-O-Methyl-adenosine
  modified_base 36: mod_base = OTHER; note = 2'-O-Methyl-adenosine
  modified_base 37: mod_base = OTHER; note = 2'-O-Methyl-uridine
  modified_base 38: mod_base = OTHER; note = 2'-O-Methyl-adenosine
  modified_base 39: mod_base = OTHER; note = 2'-O-Methyl-guanosine
  modified_base 40: mod_base = OTHER; note = 2'-O-Methyl-cytidine
  modified_base 41: mod_base = OTHER; note = 2'-O-Methyl-adenosine
  modified_base 42: mod_base = OTHER; note = 2'-O-Methyl-adenosine
  modified_base 46: mod_base = OTHER; note = 2'-O-Methyl-adenosine
  modified_base 48: mod_base = OTHER; note = 2'-O-Methyl-adenosine
  modified_base 50: mod_base = OTHER; note = 2'-O-Methyl-uridine
  modified_base 52: mod_base = OTHER; note = 2'-O-Methyl-adenosine
  modified_base 53: mod_base = OTHER; note = 2'-O-Methyl-guanosine
  modified_base 54: mod_base = OTHER; note = 2'-O-Methyl-guanosine
  modified_base 57: mod_base = OTHER; note = 2'-O-Methyl-adenosine
  modified_base 61: mod_base = OTHER; note = 2'-O-Methyl-cytidine
  modified_base 64: mod_base = OTHER; note = uridine phosphorothioate
  modified_base 66: mod_base = OTHER; note = 2'-O-Methyl-uridine
  modified_base 67: mod_base = OTHER; note = 2'-O-Methyl-cytidine
  modified_base 70: mod_base = OTHER; note = 2'-O-Methyl-cytidine
  modified_base 71: mod_base = OTHER; note = 2'-O-Methyl-uridine
  modified_base 72: mod_base = OTHER; note = 2'-O-Methyl-uridine
  modified_base 74: mod_base = OTHER; note = 2'-O-Methyl-adenosine
  modified_base 75: mod_base = OTHER; note = 2'-O-Methyl-adenosine
  modified_base 76: mod_base = OTHER; note = 2'-O-Methyl-adenosine
  modified_base 77: mod_base = OTHER; note = 2'-O-Methyl-adenosine
  modified_base 78: mod_base = OTHER; note = 2'-O-Methyl-adenosine
  modified_base 79: mod_base = OTHER; note = 2'-O-Methyl-guanosine
  modified_base 80: mod_base = OTHER; note = 2'-O-Methyl-uridine
  modified_base 82: mod_base = OTHER; note = 2'-O-Methyl-guanosine
  modified_base 83: mod_base = OTHER; note = 2'-O-Methyl-cytidine
  modified_base 84: mod_base = OTHER; note = 2'-O-Methyl-adenosine
  modified_base 85: mod_base = OTHER; note = 2'-O-Methyl-cytidine
  modified_base 86: mod_base = OTHER; note = 2'-O-Methyl-cytidine
  modified_base 87: mod_base = OTHER; note = 2'-O-Methyl-guanosine
  modified_base 89: mod_base = OTHER; note = 2'-O-Methyl-guanosine
  modified_base 92: mod_base = OTHER; note = 2'-O-Methyl-guanosine
  modified_base 93: mod_base = OTHER; note = 2'-O-Methyl-guanosine
  modified_base 94: mod_base = OTHER; note = 2'-O-Methyl-uridine
  modified_base 95: mod_base = OTHER; note = 2'-O-Methyl-guanosine
  modified_base 96: mod_base = OTHER; note = 2'-O-Methyl-cytidine
  modified_base 97: mod_base = OTHER; note = 2'-O-Methyl-uridine phosphorothioate
  modified_base 98: mod_base = OTHER; note = 2'-O-Methyl-uridine phosphorothioate
  modified_base 99: mod_base = OTHER; note = 2'-O-Methyl-uridine phosphorothioate
  modified_base 100: mod_base = OTHER; note = 2'-O-Methyl-uridine
  misc_difference 101: note = modified_base - a, c, u, g, unknown or other - a, c, g, inosine, u, deoxyadenosine, deoxyguanosine, deoxycytidine, deoxyinosine, thymine, ribonebularine, 2'-O-methylnebularine, or 2'-deoxynebularine
  misc_difference 102: note = modified_base - a, c, u, g, unknown or other - a, c, g, inosine, u, deoxyadenosine, deoxyguanosine, deoxycytidine, deoxyinosine, thymine, ribonebularine, 2'-O-methylnebularine, or 2'-deoxynebularine
  misc_difference 103: note = modified_base - a, c, u, g, unknown or other - a, c, g, inosine, u, deoxyadenosine, deoxyguanosine, deoxycytidine, deoxyinosine, thymine, ribonebularine, 2'-O-methylnebularine, or 2'-deoxynebularine

SEQ ID NO: 1799 - RNA, 103 nt, synthetic construct; identical to SEQ ID NO: 1796
  source 1..103: mol_type = other RNA; note = Description of Artificial Sequence: Synthetic polynucleotide
  modified_base 1: mod_base = OTHER; note = 2'-O-Methyl-guanosine phosphorothioate
  modified_base 2: mod_base = OTHER; note = 2'-O-Methyl-adenosine phosphorothioate
  modified_base 3: mod_base = OTHER; note = 2'-O-Methyl-guanosine phosphorothioate
  modified_base 21: mod_base = OTHER; note = 2'-O-Methyl-guanosine
  modified_base 28: mod_base = OTHER; note = 2'-O-Methyl-adenosine
  modified_base 29: mod_base = OTHER; note = 2'-O-Methyl-guanosine
  modified_base 30: mod_base = OTHER; note = 2'-O-Methyl-cytidine
  modified_base 31: mod_base = OTHER; note = 2'-O-Methyl-uridine
  modified_base 32: mod_base = OTHER; note = 2'-O-Methyl-adenosine
  modified_base 34: mod_base = OTHER; note = 2'-O-Methyl-adenosine
  modified_base 35: mod_base = OTHER; note = 2'-O-Methyl-adenosine
  modified_base 36: mod_base = OTHER; note = 2'-O-Methyl-adenosine
  modified_base 37: mod_base = OTHER; note = 2'-O-Methyl-uridine
  modified_base 38: mod_base = OTHER; note = 2'-O-Methyl-adenosine
  modified_base 39: mod_base = OTHER; note = 2'-O-Methyl-guanosine
  modified_base 40: mod_base = OTHER; note = 2'-O-Methyl-cytidine
  modified_base 41: mod_base = OTHER; note = 2'-O-Methyl-adenosine
  modified_base 42: mod_base = OTHER; note = 2'-O-Methyl-adenosine
  modified_base 46: mod_base = OTHER; note = 2'-O-Methyl-adenosine
  modified_base 48: mod_base = OTHER; note = 2'-O-Methyl-adenosine
  modified_base 50: mod_base = OTHER; note = 2'-O-Methyl-uridine
  modified_base 52: mod_base = OTHER; note = 2'-O-Methyl-adenosine
  modified_base 53: mod_base = OTHER; note = 2'-O-Methyl-guanosine
  modified_base 54: mod_base = OTHER; note = 2'-O-Methyl-guanosine
  modified_base 57: mod_base = OTHER; note = 2'-O-Methyl-adenosine
  modified_base 61: mod_base = OTHER; note = 2'-O-Methyl-cytidine
  modified_base 64: mod_base = OTHER; note = uridine phosphorothioate
  modified_base 66: mod_base = OTHER; note = 2'-O-Methyl-uridine
  modified_base 67: mod_base = OTHER; note = 2'-O-Methyl-cytidine
  modified_base 70: mod_base = OTHER; note = 2'-O-Methyl-cytidine
  modified_base 71: mod_base = OTHER; note = 2'-O-Methyl-uridine
  modified_base 72: mod_base = OTHER; note = 2'-O-Methyl-uridine
  modified_base 74: mod_base = OTHER; note = 2'-O-Methyl-adenosine
  modified_base 75: mod_base = OTHER; note = 2'-O-Methyl-adenosine
  modified_base 76: mod_base = OTHER; note = 2'-O-Methyl-adenosine
  modified_base 77: mod_base = OTHER; note = 2'-O-Methyl-adenosine
  modified_base 78: mod_base = OTHER; note = 2'-O-Methyl-adenosine
  modified_base 79: mod_base = OTHER; note = 2'-O-Methyl-guanosine
  modified_base 80: mod_base = OTHER; note = 2'-O-Methyl-uridine
  modified_base 82: mod_base = OTHER; note = 2'-O-Methyl-guanosine
  modified_base 83: mod_base = OTHER; note = 2'-O-Methyl-cytidine
  modified_base 84: mod_base = OTHER; note = 2'-O-Methyl-adenosine
  modified_base 85: mod_base = OTHER; note = 2'-O-Methyl-cytidine
  modified_base 86: mod_base = OTHER; note = 2'-O-Methyl-cytidine
  modified_base 87: mod_base = OTHER; note = 2'-O-Methyl-guanosine
  modified_base 89: mod_base = OTHER; note = 2'-O-Methyl-guanosine
  modified_base 92: mod_base = OTHER; note = 2'-O-Methyl-guanosine
  modified_base 93: mod_base = OTHER; note = 2'-O-Methyl-guanosine
  modified_base 94: mod_base = OTHER; note = 2'-O-Methyl-uridine
  modified_base 95: mod_base = OTHER; note = 2'-O-Methyl-guanosine
  modified_base 96: mod_base = OTHER; note = 2'-O-Methyl-cytidine
  modified_base 97: mod_base = OTHER; note = 2'-O-Methyl-uridine phosphorothioate
  modified_base 98: mod_base = OTHER; note = 2'-O-Methyl-uridine phosphorothioate
  modified_base 99: mod_base = OTHER; note = 2'-O-Methyl-uridine phosphorothioate
  modified_base 100: mod_base = OTHER; note = 2'-O-Methyl-uridine
  misc_difference 101: note = modified_base - a, c, u, g, unknown or other - a, c, g, inosine, u, deoxyadenosine, deoxyguanosine, deoxycytidine, deoxyinosine, thymine, ribonebularine, 2'-O-methylnebularine, or 2'-deoxynebularine
  misc_difference 102: note = modified_base - a, c, u, g, unknown or other - a, c, g, inosine, u, deoxyadenosine, deoxyguanosine, deoxycytidine, deoxyinosine, thymine, ribonebularine, 2'-O-methylnebularine, or 2'-deoxynebularine
  misc_difference 103: note = modified_base - a, c, u, g, unknown or other - a, c, g, inosine, u, deoxyadenosine, deoxyguanosine, deoxycytidine, deoxyinosine, thymine, ribonebularine, 2'-O-methylnebularine, or 2'-deoxynebularine

SEQ ID NO: 1800 - RNA, 103 nt, synthetic construct; identical to SEQ ID NO: 1797
  source 1..103: mol_type = other RNA; note = Description of Artificial Sequence: Synthetic polynucleotide
  modified_base 1: mod_base = OTHER; note = 2'-O-Methyl-cytidine phosphorothioate
  modified_base 2: mod_base = OTHER; note = 2'-O-Methyl-adenosine phosphorothioate
  modified_base 3: mod_base = OTHER; note = 2'-O-Methyl-guanosine phosphorothioate
  modified_base 21: mod_base = OTHER; note = 2'-O-Methyl-guanosine
  modified_base 28: mod_base = OTHER; note = 2'-O-Methyl-adenosine
  modified_base 29: mod_base = OTHER; note = 2'-O-Methyl-guanosine
  modified_base 30: mod_base = OTHER; note = 2'-O-Methyl-cytidine
  modified_base 31: mod_base = OTHER; note = 2'-O-Methyl-uridine
  modified_base 32: mod_base = OTHER; note = 2'-O-Methyl-adenosine
  modified_base 34: mod_base = OTHER; note = 2'-O-Methyl-adenosine
  modified_base 35: mod_base = OTHER; note = 2'-O-Methyl-adenosine
  modified_base 36: mod_base = OTHER; note = 2'-O-Methyl-adenosine
  modified_base 37: mod_base = OTHER; note = 2'-O-Methyl-uridine
  modified_base 38: mod_base = OTHER; note = 2'-O-Methyl-adenosine
  modified_base 39: mod_base = OTHER; note = 2'-O-Methyl-guanosine
  modified_base 40: mod_base = OTHER; note = 2'-O-Methyl-cytidine
  modified_base 41: mod_base = OTHER; note = 2'-O-Methyl-adenosine
  modified_base 42: mod_base = OTHER; note = 2'-O-Methyl-adenosine
  modified_base 46: mod_base = OTHER; note = 2'-O-Methyl-adenosine
  modified_base 48: mod_base = OTHER; note = 2'-O-Methyl-adenosine
  modified_base 50: mod_base = OTHER; note = 2'-O-Methyl-uridine
  modified_base 52: mod_base = OTHER; note = 2'-O-Methyl-adenosine
  modified_base 53: mod_base = OTHER; note = 2'-O-Methyl-guanosine
  modified_base 54: mod_base = OTHER; note = 2'-O-Methyl-guanosine
  modified_base 55: mod_base = OTHER; note = 2'-O-Methyl-cytidine
  modified_base 56: mod_base = OTHER; note = 2'-O-Methyl-uridine
  modified_base 57: mod_base = OTHER; note = 2'-O-Methyl-adenosine
  modified_base 60: mod_base = OTHER; note = 2'-O-Methyl-cytidine
  modified_base 61: mod_base = OTHER; note = 2'-O-Methyl-cytidine
  modified_base 64: mod_base = OTHER; note = uridine phosphorothioate
  modified_base 66: mod_base = OTHER; note = 2'-O-Methyl-uridine
  modified_base 67: mod_base = OTHER; note = 2'-O-Methyl-cytidine
  modified_base 70: mod_base = OTHER; note = 2'-O-Methyl-cytidine
  modified_base 71: mod_base = OTHER; note = 2'-O-Methyl-uridine
  modified_base 72: mod_base = OTHER; note = 2'-O-Methyl-uridine
  modified_base 74: mod_base = OTHER; note = 2'-O-Methyl-adenosine
  modified_base 75: mod_base = OTHER; note = 2'-O-Methyl-adenosine
  modified_base 76: mod_base = OTHER; note = 2'-O-Methyl-adenosine
  modified_base 77: mod_base = OTHER; note = 2'-O-Methyl-adenosine
  modified_base 78: mod_base = OTHER; note = 2'-O-Methyl-adenosine
  modified_base 79: mod_base = OTHER; note = 2'-O-Methyl-guanosine
  modified_base 80: mod_base = OTHER; note = 2'-O-Methyl-uridine
  modified_base 81: mod_base = OTHER; note = 2'-O-Methyl-guanosine
  modified_base 83: mod_base = OTHER; note = 2'-O-Methyl-cytidine
  modified_base 84: mod_base = OTHER; note = 2'-O-Methyl-adenosine
  modified_base 85: mod_base = OTHER; note = 2'-O-Methyl-cytidine
  modified_base 86: mod_base = OTHER; note = 2'-O-Methyl-cytidine
  modified_base 87: mod_base = OTHER; note = 2'-O-Methyl-guanosine
  modified_base 88: mod_base = OTHER; note = 2'-O-Methyl-adenosine
  modified_base 89: mod_base = OTHER; note = 2'-O-Methyl-guanosine
  modified_base 90: mod_base = OTHER; note = 2'-O-Methyl-uridine
  modified_base 91: mod_base = OTHER; note = 2'-O-Methyl-cytidine
  modified_base 92: mod_base = OTHER; note = 2'-O-Methyl-guanosine
  modified_base 93: mod_base = OTHER; note = 2'-O-Methyl-guanosine
  modified_base 94: mod_base = OTHER; note = 2'-O-Methyl-uridine
  modified_base 95: mod_base = OTHER; note = 2'-O-Methyl-guanosine
  modified_base 96: mod_base = OTHER; note = 2'-O-Methyl-cytidine
  modified_base 97: mod_base = OTHER; note = 2'-O-Methyl-uridine phosphorothioate
  modified_base 98: mod_base = OTHER; note = 2'-O-Methyl-uridine phosphorothioate
  modified_base 99: mod_base = OTHER; note = 2'-O-Methyl-uridine phosphorothioate
  modified_base 100: mod_base = OTHER; note = 2'-O-Methyl-uridine
  misc_difference 101: note = modified_base - a, c, u, g, unknown or other - a, c, g, inosine, u, deoxyadenosine, deoxyguanosine, deoxycytidine, deoxyinosine, thymine, ribonebularine, 2'-O-methylnebularine, or 2'-deoxynebularine
  misc_difference 102: note = modified_base - a, c, u, g, unknown or other - a, c, g, inosine, u, deoxyadenosine, deoxyguanosine, deoxycytidine, deoxyinosine, thymine, ribonebularine, 2'-O-methylnebularine, or 2'-deoxynebularine
  misc_difference 103: note = modified_base - a, c, u, g, unknown or other - a, c, g, inosine, u, deoxyadenosine, deoxyguanosine, deoxycytidine, deoxyinosine, thymine, ribonebularine, 2'-O-methylnebularine, or 2'-deoxynebularine

SEQ ID NO: 1801 - RNA, 103 nt, synthetic construct; identical to SEQ ID NO: 1797
  source 1..103: mol_type = other RNA; note = Description of Artificial Sequence: Synthetic polynucleotide
  modified_base 1: mod_base = OTHER; note = 2'-O-Methyl-cytidine
  modified_base 2: mod_base = OTHER; note = 2'-O-Methyl-adenosine
  modified_base 3: mod_base = OTHER; note = 2'-O-Methyl-guanosine
  modified_base 4: mod_base = OTHER; note = 2'-O-Methyl-guanosine
  modified_base 5: mod_base = OTHER; note = 2'-O-Methyl-uridine
  modified_base 6: mod_base = OTHER; note = 2'-O-Methyl-uridine
  modified_base 7: mod_base = OTHER; note = 2'-O-Methyl-cytidine
  modified_base 8: mod_base = OTHER; note = 2'-O-Methyl-cytidine
  modified_base 9: mod_base = OTHER; note = 2'-O-Methyl-adenosine
  modified_base 10: mod_base = OTHER; note = 2'-O-Methyl-uridine
  modified_base 11: mod_base = OTHER; note = 2'-O-Methyl-guanosine
  modified_base 12: mod_base = OTHER; note = 2'-O-Methyl-guanosine
  modified_base 13: mod_base = OTHER; note = 2'-O-Methyl-guanosine
  modified_base 14: mod_base = OTHER; note = 2'-O-Methyl-adenosine
  modified_base 15: mod_base = OTHER; note = 2'-O-Methyl-uridine
  modified_base 16: mod_base = OTHER; note = 2'-O-Methyl-guanosine
  modified_base 17: mod_base = OTHER; note = 2'-O-Methyl-cytidine
  modified_base 18: mod_base = OTHER; note = 2'-O-Methyl-uridine
  modified_base 19: mod_base = OTHER; note = 2'-O-Methyl-cytidine
  modified_base 20: mod_base = OTHER; note = 2'-O-Methyl-uridine
  modified_base 21: mod_base = OTHER; note = 2'-O-Methyl-guanosine
  modified_base 22: mod_base = OTHER; note = 2'-O-Methyl-uridine
  modified_base 23: mod_base = OTHER; note = 2'-O-Methyl-uridine
  modified_base 24: mod_base = OTHER; note = 2'-O-Methyl-uridine
  modified_base 25: mod_base = OTHER; note = 2'-O-Methyl-uridine
  modified_base 26: mod_base = OTHER; note = 2'-O-Methyl-adenosine
  modified_base 27: mod_base = OTHER; note = 2'-O-Methyl-guanosine
  modified_base 28: mod_base = OTHER; note = 2'-O-Methyl-adenosine
  modified_base 29: mod_base = OTHER; note = 2'-O-Methyl-guanosine
  modified_base 30: mod_base = OTHER; note = 2'-O-Methyl-cytidine
  modified_base 31: mod_base = OTHER; note = 2'-O-Methyl-uridine
  modified_base 32: mod_base = OTHER; note = 2'-O-Methyl-adenosine
  modified_base 33: mod_base = OTHER; note = 2'-O-Methyl-guanosine
  modified_base 34: mod_base = OTHER; note = 2'-O-Methyl-adenosine
  modified_base 35: mod_base = OTHER; note = 2'-O-Methyl-adenosine
  modified_base 36: mod_base = OTHER; note = 2'-O-Methyl-adenosine
  modified_base 37: mod_base = OTHER; note = 2'-O-Methyl-uridine
  modified_base 38: mod_base = OTHER; note = 2'-O-Methyl-adenosine
  modified_base 39: mod_base = OTHER; note = 2'-O-Methyl-guanosine
  modified_base 40: mod_base = OTHER; note = 2'-O-Methyl-cytidine
  modified_base 41: mod_base = OTHER; note = 2'-O-Methyl-adenosine
  modified_base 42: mod_base = OTHER; note = 2'-O-Methyl-adenosine
  modified_base 43: mod_base = OTHER; note = 2'-O-Methyl-guanosine
  modified_base 44: mod_base = OTHER; note = 2'-O-Methyl-uridine
  modified_base 45: mod_base = OTHER; note = 2'-O-Methyl-uridine
  modified_base 46: mod_base = OTHER; note = 2'-O-Methyl-adenosine
  modified_base 47: mod_base = OTHER; note = 2'-O-Methyl-adenosine
  modified_base 48: mod_base = OTHER; note = 2'-O-Methyl-adenosine
  modified_base 49: mod_base = OTHER; note = 2'-O-Methyl-adenosine
  modified_base 50: mod_base = OTHER; note = 2'-O-Methyl-uridine
  modified_base 51: mod_base = OTHER; note = 2'-O-Methyl-adenosine
  modified_base 52: mod_base = OTHER; note = 2'-O-Methyl-adenosine
  modified_base 53: mod_base = OTHER; note = 2'-O-Methyl-guanosine
  modified_base 54: mod_base = OTHER; note = 2'-O-Methyl-guanosine
  modified_base 55: mod_base = OTHER; note = 2'-O-Methyl-cytidine
  modified_base 56: mod_base = OTHER; note = 2'-O-Methyl-uridine
  modified_base 57: mod_base = OTHER; note = 2'-O-Methyl-adenosine
  modified_base 58: mod_base = OTHER; note = 2'-O-Methyl-guanosine
  modified_base 59: mod_base = OTHER; note = 2'-O-Methyl-uridine
  modified_base 60: mod_base = OTHER; note = 2'-O-Methyl-cytidine
  modified_base 61: mod_base = OTHER; note = 2'-O-Methyl-cytidine
  modified_base 62: mod_base = OTHER; note = 2'-O-Methyl-guanosine
  modified_base 63: mod_base = OTHER; note = 2'-O-Methyl-uridine
  modified_base 64: mod_base = OTHER; note = 2'-O-Methyl-uridine
  modified_base 65: mod_base = OTHER; note = 2'-O-Methyl-adenosine
  modified_base 66: mod_base = OTHER; note = 2'-O-Methyl-uridine
  modified_base 67: mod_base = OTHER; note = 2'-O-Methyl-cytidine
  modified_base 68: mod_base = OTHER; note = 2'-O-Methyl-adenosine
  modified_base 69: mod_base = OTHER; note = 2'-O-Methyl-adenosine
  modified_base 70: mod_base = OTHER; note = 2'-O-Methyl-cytidine
  modified_base 71: mod_base = OTHER; note = 2'-O-Methyl-uridine
  modified_base 72: mod_base = OTHER; note = 2'-O-Methyl-uridine
  modified_base 73: mod_base = OTHER; note = 2'-O-Methyl-guanosine
  modified_base 74: mod_base = OTHER; note = 2'-O-Methyl-adenosine
  modified_base 75: mod_base = OTHER; note = 2'-O-Methyl-adenosine
  modified_base 76: mod_base = OTHER; note = 2'-O-Methyl-adenosine
  modified_base 77: mod_base = OTHER; note = 2'-O-Methyl-adenosine
  modified_base 78: mod_base = OTHER; note = 2'-O-Methyl-adenosine
  modified_base 79: mod_base = OTHER; note = 2'-O-Methyl-guanosine
  modified_base 80: mod_base = OTHER; note = 2'-O-Methyl-uridine
  modified_base 81: mod_base = OTHER; note = 2'-O-Methyl-guanosine
  modified_base 82: mod_base = OTHER; note = 2'-O-Methyl-guanosine
  modified_base 83: mod_base = OTHER; note = 2'-O-Methyl-cytidine
  modified_base 84: mod_base = OTHER; note = 2'-O-Methyl-adenosine
  modified_base 85: mod_base = OTHER; note = 2'-O-Methyl-cytidine
  modified_base 86: mod_base = OTHER; note = 2'-O-Methyl-cytidine
  modified_base 87: mod_base = OTHER; note = 2'-O-Methyl-guanosine
  modified_base 88: mod_base = OTHER; note = 2'-O-Methyl-adenosine
  modified_base 89: mod_base = OTHER; note = 2'-O-Methyl-guanosine
  modified_base 90: mod_base = OTHER; note = 2'-O-Methyl-uridine
  modified_base 91: mod_base = OTHER; note = 2'-O-Methyl-cytidine
  modified_base 92: mod_base = OTHER; note = 2'-O-Methyl-guanosine
  modified_base 93: mod_base = OTHER; note = 2'-O-Methyl-guanosine
  modified_base 94: mod_base = OTHER; note = 2'-O-Methyl-uridine
  modified_base 95: mod_base = OTHER; note = 2'-O-Methyl-guanosine
  modified_base 96: mod_base = OTHER; note = 2'-O-Methyl-cytidine
  modified_base 97: mod_base = OTHER; note = 2'-O-Methyl-uridine
  modified_base 98: mod_base = OTHER; note = 2'-O-Methyl-uridine
  modified_base 99: mod_base = OTHER; note = 2'-O-Methyl-uridine
  modified_base 100: mod_base = OTHER; note = 2'-O-Methyl-uridine
  misc_difference 101: note = modified_base - a, c, u, g, unknown or other - 2'-O-Methyl-adenosine, 2'-O-Methyl-cytidine, 2'-O-Methyl-guanosine, 2'-O-Methyl-inosine, 2'-O-Methyl-uridine, deoxyadenosine, deoxyguanosine, deoxycytidine, thymine, 2'-O-methylnebularine, or 2'-deoxynebularine
  misc_difference 102: note = modified_base - a, c, u, g, unknown or other - 2'-O-Methyl-adenosine, 2'-O-Methyl-cytidine, 2'-O-Methyl-guanosine, 2'-O-Methyl-inosine, 2'-O-Methyl-uridine, deoxyadenosine, deoxyguanosine, deoxycytidine, thymine, 2'-O-methylnebularine, or 2'-deoxynebularine
  misc_difference 103: note = modified_base - a, c, u, g, unknown or other - 2'-O-Methyl-adenosine, 2'-O-Methyl-cytidine, 2'-O-Methyl-guanosine, 2'-O-Methyl-inosine, 2'-O-Methyl-uridine, deoxyadenosine, deoxyguanosine, deoxycytidine, thymine, 2'-O-methylnebularine, or 2'-deoxynebularine

SEQ ID NO: 1802 - RNA, 103 nt, synthetic construct; identical to SEQ ID NO: 1795
  source 1..103: mol_type = other RNA; note = Description of Artificial Sequence: Synthetic polynucleotide
  modified_base 1: mod_base = OTHER; note = 2'-O-Methyl-cytidine phosphorothioate
  modified_base 2: mod_base = OTHER; note = 2'-O-Methyl-cytidine phosphorothioate
  modified_base 3: mod_base = OTHER; note = 2'-O-Methyl-cytidine phosphorothioate
  modified_base 21: mod_base = OTHER; note = 2'-O-Methyl-guanosine
  modified_base 28: mod_base = OTHER; note = 2'-O-Methyl-adenosine
  modified_base 29: mod_base = OTHER; note = 2'-O-Methyl-guanosine
  modified_base 30: mod_base = OTHER; note = 2'-O-Methyl-cytidine
  modified_base 31: mod_base = OTHER; note = 2'-O-Methyl-uridine
  modified_base 32: mod_base = OTHER; note = 2'-O-Methyl-adenosine
  modified_base 34: mod_base = OTHER; note = 2'-O-Methyl-adenosine
  modified_base 35: mod_base = OTHER; note = 2'-O-Methyl-adenosine
  modified_base 36: mod_base = OTHER; note = 2'-O-Methyl-adenosine
  modified_base 37: mod_base = OTHER; note = 2'-O-Methyl-uridine
  modified_base 38: mod_base = OTHER; note = 2'-O-Methyl-adenosine
  modified_base 39: mod_base = OTHER; note = 2'-O-Methyl-guanosine
  modified_base 40: mod_base = OTHER; note = 2'-O-Methyl-cytidine
  modified_base 41: mod_base = OTHER; note = 2'-O-Methyl-adenosine
  modified_base 42: mod_base = OTHER; note = 2'-O-Methyl-adenosine
  modified_base 45: mod_base = OTHER; note = uridine phosphorothioate
  modified_base 46: mod_base = OTHER; note = 2'-O-Methyl-adenosine
  modified_base 48: mod_base = OTHER; note = 2'-O-Methyl-adenosine
  modified_base 50: mod_base = OTHER; note = 2'-O-Methyl-uridine
  modified_base 52: mod_base = OTHER; note = 2'-O-Methyl-adenosine
  modified_base 53: mod_base = OTHER; note = 2'-O-Methyl-guanosine
  modified_base 54: mod_base = OTHER; note = 2'-O-Methyl-guanosine
  modified_base 57: mod_base = OTHER; note = 2'-O-Methyl-adenosine
  modified_base 61: mod_base = OTHER; note = 2'-O-Methyl-cytidine
  modified_base 66: mod_base = OTHER; note = 2'-O-Methyl-uridine
  modified_base 67: mod_base = OTHER; note = 2'-O-Methyl-cytidine
  modified_base 70: mod_base = OTHER; note = 2'-O-Methyl-cytidine
  modified_base 71: mod_base = OTHER; note = 2'-O-Methyl-uridine
  modified_base 72: mod_base = OTHER; note = 2'-O-Methyl-uridine
  modified_base 74: mod_base = OTHER; note = 2'-O-Methyl-adenosine
  modified_base 75: mod_base = OTHER; note = 2'-O-Methyl-adenosine
  modified_base 76: mod_base = OTHER; note = 2'-O-Methyl-adenosine
  modified_base 77: mod_base = OTHER; note = 2'-O-Methyl-adenosine
  modified_base 78: mod_base = OTHER; note = 2'-O-Methyl-adenosine
  modified_base 79: mod_base = OTHER; note = 2'-O-Methyl-guanosine
  modified_base 80: mod_base = OTHER; note = 2'-O-Methyl-uridine
  modified_base 82: mod_base = OTHER; note = 2'-O-Methyl-guanosine
  modified_base 83: mod_base = OTHER; note = 2'-O-Methyl-cytidine
  modified_base 84: mod_base = OTHER; note = 2'-O-Methyl-adenosine
  modified_base 85: mod_base = OTHER; note = 2'-O-Methyl-cytidine
  modified_base 86: mod_base = OTHER; note = 2'-O-Methyl-cytidine
  modified_base 87: mod_base = OTHER; note = 2'-O-Methyl-guanosine
  modified_base 89: mod_base = OTHER; note = 2'-O-Methyl-guanosine
  modified_base 92: mod_base = OTHER; note = 2'-O-Methyl-guanosine
  modified_base 93: mod_base = OTHER; note = 2'-O-Methyl-guanosine
  modified_base 94: mod_base = OTHER; note = 2'-O-Methyl-uridine
  modified_base 95: mod_base = OTHER; note = 2'-O-Methyl-guanosine
  modified_base 96: mod_base = OTHER; note = 2'-O-Methyl-cytidine
  modified_base 97: mod_base = OTHER; note = 2'-O-Methyl-uridine phosphorothioate
  modified_base 98: mod_base = OTHER; note = 2'-O-Methyl-uridine phosphorothioate
  modified_base 99: mod_base = OTHER; note = 2'-O-Methyl-uridine phosphorothioate
  modified_base 100: mod_base = OTHER; note = 2'-O-Methyl-uridine
  misc_difference 101: note = modified_base - a, c, u, g, unknown or other - a, c, g, inosine, u, deoxyadenosine, deoxyguanosine, deoxycytidine, deoxyinosine, thymine, ribonebularine, 2'-O-methylnebularine, or 2'-deoxynebularine
  misc_difference 102: note = modified_base - a, c, u, g, unknown or other - a, c, g, inosine, u, deoxyadenosine, deoxyguanosine, deoxycytidine, deoxyinosine, thymine, ribonebularine, 2'-O-methylnebularine, or 2'-deoxynebularine
  misc_difference 103: note = modified_base - a, c, u, g, unknown or other - a, c, g, inosine, u, deoxyadenosine, deoxyguanosine, deoxycytidine, deoxyinosine, thymine, ribonebularine, 2'-O-methylnebularine, or 2'-deoxynebularine

SEQ ID NO: 1803 - RNA, 103 nt, synthetic construct; identical to SEQ ID NO: 1796
  source 1..103: mol_type = other RNA; note = Description of Artificial Sequence: Synthetic polynucleotide
  modified_base 1: mod_base = OTHER; note = 2'-O-Methyl-guanosine phosphorothioate
  modified_base 2: mod_base = OTHER; note = 2'-O-Methyl-adenosine phosphorothioate
  modified_base 3: mod_base = OTHER; note = 2'-O-Methyl-guanosine phosphorothioate
  modified_base 21: mod_base = OTHER; note = 2'-O-Methyl-guanosine
  modified_base 28: mod_base = OTHER; note = 2'-O-Methyl-adenosine
  modified_base 29: mod_base = OTHER; note = 2'-O-Methyl-guanosine
  modified_base 30: mod_base = OTHER; note = 2'-O-Methyl-cytidine
  modified_base 31: mod_base = OTHER; note = 2'-O-Methyl-uridine
  modified_base 32: mod_base = OTHER; note = 2'-O-Methyl-adenosine
  modified_base 34: mod_base = OTHER; note = 2'-O-Methyl-adenosine
  modified_base 35: mod_base = OTHER; note = 2'-O-Methyl-adenosine
  modified_base 36: mod_base = OTHER; note = 2'-O-Methyl-adenosine
  modified_base 37: mod_base = OTHER; note = 2'-O-Methyl-uridine
  modified_base 38: mod_base = OTHER; note = 2'-O-Methyl-adenosine
  modified_base 39: mod_base = OTHER; note = 2'-O-Methyl-guanosine
  modified_base 40: mod_base = OTHER; note = 2'-O-Methyl-cytidine
  modified_base 41: mod_base = OTHER; note = 2'-O-Methyl-adenosine
  modified_base 42: mod_base = OTHER; note = 2'-O-Methyl-adenosine
  modified_base 45: mod_base = OTHER; note = uridine phosphorothioate
  modified_base 46: mod_base = OTHER; note = 2'-O-Methyl-adenosine
  modified_base 48: mod_base = OTHER; note = 2'-O-Methyl-adenosine
  modified_base 50: mod_base = OTHER; note = 2'-O-Methyl-uridine
  modified_base 52: mod_base = OTHER; note = 2'-O-Methyl-adenosine
  modified_base 53: mod_base = OTHER; note = 2'-O-Methyl-guanosine
  modified_base 54: mod_base = OTHER; note = 2'-O-Methyl-guanosine
  modified_base 57: mod_base = OTHER; note = 2'-O-Methyl-adenosine
  modified_base 61: mod_base = OTHER; note = 2'-O-Methyl-cytidine
  modified_base 66: mod_base = OTHER; note = 2'-O-Methyl-uridine
  modified_base 67: mod_base = OTHER; note = 2'-O-Methyl-cytidine
  modified_base 70: mod_base = OTHER; note = 2'-O-Methyl-cytidine
  modified_base 71: mod_base = OTHER; note = 2'-O-Methyl-uridine
  modified_base 72: mod_base = OTHER; note = 2'-O-Methyl-uridine
  modified_base 74: mod_base = OTHER; note = 2'-O-Methyl-adenosine
  modified_base 75: mod_base = OTHER; note = 2'-O-Methyl-adenosine
  modified_base 76: mod_base = OTHER; note = 2'-O-Methyl-adenosine
  modified_base 77: mod_base = OTHER; note = 2'-O-Methyl-adenosine
  modified_base 78: mod_base = OTHER; note = 2'-O-Methyl-adenosine
  modified_base 79: mod_base = OTHER; note = 2'-O-Methyl-guanosine
  modified_base 80: mod_base = OTHER; note = 2'-O-Methyl-uridine
  modified_base 82: mod_base = OTHER; note = 2'-O-Methyl-guanosine
  modified_base 83: mod_base = OTHER; note = 2'-O-Methyl-cytidine
  modified_base 84: mod_base = OTHER; note = 2'-O-Methyl-adenosine
  modified_base 85: mod_base = OTHER; note = 2'-O-Methyl-cytidine
  modified_base 86: mod_base = OTHER; note = 2'-O-Methyl-cytidine
  modified_base 87: mod_base = OTHER; note = 2'-O-Methyl-guanosine
  modified_base 89: mod_base = OTHER; note = 2'-O-Methyl-guanosine
  modified_base 92: mod_base = OTHER; note = 2'-O-Methyl-guanosine
  modified_base 93: mod_base = OTHER; note = 2'-O-Methyl-guanosine
  modified_base 94: mod_base = OTHER; note = 2'-O-Methyl-uridine
  modified_base 95: mod_base = OTHER; note = 2'-O-Methyl-guanosine
  modified_base 96: mod_base = OTHER; note = 2'-O-Methyl-cytidine
  modified_base 97: mod_base = OTHER; note = 2'-O-Methyl-uridine phosphorothioate
  modified_base 98: mod_base = OTHER; note = 2'-O-Methyl-uridine phosphorothioate
  modified_base 99: mod_base = OTHER; note = 2'-O-Methyl-uridine phosphorothioate
  modified_base 100: mod_base = OTHER; note = 2'-O-Methyl-uridine
  misc_difference 101: note = modified_base - a, c, u, g, unknown or other - a, c, g, inosine, u, deoxyadenosine, deoxyguanosine, deoxycytidine, deoxyinosine, thymine, ribonebularine, 2'-O-methylnebularine, or 2'-deoxynebularine
  misc_difference 102: note = modified_base - a, c, u, g, unknown or other - a, c, g, inosine, u, deoxyadenosine, deoxyguanosine, deoxycytidine, deoxyinosine, thymine, ribonebularine, 2'-O-methylnebularine, or 2'-deoxynebularine
  misc_difference 103: note = modified_base - a, c, u, g, unknown or other - a, c, g, inosine, u, deoxyadenosine, deoxyguanosine, deoxycytidine, deoxyinosine, thymine, ribonebularine, 2'-O-methylnebularine, or 2'-deoxynebularine

SEQ ID NO: 1804 - RNA, 103 nt, synthetic construct; identical to SEQ ID NO: 1797
  source 1..103: mol_type = other RNA; note = Description of Artificial Sequence: Synthetic polynucleotide
  modified_base 1: mod_base = OTHER; note = 2'-O-Methyl-cytidine phosphorothioate
  modified_base 2: mod_base = OTHER; note = 2'-O-Methyl-adenosine phosphorothioate
  modified_base 3: mod_base = OTHER; note = 2'-O-Methyl-guanosine phosphorothioate
  modified_base 21: mod_base = OTHER; note = 2'-O-Methyl-guanosine
  modified_base 28: mod_base = OTHER; note = 2'-O-Methyl-adenosine
  modified_base 29: mod_base = OTHER; note = 2'-O-Methyl-guanosine
  modified_base 30: mod_base = OTHER; note = 2'-O-Methyl-cytidine
  modified_base 31: mod_base = OTHER; note = 2'-O-Methyl-uridine
  modified_base 32: mod_base = OTHER; note = 2'-O-Methyl-adenosine
  modified_base 34: mod_base = OTHER; note = 2'-O-Methyl-adenosine
  modified_base 35: mod_base = OTHER; note = 2'-O-Methyl-adenosine
  modified_base 36: mod_base = OTHER; note = 2'-O-Methyl-adenosine
  modified_base 37: mod_base = OTHER; note = 2'-O-Methyl-uridine
  modified_base 38: mod_base = OTHER; note = 2'-O-Methyl-adenosine
  modified_base 39: mod_base = OTHER; note = 2'-O-Methyl-guanosine
  modified_base 40: mod_base = OTHER; note = 2'-O-Methyl-cytidine
  modified_base 41: mod_base = OTHER; note = 2'-O-Methyl-adenosine
  modified_base 42: mod_base = OTHER; note = 2'-O-Methyl-adenosine
  modified_base 45: mod_base = OTHER; note = uridine phosphorothioate
  modified_base 46: mod_base = OTHER; note = 2'-O-Methyl-adenosine
  modified_base 48: mod_base = OTHER; note = 2'-O-Methyl-adenosine
  modified_base 50: mod_base = OTHER; note = 2'-O-Methyl-uridine
  modified_base 52: mod_base = OTHER; note = 2'-O-Methyl-adenosine
  modified_base 53: mod_base = OTHER; note = 2'-O-Methyl-guanosine
  modified_base 54: mod_base = OTHER; note = 2'-O-Methyl-guanosine
  modified_base 55: mod_base = OTHER; note = 2'-O-Methyl-cytidine
  modified_base 56: mod_base = OTHER; note = 2'-O-Methyl-uridine
  modified_base 57: mod_base = OTHER; note = 2'-O-Methyl-adenosine
  modified_base 60: mod_base = OTHER; note = 2'-O-Methyl-cytidine
  modified_base 61: mod_base = OTHER; note = 2'-O-Methyl-cytidine
  modified_base 66: mod_base = OTHER; note = 2'-O-Methyl-uridine
  modified_base 67: mod_base = OTHER; note = 2'-O-Methyl-cytidine
  modified_base 70: mod_base = OTHER; note = 2'-O-Methyl-cytidine
  modified_base 71: mod_base = OTHER; note = 2'-O-Methyl-uridine
  modified_base 72: mod_base = OTHER; note = 2'-O-Methyl-uridine
  modified_base 74: mod_base = OTHER; note = 2'-O-Methyl-adenosine
  modified_base 75: mod_base = OTHER; note = 2'-O-Methyl-adenosine
  modified_base 76: mod_base = OTHER; note = 2'-O-Methyl-adenosine
  modified_base 77: mod_base = OTHER; note = 2'-O-Methyl-adenosine
  modified_base 78: mod_base = OTHER; note = 2'-O-Methyl-adenosine
  modified_base 79: mod_base = OTHER; note = 2'-O-Methyl-guanosine
  modified_base 80: mod_base = OTHER; note = 2'-O-Methyl-uridine
  modified_base 81: mod_base = OTHER; note = 2'-O-Methyl-guanosine
  modified_base 83: mod_base = OTHER; note = 2'-O-Methyl-cytidine
  modified_base 84: mod_base = OTHER; note = 2'-O-Methyl-adenosine
  modified_base 85: mod_base = OTHER; note = 2'-O-Methyl-cytidine
  modified_base 86: mod_base = OTHER; note = 2'-O-Methyl-cytidine
  modified_base 87: mod_base = OTHER; note = 2'-O-Methyl-guanosine
  modified_base 88: mod_base = OTHER; note = 2'-O-Methyl-adenosine
  modified_base 89: mod_base = OTHER; note = 2'-O-Methyl-guanosine
  modified_base 90: mod_base = OTHER; note = 2'-O-Methyl-uridine
  modified_base 91: mod_base = OTHER; note = 2'-O-Methyl-cytidine
  modified_base 92: mod_base = OTHER; note = 2'-O-Methyl-guanosine
  modified_base 93: mod_base = OTHER; note = 2'-O-Methyl-guanosine
  modified_base 94: mod_base = OTHER; note = 2'-O-Methyl-uridine
  modified_base 95: mod_base = OTHER; note = 2'-O-Methyl-guanosine
  modified_base 96: mod_base = OTHER; note = 2'-O-Methyl-cytidine
  modified_base 97: mod_base = OTHER; note = 2'-O-Methyl-uridine phosphorothioate
  modified_base 98: mod_base = OTHER; note = 2'-O-Methyl-uridine phosphorothioate
  modified_base 99: mod_base = OTHER; note = 2'-O-Methyl-uridine phosphorothioate
  modified_base 100: mod_base = OTHER; note = 2'-O-Methyl-uridine
  misc_difference 101: note = modified_base - a, c, u, g, unknown or other - a, c, g, inosine, u, deoxyadenosine, deoxyguanosine, deoxycytidine, deoxyinosine, thymine, ribonebularine, 2'-O-methylnebularine, or 2'-deoxynebularine
  misc_difference 102: note = modified_base - a, c, u, g, unknown or other - a, c, g, inosine, u, deoxyadenosine, deoxyguanosine, deoxycytidine, deoxyinosine, thymine, ribonebularine, 2'-O-methylnebularine, or 2'-deoxynebularine
  misc_difference 103: note = modified_base - a, c, u, g, unknown or other - a, c, g, inosine, u, deoxyadenosine, deoxyguanosine, deoxycytidine, deoxyinosine, thymine, ribonebularine, 2'-O-methylnebularine, or 2'-deoxynebularine

SEQ ID NO: 1805 - RNA, 103 nt, synthetic construct; identical to SEQ ID NO: 1795
  source 1..103: mol_type = other RNA; note = Description of Artificial Sequence: Synthetic polynucleotide
  modified_base 1: mod_base = OTHER; note = 2'-O-Methyl-cytidine phosphorothioate
  modified_base 2: mod_base = OTHER; note = 2'-O-Methyl-cytidine phosphorothioate
  modified_base 3: mod_base = OTHER; note = 2'-O-Methyl-cytidine phosphorothioate
  modified_base 21: mod_base = OTHER; note = 2'-O-Methyl-guanosine
  modified_base 25: mod_base = OTHER; note = uridine phosphorothioate
  modified_base 28: mod_base = OTHER; note = 2'-O-Methyl-adenosine
  modified_base 29: mod_base = OTHER; note = 2'-O-Methyl-guanosine
  modified_base 30: mod_base = OTHER; note = 2'-O-Methyl-cytidine
  modified_base 31: mod_base = OTHER; note = 2'-O-Methyl-uridine
  modified_base 32: mod_base = OTHER; note = 2'-O-Methyl-adenosine
  modified_base 34: mod_base = OTHER; note = 2'-O-Methyl-adenosine
  modified_base 35: mod_base = OTHER; note = 2'-O-Methyl-adenosine
  modified_base 36: mod_base = OTHER; note = 2'-O-Methyl-adenosine
  modified_base 37: mod_base = OTHER; note = 2'-O-Methyl-uridine
  modified_base 38: mod_base = OTHER; note = 2'-O-Methyl-adenosine
  modified_base 39: mod_base = OTHER; note = 2'-O-Methyl-guanosine
  modified_base 40: mod_base = OTHER; note = 2'-O-Methyl-cytidine
  modified_base 41: mod_base = OTHER; note = 2'-O-Methyl-adenosine
  modified_base 42: mod_base = OTHER; note = 2'-O-Methyl-adenosine
  modified_base 46: mod_base = OTHER; note = 2'-O-Methyl-adenosine
  modified_base 48: mod_base = OTHER; note = 2'-O-Methyl-adenosine
  modified_base 50: mod_base = OTHER; note = 2'-O-Methyl-uridine
  modified_base 52: mod_base = OTHER; note = 2'-O-Methyl-adenosine
  modified_base 53: mod_base = OTHER; note = 2'-O-Methyl-guanosine
  modified_base 54: mod_base = OTHER; note = 2'-O-Methyl-guanosine
  modified_base 57: mod_base = OTHER; note = 2'-O-Methyl-adenosine
  modified_base 61: mod_base = OTHER; note = 2'-O-Methyl-cytidine
  modified_base 66: mod_base = OTHER; note = 2'-O-Methyl-uridine
  modified_base 67: mod_base = OTHER; note = 2'-O-Methyl-cytidine
  modified_base 70: mod_base = OTHER; note = 2'-O-Methyl-cytidine
  modified_base 71: mod_base = OTHER; note = 2'-O-Methyl-uridine
  modified_base 72: mod_base = OTHER; note = 2'-O-Methyl-uridine
  modified_base 74: mod_base = OTHER; note = 2'-O-Methyl-adenosine
  modified_base 75: mod_base = OTHER; note = 2'-O-Methyl-adenosine
  modified_base 76: mod_base = OTHER; note = 2'-O-Methyl-adenosine
  modified_base 77: mod_base = OTHER; note = 2'-O-Methyl-adenosine
  modified_base 78: mod_base = OTHER; note = 2'-O-Methyl-adenosine
  modified_base 79: mod_base = OTHER; note = 2'-O-Methyl-guanosine
  modified_base 80: mod_base = OTHER; note = 2'-O-Methyl-uridine
  modified_base 82: mod_base = OTHER; note = 2'-O-Methyl-guanosine
  modified_base 83: mod_base = OTHER; note = 2'-O-Methyl-cytidine
  modified_base 84: mod_base = OTHER; note = 2'-O-Methyl-adenosine
  modified_base 85: mod_base = OTHER; note = 2'-O-Methyl-cytidine
  modified_base 86: mod_base = OTHER; note = 2'-O-Methyl-cytidine
  modified_base 87: mod_base = OTHER; note = 2'-O-Methyl-guanosine
  modified_base 89: mod_base = OTHER; note = 2'-O-Methyl-guanosine
  modified_base 92: mod_base = OTHER; note = 2'-O-Methyl-guanosine
  modified_base 93: mod_base = OTHER; note = 2'-O-Methyl-guanosine
  modified_base 94: mod_base = OTHER; note = 2'-O-Methyl-uridine
  modified_base 95: mod_base = OTHER; note = 2'-O-Methyl-guanosine
  modified_base 96: mod_base = OTHER; note = 2'-O-Methyl-cytidine
  modified_base 97: mod_base = OTHER; note = 2'-O-Methyl-uridine phosphorothioate
  modified_base 98: mod_base = OTHER; note = 2'-O-Methyl-uridine phosphorothioate
  modified_base 99: mod_base = OTHER; note = 2'-O-Methyl-uridine phosphorothioate
  modified_base 100: mod_base = OTHER; note = 2'-O-Methyl-uridine
  misc_difference 101: note = modified_base - a, c, u, g, unknown or other - a, c, g, inosine, u, deoxyadenosine, deoxyguanosine, deoxycytidine, deoxyinosine, thymine, ribonebularine, 2'-O-methylnebularine, or 2'-deoxynebularine
  misc_difference 102: note = modified_base - a, c, u, g, unknown or other - a, c, g, inosine, u, deoxyadenosine, deoxyguanosine, deoxycytidine, deoxyinosine, thymine, ribonebularine, 2'-O-methylnebularine, or 2'-deoxynebularine
  misc_difference 103: note = modified_base - a, c, u, g, unknown or other - a, c, g, inosine, u, deoxyadenosine, deoxyguanosine, deoxycytidine, deoxyinosine, thymine, ribonebularine, 2'-O-methylnebularine, or 2'-deoxynebularine

SEQ ID NO: 1806 - RNA, 103 nt, synthetic construct; identical to SEQ ID NO: 1796
  source 1..103: mol_type = other RNA; note = Description of Artificial Sequence: Synthetic polynucleotide
  modified_base 1: mod_base = OTHER; note = 2'-O-Methyl-guanosine phosphorothioate
  modified_base 2: mod_base = OTHER; note = 2'-O-Methyl-adenosine phosphorothioate
  modified_base 3: mod_base = OTHER; note = 2'-O-Methyl-guanosine phosphorothioate
  modified_base 21: mod_base = OTHER; note = 2'-O-Methyl-guanosine
  modified_base 25: mod_base = OTHER; note = uridine phosphorothioate
  modified_base 28: mod_base = OTHER; note = 2'-O-Methyl-adenosine
  modified_base 29: mod_base = OTHER; note = 2'-O-Methyl-guanosine
  modified_base 30: mod_base = OTHER; note = 2'-O-Methyl-cytidine
  modified_base 31: mod_base = OTHER; note = 2'-O-Methyl-uridine
  modified_base 32: mod_base = OTHER; note = 2'-O-Methyl-adenosine
  modified_base 34: mod_base = OTHER; note = 2'-O-Methyl-adenosine
  modified_base 35: mod_base = OTHER; note = 2'-O-Methyl-adenosine
  modified_base 36: mod_base = OTHER; note = 2'-O-Methyl-adenosine
  modified_base 37: mod_base = OTHER; note = 2'-O-Methyl-uridine
  modified_base 38: mod_base = OTHER; note = 2'-O-Methyl-adenosine
  modified_base 39: mod_base = OTHER; note = 2'-O-Methyl-guanosine
  modified_base 40: mod_base = OTHER; note = 2'-O-Methyl-cytidine
  modified_base 41: mod_base = OTHER; note = 2'-O-Methyl-adenosine
  modified_base 42: mod_base = OTHER; note = 2'-O-Methyl-adenosine
  modified_base 46: mod_base = OTHER; note = 2'-O-Methyl-adenosine
  modified_base 48: mod_base = OTHER; note = 2'-O-Methyl-adenosine
  modified_base 50: mod_base = OTHER; note = 2'-O-Methyl-uridine
  modified_base 52: mod_base = OTHER; note = 2'-O-Methyl-adenosine
  modified_base 53: mod_base = OTHER; note = 2'-O-Methyl-guanosine
  modified_base 54: mod_base = OTHER; note = 2'-O-Methyl-guanosine
  modified_base 57: mod_base = OTHER; note = 2'-O-Methyl-adenosine
  modified_base 61: mod_base = OTHER; note = 2'-O-Methyl-cytidine
  modified_base 66: mod_base = OTHER; note = 2'-O-Methyl-uridine
  modified_base 67: mod_base = OTHER; note = 2'-O-Methyl-cytidine
  modified_base 70: mod_base = OTHER; note = 2'-O-Methyl-cytidine
  modified_base 71: mod_base = OTHER; note = 2'-O-Methyl-uridine
  modified_base 72: mod_base = OTHER; note = 2'-O-Methyl-uridine
  modified_base 74: mod_base = OTHER; note = 2'-O-Methyl-adenosine
  modified_base 75: mod_base = OTHER; note = 2'-O-Methyl-adenosine
  modified_base 76: mod_base = OTHER; note = 2'-O-Methyl-adenosine
  modified_base 77: mod_base = OTHER; note = 2'-O-Methyl-adenosine
  modified_base 78: mod_base = OTHER; note = 2'-O-Methyl-adenosine
  modified_base 79: mod_base = OTHER; note = 2'-O-Methyl-guanosine
  modified_base 80: mod_base = OTHER; note = 2'-O-Methyl-uridine
  modified_base 82: mod_base = OTHER; note = 2'-O-Methyl-guanosine
  modified_base 83: mod_base = OTHER; note = 2'-O-Methyl-cytidine
  modified_base 84: mod_base = OTHER; note = 2'-O-Methyl-adenosine
  modified_base 85: mod_base = OTHER; note = 2'-O-Methyl-cytidine
  modified_base 86: mod_base = OTHER; note = 2'-O-Methyl-cytidine
  modified_base 87: mod_base = OTHER; note = 2'-O-Methyl-guanosine
  modified_base 89: mod_base = OTHER; note = 2'-O-Methyl-guanosine
  modified_base 92: mod_base = OTHER; note = 2'-O-Methyl-guanosine
  modified_base 93: mod_base = OTHER; note = 2'-O-Methyl-guanosine
  modified_base 94: mod_base = OTHER; note = 2'-O-Methyl-uridine
  modified_base 95: mod_base = OTHER; note = 2'-O-Methyl-guanosine
  modified_base 96: mod_base = OTHER; note = 2'-O-Methyl-cytidine
  modified_base 97: mod_base = OTHER; note = 2'-O-Methyl-uridine phosphorothioate
  modified_base 98: mod_base = OTHER; note = 2'-O-Methyl-uridine phosphorothioate
  modified_base 99: mod_base = OTHER; note = 2'-O-Methyl-uridine phosphorothioate
  modified_base 100: mod_base = OTHER; note = 2'-O-Methyl-uridine
  misc_difference 101: note = modified_base - a, c, u, g, unknown or other - a, c, g, inosine, u, deoxyadenosine, deoxyguanosine, deoxycytidine, deoxyinosine, thymine, ribonebularine, 2'-O-methylnebularine, or 2'-deoxynebularine
  misc_difference 102: note = modified_base - a, c, u, g, unknown or other - a, c, g, inosine, u, deoxyadenosine, deoxyguanosine, deoxycytidine, deoxyinosine, thymine, ribonebularine, 2'-O-methylnebularine, or 2'-deoxynebularine
  misc_difference 103: note = modified_base - a, c, u, g, unknown or other - a, c, g, inosine, u, deoxyadenosine, deoxyguanosine, deoxycytidine, deoxyinosine, thymine, ribonebularine, 2'-O-methylnebularine, or 2'-deoxynebularine

SEQ ID NO: 1807 - RNA, 103 nt, synthetic construct; identical to SEQ ID NO: 1797
  source 1..103: mol_type = other RNA; note = Description of Artificial Sequence: Synthetic polynucleotide
  modified_base 1: mod_base = OTHER; note = 2'-O-Methyl-cytidine phosphorothioate
  modified_base 2: mod_base = OTHER; note = 2'-O-Methyl-adenosine phosphorothioate
  modified_base 3: mod_base = OTHER; note = 2'-O-Methyl-guanosine phosphorothioate
  modified_base 21: mod_base = OTHER; note = 2'-O-Methyl-guanosine
  modified_base 25: mod_base = OTHER; note = uridine phosphorothioate
  modified_base 28: mod_base = OTHER; note = 2'-O-Methyl-adenosine
  modified_base 29: mod_base = OTHER; note = 2'-O-Methyl-guanosine
  modified_base 30: mod_base = OTHER; note = 2'-O-Methyl-cytidine
  modified_base 31: mod_base = OTHER; note = 2'-O-Methyl-uridine
  modified_base 32: mod_base = OTHER; note = 2'-O-Methyl-adenosine
  modified_base 34: mod_base = OTHER; note = 2'-O-Methyl-adenosine
  modified_base 35: mod_base = OTHER; note = 2'-O-Methyl-adenosine
  modified_base 36: mod_base = OTHER; note = 2'-O-Methyl-adenosine
  modified_base 37: mod_base = OTHER; note = 2'-O-Methyl-uridine
  modified_base 38: mod_base = OTHER; note = 2'-O-Methyl-adenosine
  modified_base 39: mod_base = OTHER; note = 2'-O-Methyl-guanosine
  modified_base 40: mod_base = OTHER; note = 2'-O-Methyl-cytidine
  modified_base 41: mod_base = OTHER; note = 2'-O-Methyl-adenosine
  modified_base 42: mod_base = OTHER; note = 2'-O-Methyl-adenosine
  modified_base 46: mod_base = OTHER; note = 2'-O-Methyl-adenosine
  modified_base 48: mod_base = OTHER; note = 2'-O-Methyl-adenosine
  modified_base 50: mod_base = OTHER; note = 2'-O-Methyl-uridine
  modified_base 52: mod_base = OTHER; note = 2'-O-Methyl-adenosine
  modified_base 53: mod_base = OTHER; note = 2'-O-Methyl-guanosine
  modified_base 54: mod_base = OTHER; note = 2'-O-Methyl-guanosine
  modified_base 55: mod_base = OTHER; note = 2'-O-Methyl-cytidine
  modified_base 56: mod_base = OTHER; note = 2'-O-Methyl-uridine
  modified_base 57: mod_base = OTHER; note = 2'-O-Methyl-adenosine
  modified_base 60: mod_base = OTHER; note = 2'-O-Methyl-cytidine
  modified_base 61: mod_base = OTHER; note = 2'-O-Methyl-cytidine
  modified_base 66: mod_base = OTHER; note = 2'-O-Methyl-uridine
  modified_base 67: mod_base = OTHER; note = 2'-O-Methyl-cytidine
  modified_base 70: mod_base = OTHER; note = 2'-O-Methyl-cytidine
  modified_base 71: mod_base = OTHER; note = 2'-O-Methyl-uridine
  modified_base 72: mod_base = OTHER; note = 2'-O-Methyl-uridine
  modified_base 74: mod_base = OTHER; note = 2'-O-Methyl-adenosine
  modified_base 75: mod_base = OTHER; note = 2'-O-Methyl-adenosine
  modified_base 76: mod_base = OTHER; note = 2'-O-Methyl-adenosine
  modified_base 77: mod_base = OTHER; note = 2'-O-Methyl-adenosine
  modified_base 78: mod_base = OTHER; note = 2'-O-Methyl-adenosine
  modified_base 79: mod_base = OTHER; note = 2'-O-Methyl-guanosine
  modified_base 80: mod_base = OTHER; note = 2'-O-Methyl-uridine
  modified_base 81: mod_base = OTHER; note = 2'-O-Methyl-guanosine
  modified_base 83: mod_base = OTHER; note = 2'-O-Methyl-cytidine
  modified_base 84: mod_base = OTHER; note = 2'-O-Methyl-adenosine
  modified_base 85: mod_base = OTHER; note = 2'-O-Methyl-cytidine
  modified_base 86: mod_base = OTHER; note = 2'-O-Methyl-cytidine
  modified_base 87: mod_base = OTHER; note = 2'-O-Methyl-guanosine
  modified_base 88: mod_base = OTHER; note = 2'-O-Methyl-adenosine
  modified_base 89: mod_base = OTHER; note = 2'-O-Methyl-guanosine
  modified_base 90: mod_base = OTHER; note = 2'-O-Methyl-uridine
  modified_base 91: mod_base = OTHER; note = 2'-O-Methyl-cytidine
  modified_base 92: mod_base = OTHER; note = 2'-O-Methyl-guanosine
  modified_base 93: mod_base = OTHER; note = 2'-O-Methyl-guanosine
  modified_base 94: mod_base = OTHER; note = 2'-O-Methyl-uridine
  modified_base 95: mod_base = OTHER; note = 2'-O-Methyl-guanosine
  modified_base 96: mod_base = OTHER; note = 2'-O-Methyl-cytidine
  modified_base 97: mod_base = OTHER; note = 2'-O-Methyl-uridine phosphorothioate
  modified_base 98: mod_base = OTHER; note = 2'-O-Methyl-uridine phosphorothioate
  modified_base 99: mod_base = OTHER; note = 2'-O-Methyl-uridine phosphorothioate
  modified_base 100: mod_base = OTHER; note = 2'-O-Methyl-uridine
  misc_difference 101: note = modified_base - a, c, u, g, unknown or other - a, c, g, inosine, u, deoxyadenosine, deoxyguanosine, deoxycytidine, deoxyinosine, thymine, ribonebularine, 2'-O-methylnebularine, or 2'-deoxynebularine
  misc_difference 102: note = modified_base - a, c, u, g, unknown or other - a, c, g, inosine, u, deoxyadenosine, deoxyguanosine, deoxycytidine, deoxyinosine, thymine, ribonebularine, 2'-O-methylnebularine, or 2'-deoxynebularine
  misc_difference 103: note = modified_base - a, c, u, g, unknown or other - a, c, g, inosine, u, deoxyadenosine, deoxyguanosine, deoxycytidine, deoxyinosine, thymine, ribonebularine, 2'-O-methylnebularine, or 2'-deoxynebularine

SEQ ID NO: 1808 - RNA, 103 nt, synthetic construct; identical to SEQ ID NO: 1795
  source 1..103: mol_type = other RNA; note = Description of Artificial Sequence: Synthetic polynucleotide
  modified_base 1: mod_base = OTHER; note = 2'-O-Methyl-cytidine phosphorothioate
  modified_base 2: mod_base = OTHER; note = 2'-O-Methyl-cytidine phosphorothioate
  modified_base 3: mod_base = OTHER; note = 2'-O-Methyl-cytidine phosphorothioate
  modified_base 21: mod_base = OTHER; note = 2'-O-Methyl-guanosine
  modified_base 28: mod_base = OTHER; note = 2'-O-Methyl-adenosine
  modified_base 29: mod_base = OTHER; note = 2'-O-Methyl-guanosine
  modified_base 30: mod_base = OTHER; note = 2'-O-Methyl-cytidine
  modified_base 31: mod_base = OTHER; note = 2'-O-Methyl-uridine
  modified_base 32: mod_base = OTHER; note = 2'-O-Methyl-adenosine
  modified_base 34: mod_base = OTHER; note = 2'-O-Methyl-adenosine
  modified_base 35: mod_base = OTHER; note = 2'-O-Methyl-adenosine
  modified_base 36: mod_base = OTHER; note = 2'-O-Methyl-adenosine
  modified_base 37: mod_base = OTHER; note = 2'-O-Methyl-uridine
  modified_base 38: mod_base = OTHER; note = 2'-O-Methyl-adenosine
  modified_base 39: mod_base = OTHER; note = 2'-O-Methyl-guanosine
  modified_base 40: mod_base = OTHER; note = 2'-O-Methyl-cytidine
  modified_base 41: mod_base = OTHER; note = 2'-O-Methyl-adenosine
  modified_base 42: mod_base = OTHER; note = 2'-O-Methyl-adenosine
  modified_base 45: mod_base = OTHER; note = uridine phosphorothioate
  modified_base 46: mod_base = OTHER; note = 2'-O-Methyl-adenosine
  modified_base 48: mod_base = OTHER; note = 2'-O-Methyl-adenosine
  modified_base 50: mod_base = OTHER; note = 2'-O-Methyl-uridine
  modified_base 52: mod_base = OTHER; note = 2'-O-Methyl-adenosine
  modified_base 53: mod_base = OTHER; note = 2'-O-Methyl-guanosine
  modified_base 54: mod_base = OTHER; note = 2'-O-Methyl-guanosine
  modified_base 57: mod_base = OTHER; note = 2'-O-Methyl-adenosine
  modified_base 61: mod_base = OTHER; note = 2'-O-Methyl-cytidine
  modified_base 64: mod_base = OTHER; note = uridine phosphorothioate
  modified_base 66: mod_base = OTHER; note = 2'-O-Methyl-uridine
  modified_base 67: mod_base = OTHER; note = 2'-O-Methyl-cytidine
  modified_base 70: mod_base = OTHER; note = 2'-O-Methyl-cytidine
  modified_base 71: mod_base = OTHER; note = 2'-O-Methyl-uridine
  modified_base 72: mod_base = OTHER; note = 2'-O-Methyl-uridine
  modified_base 74: mod_base = OTHER; note = 2'-O-Methyl-adenosine
  modified_base 75: mod_base = OTHER; note = 2'-O-Methyl-adenosine
  modified_base 76: mod_base = OTHER; note = 2'-O-Methyl-adenosine
  modified_base 77: mod_base = OTHER; note = 2'-O-Methyl-adenosine
  modified_base 78: mod_base = OTHER; note = 2'-O-Methyl-adenosine
  modified_base 79: mod_base = OTHER; note = 2'-O-Methyl-guanosine
  modified_base 80: mod_base = OTHER; note = 2'-O-Methyl-uridine
  modified_base 82: mod_base = OTHER; note = 2'-O-Methyl-guanosine
  modified_base 83: mod_base = OTHER; note = 2'-O-Methyl-cytidine
  modified_base 84: mod_base = OTHER; note = 2'-O-Methyl-adenosine
  modified_base 85: mod_base = OTHER; note = 2'-O-Methyl-cytidine
  modified_base 86: mod_base = OTHER; note = 2'-O-Methyl-cytidine
  modified_base 87: mod_base = OTHER; note = 2'-O-Methyl-guanosine
  modified_base 89: mod_base = OTHER; note = 2'-O-Methyl-guanosine
  modified_base 92: mod_base = OTHER; note = 2'-O-Methyl-guanosine
  modified_base 93: mod_base = OTHER; note = 2'-O-Methyl-guanosine
  modified_base 94: mod_base = OTHER; note = 2'-O-Methyl-uridine
  modified_base 95: mod_base = OTHER; note = 2'-O-Methyl-guanosine
  modified_base 96: mod_base = OTHER; note = 2'-O-Methyl-cytidine
  modified_base 97: mod_base = OTHER; note = 2'-O-Methyl-uridine phosphorothioate
  modified_base 98: mod_base = OTHER; note = 2'-O-Methyl-uridine phosphorothioate
  modified_base 99: mod_base = OTHER; note = 2'-O-Methyl-uridine phosphorothioate
  modified_base 100: mod_base = OTHER; note = 2'-O-Methyl-uridine
  misc_difference 101: note = modified_base - a, c, u, g, unknown or other - a, c, g, inosine, u, deoxyadenosine, deoxyguanosine, deoxycytidine, deoxyinosine, thymine, ribonebularine, 2'-O-methylnebularine, or 2'-deoxynebularine
  misc_difference 102: note = modified_base - a, c, u, g, unknown or other - a, c, g, inosine, u, deoxyadenosine, deoxyguanosine, deoxycytidine, deoxyinosine, thymine, ribonebularine, 2'-O-methylnebularine, or 2'-deoxynebularine
  misc_difference 103: note = modified_base - a, c, u, g, unknown or other - a, c, g, inosine, u, deoxyadenosine, deoxyguanosine, deoxycytidine, deoxyinosine, thymine, ribonebularine, 2'-O-methylnebularine, or 2'-deoxynebularine

SEQ ID NO: 1809 - RNA, 103 nt, synthetic construct; identical to SEQ ID NO: 1796
  source 1..103: mol_type = other RNA; note = Description of Artificial Sequence: Synthetic polynucleotide
  modified_base 1: mod_base = OTHER; note = 2'-O-Methyl-guanosine phosphorothioate
  modified_base 2: mod_base = OTHER; note = 2'-O-Methyl-adenosine phosphorothioate
  modified_base 3: mod_base = OTHER; note = 2'-O-Methyl-guanosine phosphorothioate
  modified_base 21: mod_base = OTHER; note = 2'-O-Methyl-guanosine
  modified_base 28: mod_base = OTHER; note = 2'-O-Methyl-adenosine
  modified_base 29: mod_base = OTHER; note = 2'-O-Methyl-guanosine
  modified_base 30: mod_base = OTHER; note = 2'-O-Methyl-cytidine
  modified_base 31: mod_base = OTHER; note = 2'-O-Methyl-uridine
  modified_base 32: mod_base = OTHER; note = 2'-O-Methyl-adenosine
  modified_base 34: mod_base = OTHER; note = 2'-O-Methyl-adenosine
  modified_base 35: mod_base = OTHER; note = 2'-O-Methyl-adenosine
  modified_base 36: mod_base = OTHER; note = 2'-O-Methyl-adenosine
  modified_base 37: mod_base = OTHER; note = 2'-O-Methyl-uridine
  modified_base 38: mod_base = OTHER; note = 2'-O-Methyl-adenosine
  modified_base 39: mod_base = OTHER; note = 2'-O-Methyl-guanosine
  modified_base 40: mod_base = OTHER; note = 2'-O-Methyl-cytidine
  modified_base 41: mod_base = OTHER; note = 2'-O-Methyl-adenosine
  modified_base 42: mod_base = OTHER; note = 2'-O-Methyl-adenosine
  modified_base 45: mod_base = OTHER; note = uridine phosphorothioate
  modified_base 46: mod_base = OTHER; note = 2'-O-Methyl-adenosine
  modified_base 48: mod_base = OTHER; note = 2'-O-Methyl-adenosine
  modified_base 50: mod_base = OTHER; note = 2'-O-Methyl-uridine
  modified_base 52: mod_base = OTHER; note = 2'-O-Methyl-adenosine
  modified_base 53: mod_base = OTHER; note = 2'-O-Methyl-guanosine
  modified_base 54: mod_base = OTHER; note = 2'-O-Methyl-guanosine
  modified_base 57: mod_base = OTHER; note = 2'-O-Methyl-adenosine
  modified_base 61: mod_base = OTHER; note = 2'-O-Methyl-cytidine
  modified_base 64: mod_base = OTHER; note = uridine phosphorothioate
  modified_base 66: mod_base = OTHER; note = 2'-O-Methyl-uridine
  modified_base 67: mod_base = OTHER; note = 2'-O-Methyl-cytidine
  modified_base 70: mod_base = OTHER; note = 2'-O-Methyl-cytidine
  modified_base 71: mod_base = OTHER; note = 2'-O-Methyl-uridine
  modified_base 72: mod_base = OTHER; note = 2'-O-Methyl-uridine
  modified_base 74: mod_base = OTHER; note = 2'-O-Methyl-adenosine
  modified_base 75: mod_base = OTHER; note = 2'-O-Methyl-adenosine
  modified_base 76: mod_base = OTHER; note = 2'-O-Methyl-adenosine
  modified_base 77: mod_base = OTHER; note = 2'-O-Methyl-adenosine
  modified_base 78: mod_base = OTHER; note = 2'-O-Methyl-adenosine
  modified_base 79: mod_base = OTHER; note = 2'-O-Methyl-guanosine
  modified_base 80: mod_base = OTHER; note = 2'-O-Methyl-uridine
  modified_base 82: mod_base = OTHER; note = 2'-O-Methyl-guanosine
  modified_base 83: mod_base = OTHER; note = 2'-O-Methyl-cytidine
  modified_base 84: mod_base = OTHER; note = 2'-O-Methyl-adenosine
  modified_base 85: mod_base = OTHER; note = 2'-O-Methyl-cytidine
  modified_base 86: mod_base = OTHER; note = 2'-O-Methyl-cytidine
  modified_base 87: mod_base = OTHER; note = 2'-O-Methyl-guanosine
  modified_base 89: mod_base = OTHER; note = 2'-O-Methyl-guanosine
  modified_base 92: mod_base = OTHER; note = 2'-O-Methyl-guanosine
  modified_base 93: mod_base = OTHER; note = 2'-O-Methyl-guanosine
  modified_base 94: mod_base = OTHER; note = 2'-O-Methyl-uridine
  modified_base 95: mod_base = OTHER; note = 2'-O-Methyl-guanosine
  modified_base 96: mod_base = OTHER; note = 2'-O-Methyl-cytidine
  modified_base 97: mod_base = OTHER; note = 2'-O-Methyl-uridine phosphorothioate
  modified_base 98: mod_base = OTHER; note = 2'-O-Methyl-uridine phosphorothioate
  modified_base 99: mod_base = OTHER; note = 2'-O-Methyl-uridine phosphorothioate
  modified_base 100: mod_base = OTHER; note = 2'-O-Methyl-uridine
  misc_difference 101: note = modified_base - a, c, u, g, unknown or other - a, c, g, inosine, u, deoxyadenosine, deoxyguanosine, deoxycytidine, deoxyinosine, thymine, ribonebularine, 2'-O-methylnebularine, or 2'-deoxynebularine
  misc_difference 102: note = modified_base - a, c, u, g, unknown or other - a, c, g, inosine, u, deoxyadenosine, deoxyguanosine, deoxycytidine, deoxyinosine, thymine, ribonebularine, 2'-O-methylnebularine, or 2'-deoxynebularine
  misc_difference 103: note = modified_base - a, c, u, g, unknown or other - a, c, g, inosine, u, deoxyadenosine, deoxyguanosine, deoxycytidine, deoxyinosine, thymine, ribonebularine, 2'-O-methylnebularine, or 2'-deoxynebularine

SEQ ID NO: 1810 - RNA, 103 nt, synthetic construct; identical to SEQ ID NO: 1797
  source 1..103: mol_type = other RNA; note = Description of Artificial Sequence: Synthetic polynucleotide
  modified_base 1: mod_base = OTHER; note = 2'-O-Methyl-cytidine phosphorothioate
  modified_base 2: mod_base = OTHER; note = 2'-O-Methyl-adenosine phosphorothioate
  modified_base 3: mod_base = OTHER; note = 2'-O-Methyl-guanosine phosphorothioate
  modified_base 21: mod_base = OTHER; note = 2'-O-Methyl-guanosine
  modified_base 28: mod_base = OTHER; note = 2'-O-Methyl-adenosine
  modified_base 29: mod_base = OTHER; note = 2'-O-Methyl-guanosine
  modified_base 30: mod_base = OTHER; note = 2'-O-Methyl-cytidine
  modified_base 31: mod_base = OTHER; note = 2'-O-Methyl-uridine
  modified_base 32: mod_base = OTHER; note = 2'-O-Methyl-adenosine
  modified_base 34: mod_base = OTHER; note = 2'-O-Methyl-adenosine
  modified_base 35: mod_base = OTHER; note = 2'-O-Methyl-adenosine
  modified_base 36: mod_base = OTHER; note = 2'-O-Methyl-adenosine
  modified_base 37: mod_base = OTHER; note = 2'-O-Methyl-uridine
  modified_base 38: mod_base = OTHER; note = 2'-O-Methyl-adenosine
  modified_base 39: mod_base = OTHER; note = 2'-O-Methyl-guanosine
  modified_base 40: mod_base = OTHER; note = 2'-O-Methyl-cytidine
  modified_base 41: mod_base = OTHER; note = 2'-O-Methyl-adenosine
  modified_base 42: mod_base = OTHER; note = 2'-O-Methyl-adenosine
  modified_base 45: mod_base = OTHER; note = uridine phosphorothioate
  modified_base 46: mod_base = OTHER; note = 2'-O-Methyl-adenosine
  modified_base 48: mod_base = OTHER; note = 2'-O-Methyl-adenosine
  modified_base 50: mod_base = OTHER; note = 2'-O-Methyl-uridine
  modified_base 52: mod_base = OTHER; note = 2'-O-Methyl-adenosine
  modified_base 53: mod_base = OTHER; note = 2'-O-Methyl-guanosine
  modified_base 54: mod_base = OTHER; note = 2'-O-Methyl-guanosine
  modified_base 55: mod_base = OTHER; note = 2'-O-Methyl-cytidine
  modified_base 56: mod_base = OTHER; note = 2'-O-Methyl-uridine
  modified_base 57: mod_base = OTHER; note = 2'-O-Methyl-adenosine
  modified_base 60: mod_base = OTHER; note = 2'-O-Methyl-cytidine
  modified_base 61: mod_base = OTHER; note = 2'-O-Methyl-cytidine
  modified_base 64: mod_base = OTHER; note = uridine phosphorothioate
  modified_base 66: mod_base = OTHER; note = 2'-O-Methyl-uridine
  modified_base 67: mod_base = OTHER; note = 2'-O-Methyl-cytidine
  modified_base 70: mod_base = OTHER; note = 2'-O-Methyl-cytidine
  modified_base 71: mod_base = OTHER; note = 2'-O-Methyl-uridine
  modified_base 72: mod_base = OTHER; note = 2'-O-Methyl-uridine
  modified_base 74: mod_base = OTHER; note = 2'-O-Methyl-adenosine
  modified_base 75: mod_base = OTHER; note = 2'-O-Methyl-adenosine
  modified_base 76: mod_base = OTHER; note = 2'-O-Methyl-adenosine
  modified_base 77: mod_base = OTHER; note = 2'-O-Methyl-adenosine
  modified_base 78: mod_base = OTHER; note = 2'-O-Methyl-adenosine
  modified_base 79: mod_base = OTHER; note = 2'-O-Methyl-guanosine
  modified_base 80: mod_base = OTHER; note = 2'-O-Methyl-uridine
  modified_base 81: mod_base = OTHER; note = 2'-O-Methyl-guanosine
  modified_base 83: mod_base = OTHER; note = 2'-O-Methyl-cytidine
  modified_base 84: mod_base = OTHER; note = 2'-O-Methyl-adenosine
  modified_base 85: mod_base = OTHER; note = 2'-O-Methyl-cytidine
  modified_base 86: mod_base = OTHER; note = 2'-O-Methyl-cytidine
  modified_base 87: mod_base = OTHER; note = 2'-O-Methyl-guanosine
  modified_base 88: mod_base = OTHER; note = 2'-O-Methyl-adenosine
  modified_base 89: mod_base = OTHER; note = 2'-O-Methyl-guanosine
  modified_base 90: mod_base = OTHER; note = 2'-O-Methyl-uridine
  modified_base 91: mod_base = OTHER; note = 2'-O-Methyl-cytidine
  modified_base 92: mod_base = OTHER; note = 2'-O-Methyl-guanosine
  modified_base 93: mod_base = OTHER; note = 2'-O-Methyl-guanosine
  modified_base 94: mod_base = OTHER; note = 2'-O-Methyl-uridine
  modified_base 95: mod_base = OTHER; note = 2'-O-Methyl-guanosine
  modified_base 96: mod_base = OTHER; note = 2'-O-Methyl-cytidine
  modified_base 97: mod_base = OTHER; note = 2'-O-Methyl-uridine phosphorothioate
  modified_base 98: mod_base = OTHER; note = 2'-O-Methyl-uridine phosphorothioate
  modified_base 99: mod_base = OTHER; note = 2'-O-Methyl-uridine phosphorothioate
  modified_base 100: mod_base = OTHER; note = 2'-O-Methyl-uridine
  misc_difference 101: note = modified_base - a, c, u, g, unknown or other - a, c, g, inosine, u, deoxyadenosine, deoxyguanosine, deoxycytidine, deoxyinosine, thymine, ribonebularine, 2'-O-methylnebularine, or 2'-deoxynebularine
  misc_difference 102: note = modified_base - a, c, u, g, unknown or other - a, c, g, inosine, u, deoxyadenosine, deoxyguanosine, deoxycytidine, deoxyinosine, thymine, ribonebularine, 2'-O-methylnebularine, or 2'-deoxynebularine
  misc_difference 103: note = modified_base - a, c, u, g, unknown or other - a, c, g, inosine, u, deoxyadenosine, deoxyguanosine, deoxycytidine, deoxyinosine, thymine, ribonebularine, 2'-O-methylnebularine, or 2'-deoxynebularine

SEQ ID NO: 1811 - RNA, 103 nt, synthetic construct; identical to SEQ ID NO: 1795
  source 1..103: mol_type = other RNA; note = Description of Artificial Sequence: Synthetic polynucleotide
  modified_base 1: mod_base = OTHER; note = 2'-O-Methyl-cytidine phosphorothioate
  modified_base 2: mod_base = OTHER; note = 2'-O-Methyl-cytidine phosphorothioate
  modified_base 3: mod_base = OTHER; note = 2'-O-Methyl-cytidine phosphorothioate
  modified_base 21: mod_base = OTHER; note = 2'-O-Methyl-guanosine
  modified_base 25: mod_base = OTHER; note = uridine phosphorothioate
  modified_base 28: mod_base = OTHER; note = 2'-O-Methyl-adenosine
  modified_base 29: mod_base = OTHER; note = 2'-O-Methyl-guanosine
  modified_base 30: mod_base = OTHER; note = 2'-O-Methyl-cytidine
  modified_base 31: mod_base = OTHER; note = 2'-O-Methyl-uridine
  modified_base 32: mod_base = OTHER; note = 2'-O-Methyl-adenosine
  modified_base 34: mod_base = OTHER; note = 2'-O-Methyl-adenosine
  modified_base 35: mod_base = OTHER; note = 2'-O-Methyl-adenosine
  modified_base 36: mod_base = OTHER; note = 2'-O-Methyl-adenosine
  modified_base 37: mod_base = OTHER; note = 2'-O-Methyl-uridine
  modified_base 38: mod_base = OTHER; note = 2'-O-Methyl-adenosine
  modified_base 39: mod_base = OTHER; note = 2'-O-Methyl-guanosine
  modified_base 40: mod_base = OTHER; note = 2'-O-Methyl-cytidine
  modified_base 41: mod_base = OTHER; note = 2'-O-Methyl-adenosine
  modified_base 42: mod_base = OTHER; note = 2'-O-Methyl-adenosine
  modified_base 45: mod_base = OTHER; note = uridine phosphorothioate
  modified_base 46: mod_base = OTHER; note = 2'-O-Methyl-adenosine
  modified_base 48: mod_base = OTHER; note = 2'-O-Methyl-adenosine
  modified_base 50: mod_base = OTHER; note = 2'-O-Methyl-uridine
  modified_base 52: mod_base = OTHER; note = 2'-O-Methyl-adenosine
  modified_base 53: mod_base = OTHER; note = 2'-O-Methyl-guanosine
  modified_base 54: mod_base = OTHER; note = 2'-O-Methyl-guanosine
  modified_base 57: mod_base = OTHER; note = 2'-O-Methyl-adenosine
  modified_base 61: mod_base = OTHER; note = 2'-O-Methyl-cytidine
  modified_base 66: mod_base = OTHER; note = 2'-O-Methyl-uridine
  modified_base 67: mod_base = OTHER; note = 2'-O-Methyl-cytidine
  modified_base 70: mod_base = OTHER; note = 2'-O-Methyl-cytidine
  modified_base 71: mod_base = OTHER; note = 2'-O-Methyl-uridine
  modified_base 72: mod_base = OTHER; note = 2'-O-Methyl-uridine
  modified_base 74: mod_base = OTHER; note = 2'-O-Methyl-adenosine
  modified_base 75: mod_base = OTHER; note = 2'-O-Methyl-adenosine
  modified_base 76: mod_base = OTHER; note = 2'-O-Methyl-adenosine
  modified_base 77: mod_base = OTHER; note = 2'-O-Methyl-adenosine
  modified_base 78: mod_base = OTHER; note = 2'-O-Methyl-adenosine
  modified_base 79: mod_base = OTHER; note = 2'-O-Methyl-guanosine
  modified_base 80: mod_base = OTHER; note = 2'-O-Methyl-uridine
  modified_base 82: mod_base = OTHER; note = 2'-O-Methyl-guanosine
  modified_base 83: mod_base = OTHER; note = 2'-O-Methyl-cytidine
  modified_base 84: mod_base = OTHER; note = 2'-O-Methyl-adenosine
  modified_base 85: mod_base = OTHER; note = 2'-O-Methyl-cytidine
  modified_base 86: mod_base = OTHER; note = 2'-O-Methyl-cytidine
  modified_base 87: mod_base = OTHER; note = 2'-O-Methyl-guanosine
  modified_base 89: mod_base = OTHER; note = 2'-O-Methyl-guanosine
  modified_base 92: mod_base = OTHER; note = 2'-O-Methyl-guanosine
  modified_base 93: mod_base = OTHER; note = 2'-O-Methyl-guanosine
  modified_base 94: mod_base = OTHER; note = 2'-O-Methyl-uridine
  modified_base 95: mod_base = OTHER; note = 2'-O-Methyl-guanosine
  modified_base 96: mod_base = OTHER; note = 2'-O-Methyl-cytidine
  modified_base 97: mod_base = OTHER; note = 2'-O-Methyl-uridine phosphorothioate
  modified_base 98: mod_base = OTHER; note = 2'-O-Methyl-uridine phosphorothioate
  modified_base 99: mod_base = OTHER; note = 2'-O-Methyl-uridine phosphorothioate
  modified_base 100: mod_base = OTHER; note = 2'-O-Methyl-uridine
  misc_difference 101: note = modified_base - a, c, u, g, unknown or other - a, c, g, inosine, u, deoxyadenosine, deoxyguanosine, deoxycytidine, deoxyinosine, thymine, ribonebularine, 2'-O-methylnebularine, or 2'-deoxynebularine
  misc_difference 102: note = modified_base - a, c, u, g, unknown or other - a, c, g, inosine, u, deoxyadenosine, deoxyguanosine, deoxycytidine, deoxyinosine, thymine, ribonebularine, 2'-O-methylnebularine, or 2'-deoxynebularine
  misc_difference 103: note = modified_base - a, c, u, g, unknown or other - a, c, g, inosine, u, deoxyadenosine, deoxyguanosine, deoxycytidine, deoxyinosine, thymine, ribonebularine, 2'-O-methylnebularine, or 2'-deoxynebularine

SEQ ID NO: 1812 - RNA, 103 nt, synthetic construct; identical to SEQ ID NO: 1796
  source 1..103: mol_type = other RNA; note = Description of Artificial Sequence: Synthetic polynucleotide
  modified_base 1: mod_base = OTHER; note = 2'-O-Methyl-guanosine phosphorothioate
  modified_base 2: mod_base = OTHER; note = 2'-O-Methyl-adenosine phosphorothioate
  modified_base 3: mod_base = OTHER; note = 2'-O-Methyl-guanosine phosphorothioate
  modified_base 21: mod_base = OTHER; note = 2'-O-Methyl-guanosine
  modified_base 25: mod_base = OTHER; note = uridine phosphorothioate
  modified_base 28: mod_base = OTHER; note = 2'-O-Methyl-adenosine
  modified_base 29: mod_base = OTHER; note = 2'-O-Methyl-guanosine
  modified_base 30: mod_base = OTHER; note = 2'-O-Methyl-cytidine
  modified_base 31: mod_base = OTHER; note = 2'-O-Methyl-uridine
  modified_base 32: mod_base = OTHER; note = 2'-O-Methyl-adenosine
  modified_base 34: mod_base = OTHER; note = 2'-O-Methyl-adenosine
  modified_base 35: mod_base = OTHER; note = 2'-O-Methyl-adenosine
  modified_base 36: mod_base = OTHER; note = 2'-O-Methyl-adenosine
  modified_base 37: mod_base = OTHER; note = 2'-O-Methyl-uridine
  modified_base 38: mod_base = OTHER; note = 2'-O-Methyl-adenosine
  modified_base 39: mod_base = OTHER; note = 2'-O-Methyl-guanosine
  modified_base 40: mod_base = OTHER; note = 2'-O-Methyl-cytidine
  modified_base 41: mod_base = OTHER; note = 2'-O-Methyl-adenosine
  modified_base 42: mod_base = OTHER; note = 2'-O-Methyl-adenosine
  modified_base 45: mod_base = OTHER; note = uridine phosphorothioate
  modified_base 46: mod_base = OTHER; note = 2'-O-Methyl-adenosine
  modified_base 48: mod_base = OTHER; note = 2'-O-Methyl-adenosine
  modified_base 50: mod_base = OTHER; note = 2'-O-Methyl-uridine
  modified_base 52: mod_base = OTHER; note = 2'-O-Methyl-adenosine
  modified_base 53: mod_base = OTHER; note = 2'-O-Methyl-guanosine
  modified_base 54: mod_base = OTHER; note = 2'-O-Methyl-guanosine
  modified_base 57: mod_base = OTHER; note = 2'-O-Methyl-adenosine
  modified_base 61: mod_base = OTHER; note = 2'-O-Methyl-cytidine
  modified_base 66: mod_base = OTHER; note = 2'-O-Methyl-uridine
  modified_base 67: mod_base = OTHER; note = 2'-O-Methyl-cytidine
  modified_base 70: mod_base = OTHER; note = 2'-O-Methyl-cytidine
  modified_base 71: mod_base = OTHER; note = 2'-O-Methyl-uridine
  modified_base 72: mod_base = OTHER; note = 2'-O-Methyl-uridine
  modified_base 74: mod_base = OTHER; note = 2'-O-Methyl-adenosine
  modified_base 75: mod_base = OTHER; note = 2'-O-Methyl-adenosine
  modified_base 76: mod_base = OTHER; note = 2'-O-Methyl-adenosine
  modified_base 77: mod_base = OTHER; note = 2'-O-Methyl-adenosine
  modified_base 78: mod_base = OTHER; note = 2'-O-Methyl-adenosine
  modified_base 79: mod_base = OTHER; note = 2'-O-Methyl-guanosine
  modified_base 80: mod_base = OTHER; note = 2'-O-Methyl-uridine
  modified_base 82: mod_base = OTHER; note = 2'-O-Methyl-guanosine
  modified_base 83: mod_base = OTHER; note = 2'-O-Methyl-cytidine
  modified_base 84: mod_base = OTHER; note = 2'-O-Methyl-adenosine
  modified_base 85: mod_base = OTHER; note = 2'-O-Methyl-cytidine
  modified_base 86: mod_base = OTHER; note = 2'-O-Methyl-cytidine
  modified_base 87: mod_base = OTHER; note = 2'-O-Methyl-guanosine
  modified_base 89: mod_base = OTHER; note = 2'-O-Methyl-guanosine
  modified_base 92: mod_base = OTHER; note = 2'-O-Methyl-guanosine
  modified_base 93: mod_base = OTHER; note = 2'-O-Methyl-guanosine
  modified_base 94: mod_base = OTHER; note = 2'-O-Methyl-uridine
  modified_base 95: mod_base = OTHER; note = 2'-O-Methyl-guanosine
  modified_base 96: mod_base = OTHER; note = 2'-O-Methyl-cytidine
  modified_base 97: mod_base = OTHER; note = 2'-O-Methyl-uridine phosphorothioate
  modified_base 98: mod_base = OTHER; note = 2'-O-Methyl-uridine phosphorothioate
  modified_base 99: mod_base = OTHER; note = 2'-O-Methyl-uridine phosphorothioate
  modified_base 100: mod_base = OTHER; note = 2'-O-Methyl-uridine
  misc_difference 101: note = modified_base - a, c, u, g, unknown or other - a, c, g, inosine, u, deoxyadenosine, deoxyguanosine, deoxycytidine, deoxyinosine, thymine, ribonebularine, 2'-O-methylnebularine, or 2'-deoxynebularine
  misc_difference 102: note = modified_base - a, c, u, g, unknown or other - a, c, g, inosine, u, deoxyadenosine, deoxyguanosine, deoxycytidine, deoxyinosine, thymine, ribonebularine, 2'-O-methylnebularine, or 2'-deoxynebularine
  misc_difference 103: note = modified_base - a, c, u, g, unknown or other - a, c, g, inosine, u, deoxyadenosine, deoxyguanosine, deoxycytidine, deoxyinosine, thymine, ribonebularine, 2'-O-methylnebularine, or 2'-deoxynebularine

SEQ ID NO: 1813 - RNA, 103 nt, synthetic construct; identical to SEQ ID NO: 1797
  source 1..103: mol_type = other RNA; note = Description of Artificial Sequence: Synthetic polynucleotide
  modified_base 1: mod_base = OTHER; note = 2'-O-Methyl-cytidine phosphorothioate
  modified_base 2: mod_base = OTHER; note = 2'-O-Methyl-adenosine phosphorothioate
  modified_base 3: mod_base = OTHER; note = 2'-O-Methyl-guanosine phosphorothioate
  modified_base 21: mod_base = OTHER; note = 2'-O-Methyl-guanosine
  modified_base 25: mod_base = OTHER; note = uridine phosphorothioate
  modified_base 28: mod_base = OTHER; note = 2'-O-Methyl-adenosine
  modified_base 29: mod_base = OTHER; note = 2'-O-Methyl-guanosine
  modified_base 30: mod_base = OTHER; note = 2'-O-Methyl-cytidine
  modified_base 31: mod_base = OTHER; note = 2'-O-Methyl-uridine
  modified_base 32: mod_base = OTHER; note = 2'-O-Methyl-adenosine
  modified_base 34: mod_base = OTHER; note = 2'-O-Methyl-adenosine
  modified_base 35: mod_base = OTHER; note = 2'-O-Methyl-adenosine
  modified_base 36: mod_base = OTHER; note = 2'-O-Methyl-adenosine
  modified_base 37: mod_base = OTHER; note = 2'-O-Methyl-uridine
  modified_base 38: mod_base = OTHER; note = 2'-O-Methyl-adenosine
  modified_base 39: mod_base = OTHER; note = 2'-O-Methyl-guanosine
  modified_base 40: mod_base = OTHER; note = 2'-O-Methyl-cytidine
  modified_base 41: mod_base = OTHER; note = 2'-O-Methyl-adenosine
  modified_base 42: mod_base = OTHER; note = 2'-O-Methyl-adenosine
  modified_base 45: mod_base = OTHER; note = uridine phosphorothioate
  modified_base 46: mod_base = OTHER; note = 2'-O-Methyl-adenosine
  modified_base 48: mod_base = OTHER; note = 2'-O-Methyl-adenosine
  modified_base 50: mod_base = OTHER; note = 2'-O-Methyl-uridine
  modified_base 52: mod_base = OTHER; note = 2'-O-Methyl-adenosine
  modified_base 53: mod_base = OTHER; note = 2'-O-Methyl-guanosine
  modified_base 54: mod_base = OTHER; note = 2'-O-Methyl-guanosine
  modified_base 55: mod_base = OTHER; note = 2'-O-Methyl-cytidine
  modified_base 56: mod_base = OTHER; note = 2'-O-Methyl-uridine
  modified_base 57: mod_base = OTHER; note = 2'-O-Methyl-adenosine
  modified_base 60: mod_base = OTHER; note = 2'-O-Methyl-cytidine
  modified_base 61: mod_base = OTHER; note = 2'-O-Methyl-cytidine
  modified_base 66: mod_base = OTHER; note = 2'-O-Methyl-uridine
  modified_base 67: mod_base = OTHER; note = 2'-O-Methyl-cytidine
  modified_base 70: mod_base = OTHER; note = 2'-O-Methyl-cytidine
  modified_base 71: mod_base = OTHER; note = 2'-O-Methyl-uridine
  modified_base 72: mod_base = OTHER; note = 2'-O-Methyl-uridine
  modified_base 74: mod_base = OTHER; note = 2'-O-Methyl-adenosine
  modified_base 75: mod_base = OTHER; note = 2'-O-Methyl-adenosine
  modified_base 76: mod_base = OTHER; note = 2'-O-Methyl-adenosine
  modified_base 77: mod_base = OTHER; note = 2'-O-Methyl-adenosine
  modified_base 78: mod_base = OTHER; note = 2'-O-Methyl-adenosine
  modified_base 79: mod_base = OTHER; note = 2'-O-Methyl-guanosine
  modified_base 80: mod_base = OTHER; note = 2'-O-Methyl-uridine
  modified_base 81: mod_base = OTHER; note = 2'-O-Methyl-guanosine
  modified_base 83: mod_base = OTHER; note = 2'-O-Methyl-cytidine
  modified_base 84: mod_base = OTHER; note = 2'-O-Methyl-adenosine
  modified_base 85: mod_base = OTHER; note = 2'-O-Methyl-cytidine
  modified_base 86: mod_base = OTHER; note = 2'-O-Methyl-cytidine
  modified_base 87: mod_base = OTHER; note = 2'-O-Methyl-guanosine
  modified_base 88: mod_base = OTHER; note = 2'-O-Methyl-adenosine
  modified_base 89: mod_base = OTHER; note = 2'-O-Methyl-guanosine
  modified_base 90: mod_base = OTHER; note = 2'-O-Methyl-uridine
  modified_base 91: mod_base = OTHER; note = 2'-O-Methyl-cytidine
  modified_base 92: mod_base = OTHER; note = 2'-O-Methyl-guanosine
  modified_base 93: mod_base = OTHER; note = 2'-O-Methyl-guanosine
  modified_base 94: mod_base = OTHER; note = 2'-O-Methyl-uridine
  modified_base 95: mod_base = OTHER; note = 2'-O-Methyl-guanosine
  modified_base 96: mod_base = OTHER; note = 2'-O-Methyl-cytidine
  modified_base 97: mod_base = OTHER; note = 2'-O-Methyl-uridine phosphorothioate
  modified_base 98: mod_base = OTHER; note = 2'-O-Methyl-uridine phosphorothioate
  modified_base 99: mod_base = OTHER; note = 2'-O-Methyl-uridine phosphorothioate
  modified_base 100: mod_base = OTHER; note = 2'-O-Methyl-uridine
  misc_difference 101: note = modified_base - a, c, u, g, unknown or other - a, c, g, inosine, u, deoxyadenosine, deoxyguanosine, deoxycytidine, deoxyinosine, thymine, ribonebularine, 2'-O-methylnebularine, or 2'-deoxynebularine
  misc_difference 102: note = modified_base - a, c, u, g, unknown or other - a, c, g, inosine, u, deoxyadenosine, deoxyguanosine, deoxycytidine, deoxyinosine, thymine, ribonebularine, 2'-O-methylnebularine, or 2'-deoxynebularine
  misc_difference 103: note = modified_base - a, c, u, g, unknown or other - a, c, g, inosine, u, deoxyadenosine, deoxyguanosine, deoxycytidine, deoxyinosine, thymine, ribonebularine, 2'-O-methylnebularine, or 2'-deoxynebularine

SEQ ID NO: 1814 - RNA, 103 nt, synthetic construct; identical to SEQ ID NO: 1797
  source 1..103: mol_type = other RNA; note = Description of Artificial Sequence: Synthetic polynucleotide
  modified_base 1: mod_base = OTHER; note = 2'-O-Methyl-cytidine phosphorothioate
  modified_base 2: mod_base = OTHER; note = 2'-O-Methyl-adenosine phosphorothioate
  modified_base 3: mod_base = OTHER; note = 2'-O-Methyl-guanosine phosphorothioate
  modified_base 21: mod_base = OTHER; note = 2'-O-Methyl-guanosine
  modified_base 25: mod_base = OTHER; note = uridine phosphorothioate
  modified_base 28: mod_base = OTHER; note = 2'-O-Methyl-adenosine
  modified_base 29: mod_base = OTHER; note = 2'-O-Methyl-guanosine
  modified_base 30: mod_base = OTHER; note = 2'-O-Methyl-cytidine
  modified_base 31: mod_base = OTHER; note = 2'-O-Methyl-uridine
  modified_base 32: mod_base = OTHER; note = 2'-O-Methyl-adenosine
  modified_base 33: mod_base = OTHER; note = 2'-O-Methyl-guanosine
  modified_base 34: mod_base = OTHER; note = 2'-O-Methyl-adenosine
  modified_base 35: mod_base = OTHER; note = 2'-O-Methyl-adenosine
  modified_base 36: mod_base = OTHER; note = 2'-O-Methyl-adenosine
  modified_base 37: mod_base = OTHER; note = 2'-O-Methyl-uridine
  modified_base 38: mod_base = OTHER; note = 2'-O-Methyl-adenosine
  modified_base 39: mod_base = OTHER; note = 2'-O-Methyl-guanosine
  modified_base 40: mod_base = OTHER; note = 2'-O-Methyl-cytidine
  modified_base 41: mod_base = OTHER; note = 2'-O-Methyl-adenosine
  modified_base 42: mod_base = OTHER; note = 2'-O-Methyl-adenosine
  modified_base 45: mod_base = OTHER; note = uridine phosphorothioate
  modified_base 46: mod_base = OTHER; note = 2'-O-Methyl-adenosine
  modified_base 48: mod_base = OTHER; note = 2'-O-Methyl-adenosine
  modified_base 50: mod_base = OTHER; note = 2'-O-Methyl-uridine
  modified_base 52: mod_base = OTHER; note = 2'-O-Methyl-adenosine
  modified_base 53: mod_base = OTHER; note = 2'-O-Methyl-guanosine
  modified_base 54: mod_base = OTHER; note = 2'-O-Methyl-guanosine
  modified_base 55: mod_base = OTHER; note = 2'-O-Methyl-cytidine
  modified_base 56: mod_base = OTHER; note = 2'-O-Methyl-uridine
  modified_base 57: mod_base = OTHER; note = 2'-O-Methyl-adenosine
  modified_base 60: mod_base = OTHER; note = 2'-O-Methyl-cytidine
  modified_base 61: mod_base = OTHER; note = 2'-O-Methyl-cytidine
  modified_base 66: mod_base = OTHER; note = 2'-O-Methyl-uridine
  modified_base 67: mod_base = OTHER; note = 2'-O-Methyl-cytidine
  modified_base 70: mod_base = OTHER; note = 2'-O-Methyl-cytidine
  modified_base 71: mod_base = OTHER; note = 2'-O-Methyl-uridine
  modified_base 72: mod_base = OTHER; note = 2'-O-Methyl-uridine
  modified_base 74: mod_base = OTHER; note = 2'-O-Methyl-adenosine
  modified_base 75: mod_base = OTHER; note = 2'-O-Methyl-adenosine
  modified_base 76: mod_base = OTHER; note = 2'-O-Methyl-adenosine
  modified_base 77: mod_base = OTHER; note = 2'-O-Methyl-adenosine
  modified_base 78: mod_base = OTHER; note = 2'-O-Methyl-adenosine
  modified_base 79: mod_base = OTHER; note = 2'-O-Methyl-guanosine
  modified_base 80: mod_base = OTHER; note = 2'-O-Methyl-uridine
  modified_base 82: mod_base = OTHER; note = 2'-O-Methyl-guanosine
  modified_base 83: mod_base = OTHER; note = 2'-O-Methyl-cytidine
  modified_base 84: mod_base = OTHER; note = 2'-O-Methyl-adenosine
  modified_base 85: mod_base = OTHER; note = 2'-O-Methyl-cytidine
  modified_base 86: mod_base = OTHER; note = 2'-O-Methyl-cytidine
  modified_base 87: mod_base = OTHER; note = 2'-O-Methyl-guanosine
  modified_base 89: mod_base = OTHER; note = 2'-O-Methyl-guanosine
  modified_base 92: mod_base = OTHER; note = 2'-O-Methyl-guanosine
  modified_base 93: mod_base = OTHER; note = 2'-O-Methyl-guanosine
  modified_base 94: mod_base = OTHER; note = 2'-O-Methyl-uridine
  modified_base 95: mod_base = OTHER; note = 2'-O-Methyl-guanosine
  modified_base 96: mod_base = OTHER; note = 2'-O-Methyl-cytidine
  modified_base 97: mod_base = OTHER; note = 2'-O-Methyl-uridine phosphorothioate
  modified_base 98: mod_base = OTHER; note = 2'-O-Methyl-uridine phosphorothioate
  modified_base 99: mod_base = OTHER; note = 2'-O-Methyl-uridine phosphorothioate
  modified_base 100: mod_base = OTHER; note = 2'-O-Methyl-uridine
  misc_difference 101: note = modified_base - a, c, u, g, unknown or other - a, c, g, inosine, u, deoxyadenosine, deoxyguanosine, deoxycytidine, deoxyinosine, thymine, ribonebularine, 2'-O-methylnebularine, or 2'-deoxynebularine
  misc_difference 102: note = modified_base - a, c, u, g, unknown or other - a, c, g, inosine, u, deoxyadenosine, deoxyguanosine, deoxycytidine, deoxyinosine, thymine, ribonebularine, 2'-O-methylnebularine, or 2'-deoxynebularine
  misc_difference 103: note = modified_base - a, c, u, g, unknown or other - a, c, g, inosine, u, deoxyadenosine, deoxyguanosine, deoxycytidine, deoxyinosine, thymine, ribonebularine, 2'-O-methylnebularine, or 2'-deoxynebularine

SEQ ID NO: 1815 - RNA, 103 nt, synthetic construct; identical to SEQ ID NO: 1795
  source 1..103: mol_type = other RNA; note = Description of Artificial Sequence: Synthetic polynucleotide
  modified_base 1: mod_base = OTHER; note = 2'-O-Methyl-cytidine phosphorothioate
  modified_base 2: mod_base = OTHER; note = 2'-O-Methyl-cytidine phosphorothioate
  modified_base 3: mod_base = OTHER; note = 2'-O-Methyl-cytidine phosphorothioate
  modified_base 21: mod_base = OTHER; note = 2'-O-Methyl-guanosine
  modified_base 25: mod_base = OTHER; note = uridine phosphorothioate
  modified_base 28: mod_base = OTHER; note = 2'-O-Methyl-adenosine
  modified_base 29: mod_base = OTHER; note = 2'-O-Methyl-guanosine
  modified_base 30: mod_base = OTHER; note = 2'-O-Methyl-cytidine
  modified_base 31: mod_base = OTHER; note = 2'-O-Methyl-uridine
  modified_base 32: mod_base = OTHER; note = 2'-O-Methyl-adenosine
  modified_base 34: mod_base = OTHER; note = 2'-O-Methyl-adenosine
  modified_base 35: mod_base = OTHER; note = 2'-O-Methyl-adenosine
  modified_base 36: mod_base = OTHER; note = 2'-O-Methyl-adenosine
  modified_base 37: mod_base = OTHER; note = 2'-O-Methyl-uridine
  modified_base 38: mod_base = OTHER; note = 2'-O-Methyl-adenosine
  modified_base 39: mod_base = OTHER; note = 2'-O-Methyl-guanosine
  modified_base 40: mod_base = OTHER; note = 2'-O-Methyl-cytidine
  modified_base 41: mod_base = OTHER; note = 2'-O-Methyl-adenosine
  modified_base 42: mod_base = OTHER; note = 2'-O-Methyl-adenosine
  modified_base 46: mod_base = OTHER; note = 2'-O-Methyl-adenosine
  modified_base 48: mod_base = OTHER; note = 2'-O-Methyl-adenosine
  modified_base 50: mod_base = OTHER; note = 2'-O-Methyl-uridine
  modified_base 52: mod_base = OTHER; note = 2'-O-Methyl-adenosine
  modified_base 53: mod_base = OTHER; note = 2'-O-Methyl-guanosine
  modified_base 54: mod_base = OTHER; note = 2'-O-Methyl-guanosine
  modified_base 57: mod_base = OTHER; note = 2'-O-Methyl-adenosine
  modified_base 61: mod_base = OTHER; note = 2'-O-Methyl-cytidine
  modified_base 64: mod_base = OTHER; note = uridine phosphorothioate
  modified_base 66: mod_base = OTHER; note = 2'-O-Methyl-uridine
  modified_base 67: mod_base = OTHER; note = 2'-O-Methyl-cytidine
  modified_base 70: mod_base = OTHER; note = 2'-O-Methyl-cytidine
  modified_base 71: mod_base = OTHER; note = 2'-O-Methyl-uridine
  modified_base 72: mod_base = OTHER; note = 2'-O-Methyl-uridine
  modified_base 74: mod_base = OTHER; note = 2'-O-Methyl-adenosine
  modified_base 75: mod_base = OTHER; note = 2'-O-Methyl-adenosine
  modified_base 76: mod_base = OTHER; note = 2'-O-Methyl-adenosine
  modified_base 77: mod_base = OTHER; note = 2'-O-Methyl-adenosine
  modified_base 78: mod_base = OTHER; note = 2'-O-Methyl-adenosine
  modified_base 79: mod_base = OTHER; note = 2'-O-Methyl-guanosine
  modified_base 80: mod_base = OTHER; note = 2'-O-Methyl-uridine
  modified_base 82: mod_base = OTHER; note = 2'-O-Methyl-guanosine
  modified_base 83: mod_base = OTHER; note = 2'-O-Methyl-cytidine
  modified_base 84: mod_base = OTHER; note = 2'-O-Methyl-adenosine
  modified_base 85: mod_base = OTHER; note = 2'-O-Methyl-cytidine
  modified_base 86: mod_base = OTHER; note = 2'-O-Methyl-cytidine
  modified_base 87: mod_base = OTHER; note = 2'-O-Methyl-guanosine
  modified_base 89: mod_base = OTHER; note = 2'-O-Methyl-guanosine
  modified_base 92: mod_base = OTHER; note = 2'-O-Methyl-guanosine
  modified_base 93: mod_base = OTHER; note = 2'-O-Methyl-guanosine
  modified_base 94: mod_base = OTHER; note = 2'-O-Methyl-uridine
  modified_base 95: mod_base = OTHER; note = 2'-O-Methyl-guanosine
  modified_base 96: mod_base = OTHER; note = 2'-O-Methyl-cytidine
  modified_base 97: mod_base = OTHER; note = 2'-O-Methyl-uridine phosphorothioate
  modified_base 98: mod_base = OTHER; note = 2'-O-Methyl-uridine phosphorothioate
  modified_base 99: mod_base = OTHER; note = 2'-O-Methyl-uridine phosphorothioate
  modified_base 100: mod_base = OTHER; note = 2'-O-Methyl-uridine
  misc_difference 101: note = modified_base - a, c, u, g, unknown or other - a, c, g, inosine, u, deoxyadenosine, deoxyguanosine, deoxycytidine, deoxyinosine, thymine, ribonebularine, 2'-O-methylnebularine, or 2'-deoxynebularine
  misc_difference 102: note = modified_base - a, c, u, g, unknown or other - a, c, g, inosine, u, deoxyadenosine, deoxyguanosine, deoxycytidine, deoxyinosine, thymine, ribonebularine, 2'-O-methylnebularine, or 2'-deoxynebularine
  misc_difference 103: note = modified_base - a, c, u, g, unknown or other - a, c, g, inosine, u, deoxyadenosine, deoxyguanosine, deoxycytidine, deoxyinosine, thymine, ribonebularine, 2'-O-methylnebularine, or 2'-deoxynebularine

SEQ ID NO: 1816 - RNA, 103 nt, synthetic construct; identical to SEQ ID NO: 1796
  source 1..103: mol_type = other RNA; note = Description of Artificial Sequence: Synthetic polynucleotide
  modified_base 1: mod_base = OTHER; note = 2'-O-Methyl-guanosine phosphorothioate
  modified_base 2: mod_base = OTHER; note = 2'-O-Methyl-adenosine phosphorothioate
  modified_base 3: mod_base = OTHER; note = 2'-O-Methyl-guanosine phosphorothioate
  modified_base 21: mod_base = OTHER; note = 2'-O-Methyl-guanosine
  modified_base 25: mod_base = OTHER; note = uridine phosphorothioate
  modified_base 28: mod_base = OTHER; note = 2'-O-Methyl-adenosine
  modified_base 29: mod_base = OTHER; note = 2'-O-Methyl-guanosine
  modified_base 30: mod_base = OTHER; note = 2'-O-Methyl-cytidine
  modified_base 31: mod_base = OTHER; note = 2'-O-Methyl-uridine
  modified_base 32: mod_base = OTHER; note = 2'-O-Methyl-adenosine
  modified_base 34: mod_base = OTHER; note = 2'-O-Methyl-adenosine
  modified_base 35: mod_base = OTHER; note = 2'-O-Methyl-adenosine
  modified_base 36: mod_base = OTHER; note = 2'-O-Methyl-adenosine
  modified_base 37: mod_base = OTHER; note = 2'-O-Methyl-uridine
  modified_base 38: mod_base = OTHER; note = 2'-O-Methyl-adenosine
  modified_base 39: mod_base = OTHER; note = 2'-O-Methyl-guanosine
  modified_base 40: mod_base = OTHER; note = 2'-O-Methyl-cytidine
  modified_base 41: mod_base = OTHER; note = 2'-O-Methyl-adenosine
  modified_base 42: mod_base = OTHER; note = 2'-O-Methyl-adenosine
  modified_base 46: mod_base = OTHER; note = 2'-O-Methyl-adenosine
  modified_base 48: mod_base = OTHER; note = 2'-O-Methyl-adenosine
  modified_base 50: mod_base = OTHER; note = 2'-O-Methyl-uridine
  modified_base 52: mod_base = OTHER; note = 2'-O-Methyl-adenosine
  modified_base 53: mod_base = OTHER; note = 2'-O-Methyl-guanosine
  modified_base 54: mod_base = OTHER; note = 2'-O-Methyl-guanosine
  modified_base 57: mod_base = OTHER; note = 2'-O-Methyl-adenosine
  modified_base 61: mod_base = OTHER; note = 2'-O-Methyl-cytidine
  modified_base 64: mod_base = OTHER; note = uridine phosphorothioate
  modified_base 66: mod_base = OTHER; note = 2'-O-Methyl-uridine
  modified_base 67: mod_base = OTHER; note = 2'-O-Methyl-cytidine
  modified_base 70: mod_base = OTHER; note = 2'-O-Methyl-cytidine
  modified_base 71: mod_base = OTHER; note = 2'-O-Methyl-uridine
  modified_base 72: mod_base = OTHER; note = 2'-O-Methyl-uridine
  modified_base 74: mod_base = OTHER; note = 2'-O-Methyl-adenosine
  modified_base 75: mod_base = OTHER; note = 2'-O-Methyl-adenosine
  modified_base 76: mod_base = OTHER; note = 2'-O-Methyl-adenosine
  modified_base 77: mod_base = OTHER; note = 2'-O-Methyl-adenosine
  modified_base 78: mod_base = OTHER; note = 2'-O-Methyl-adenosine
  modified_base 79: mod_base = OTHER; note = 2'-O-Methyl-guanosine
  modified_base 80: mod_base = OTHER; note = 2'-O-Methyl-uridine
  modified_base 82: mod_base = OTHER; note = 2'-O-Methyl-guanosine
  modified_base 83: mod_base = OTHER; note = 2'-O-Methyl-cytidine
  modified_base 84: mod_base = OTHER; note = 2'-O-Methyl-adenosine
  modified_base 85: mod_base = OTHER; note = 2'-O-Methyl-cytidine
  modified_base 86: mod_base = OTHER; note = 2'-O-Methyl-cytidine
  modified_base 87: mod_base = OTHER; note = 2'-O-Methyl-guanosine
  modified_base 89: mod_base = OTHER; note = 2'-O-Methyl-guanosine
  modified_base 92: mod_base = OTHER; note = 2'-O-Methyl-guanosine
  modified_base 93: mod_base = OTHER; note = 2'-O-Methyl-guanosine
  modified_base 94: mod_base = OTHER; note = 2'-O-Methyl-uridine
  modified_base 95: mod_base = OTHER; note = 2'-O-Methyl-guanosine
  modified_base 96: mod_base = OTHER; note = 2'-O-Methyl-cytidine
  modified_base 97: mod_base = OTHER; note = 2'-O-Methyl-uridine phosphorothioate
  modified_base 98: mod_base = OTHER; note = 2'-O-Methyl-uridine phosphorothioate
  modified_base 99: mod_base = OTHER; note = 2'-O-Methyl-uridine phosphorothioate
  modified_base 100: mod_base = OTHER; note = 2'-O-Methyl-uridine
  misc_difference 101: note = modified_base - a, c, u, g, unknown or other - a, c, g, inosine, u, deoxyadenosine, deoxyguanosine, deoxycytidine, deoxyinosine, thymine, ribonebularine, 2'-O-methylnebularine, or 2'-deoxynebularine
  misc_difference 102: note = modified_base - a, c, u, g, unknown or other - a, c, g, inosine, u, deoxyadenosine, deoxyguanosine, deoxycytidine, deoxyinosine, thymine, ribonebularine, 2'-O-methylnebularine, or 2'-deoxynebularine
  misc_difference 103: note = modified_base - a, c, u, g, unknown or other - a, c, g, inosine, u, deoxyadenosine, deoxyguanosine, deoxycytidine, deoxyinosine, thymine, ribonebularine, 2'-O-methylnebularine, or 2'-deoxynebularine

SEQ ID NO: 1817 - RNA, 103 nt, synthetic construct; identical to SEQ ID NO: 1797
  source 1..103: mol_type = other RNA; note = Description of Artificial Sequence: Synthetic polynucleotide
  modified_base 1: mod_base = OTHER; note = 2'-O-Methyl-cytidine phosphorothioate
  modified_base 2: mod_base = OTHER; note = 2'-O-Methyl-adenosine phosphorothioate
  modified_base 3: mod_base = OTHER; note = 2'-O-Methyl-guanosine phosphorothioate
  modified_base 21: mod_base = OTHER; note = 2'-O-Methyl-guanosine
  modified_base 25: mod_base = OTHER; note = uridine phosphorothioate
  modified_base 28: mod_base = OTHER; note = 2'-O-Methyl-adenosine
  modified_base 29: mod_base = OTHER; note = 2'-O-Methyl-guanosine
  modified_base 30: mod_base = OTHER; note = 2'-O-Methyl-cytidine
  modified_base 31: mod_base = OTHER; note = 2'-O-Methyl-uridine
  modified_base 32: mod_base = OTHER; note = 2'-O-Methyl-adenosine
  modified_base 34: mod_base = OTHER; note = 2'-O-Methyl-adenosine
  modified_base 35: mod_base = OTHER; note = 2'-O-Methyl-adenosine
  modified_base 36: mod_base = OTHER; note = 2'-O-Methyl-adenosine
  modified_base 37: mod_base = OTHER; note = 2'-O-Methyl-uridine
  modified_base 38: mod_base = OTHER; note = 2'-O-Methyl-adenosine
  modified_base 39: mod_base = OTHER; note = 2'-O-Methyl-guanosine
  modified_base 40: mod_base = OTHER; note = 2'-O-Methyl-cytidine
  modified_base 41: mod_base = OTHER; note = 2'-O-Methyl-adenosine
  modified_base 42: mod_base = OTHER; note = 2'-O-Methyl-adenosine
  modified_base 46: mod_base = OTHER; note = 2'-O-Methyl-adenosine
  modified_base 48: mod_base = OTHER; note = 2'-O-Methyl-adenosine
  modified_base 50: mod_base = OTHER; note = 2'-O-Methyl-uridine
  modified_base 52: mod_base = OTHER; note = 2'-O-Methyl-adenosine
  modified_base 53: mod_base = OTHER; note = 2'-O-Methyl-guanosine
  modified_base 54: mod_base = OTHER; note = 2'-O-Methyl-guanosine
  modified_base 55: mod_base = OTHER; note = 2'-O-Methyl-cytidine
  modified_base 56: mod_base = OTHER; note = 2'-O-Methyl-uridine
  modified_base 57: mod_base = OTHER; note = 2'-O-Methyl-adenosine
  modified_base 60: mod_base = OTHER; note = 2'-O-Methyl-cytidine
  modified_base 61: mod_base = OTHER; note = 2'-O-Methyl-cytidine
  modified_base 64: mod_base = OTHER; note = uridine phosphorothioate
  modified_base 66: mod_base = OTHER; note = 2'-O-Methyl-uridine
  modified_base 67: mod_base = OTHER; note = 2'-O-Methyl-cytidine
  modified_base 70: mod_base = OTHER; note = 2'-O-Methyl-cytidine
  modified_base 71: mod_base = OTHER; note = 2'-O-Methyl-uridine
  modified_base 72: mod_base = OTHER; note = 2'-O-Methyl-uridine
  modified_base 74: mod_base = OTHER; note = 2'-O-Methyl-adenosine
  modified_base 75: mod_base = OTHER; note = 2'-O-Methyl-adenosine
  modified_base 76: mod_base = OTHER; note = 2'-O-Methyl-adenosine
  modified_base 77: mod_base = OTHER; note = 2'-O-Methyl-adenosine
  modified_base 78: mod_base = OTHER; note = 2'-O-Methyl-adenosine
  modified_base 79: mod_base = OTHER; note = 2'-O-Methyl-guanosine
  modified_base 80: mod_base = OTHER; note = 2'-O-Methyl-uridine
  modified_base 81: mod_base = OTHER; note = 2'-O-Methyl-guanosine
  modified_base 83: mod_base = OTHER; note = 2'-O-Methyl-cytidine
  modified_base 84: mod_base = OTHER; note = 2'-O-Methyl-adenosine
  modified_base 85: mod_base = OTHER; note = 2'-O-Methyl-cytidine
  modified_base 86: mod_base = OTHER; note = 2'-O-Methyl-cytidine
  modified_base 87: mod_base = OTHER; note = 2'-O-Methyl-guanosine
  modified_base 88: mod_base = OTHER; note = 2'-O-Methyl-adenosine
  modified_base 89: mod_base = OTHER; note = 2'-O-Methyl-guanosine
  modified_base 90: mod_base = OTHER; note = 2'-O-Methyl-uridine
  modified_base 91: mod_base = OTHER; note = 2'-O-Methyl-cytidine
  modified_base 92: mod_base = OTHER; note = 2'-O-Methyl-guanosine
  modified_base 93: mod_base = OTHER; note = 2'-O-Methyl-guanosine
  modified_base 94: mod_base = OTHER; note = 2'-O-Methyl-uridine
  modified_base 95: mod_base = OTHER; note = 2'-O-Methyl-guanosine
  modified_base 96: mod_base = OTHER; note = 2'-O-Methyl-cytidine
  modified_base 97: mod_base = OTHER; note = 2'-O-Methyl-uridine phosphorothioate
  modified_base 98: mod_base = OTHER; note = 2'-O-Methyl-uridine phosphorothioate
  modified_base 99: mod_base = OTHER; note = 2'-O-Methyl-uridine phosphorothioate
  modified_base 100: mod_base = OTHER; note = 2'-O-Methyl-uridine
  misc_difference 101: note = modified_base - a, c, u, g, unknown or other - a, c, g, inosine, u, deoxyadenosine, deoxyguanosine, deoxycytidine, deoxyinosine, thymine, ribonebularine, 2'-O-methylnebularine, or 2'-deoxynebularine
  misc_difference 102: note = modified_base - a, c, u, g, unknown or other - a, c, g, inosine, u, deoxyadenosine, deoxyguanosine, deoxycytidine, deoxyinosine, thymine, ribonebularine, 2'-O-methylnebularine, or 2'-deoxynebularine
  misc_difference 103: note = modified_base - a, c, u, g, unknown or other - a, c, g, inosine, u, deoxyadenosine, deoxyguanosine, deoxycytidine, deoxyinosine, thymine, ribonebularine, 2'-O-methylnebularine, or 2'-deoxynebularine

SEQ ID NO: 1818 - RNA, 103 nt, synthetic construct; identical to SEQ ID NO: 1795
  source 1..103: mol_type = other RNA; note = Description of Artificial Sequence: Synthetic polynucleotide
  modified_base 1: mod_base = OTHER; note = 2'-O-Methyl-cytidine phosphorothioate
  modified_base 2: mod_base = OTHER; note = 2'-O-Methyl-cytidine phosphorothioate
  modified_base 3: mod_base = OTHER; note = 2'-O-Methyl-cytidine phosphorothioate
  modified_base 21: mod_base = OTHER; note = 2'-O-Methyl-guanosine
  modified_base 25: mod_base = OTHER; note = uridine phosphorothioate
  modified_base 28: mod_base = OTHER; note = 2'-O-Methyl-adenosine
  modified_base 29: mod_base = OTHER; note = 2'-O-Methyl-guanosine
  modified_base 30: mod_base = OTHER; note = 2'-O-Methyl-cytidine
  modified_base 31: mod_base = OTHER; note = 2'-O-Methyl-uridine
  modified_base 32: mod_base = OTHER; note = 2'-O-Methyl-adenosine
  modified_base 34: mod_base = OTHER; note = 2'-O-Methyl-adenosine
  modified_base 35: mod_base = OTHER; note = 2'-O-Methyl-adenosine
  modified_base 36: mod_base = OTHER; note = 2'-O-Methyl-adenosine
  modified_base 37: mod_base = OTHER; note = 2'-O-Methyl-uridine
  modified_base 38: mod_base = OTHER; note = 2'-O-Methyl-adenosine
  modified_base 39: mod_base = OTHER; note = 2'-O-Methyl-guanosine
  modified_base 40: mod_base = OTHER; note = 2'-O-Methyl-cytidine
  modified_base 41: mod_base = OTHER; note = 2'-O-Methyl-adenosine
  modified_base 42: mod_base = OTHER; note = 2'-O-Methyl-adenosine
  modified_base 45: mod_base = OTHER; note = uridine phosphorothioate
  modified_base 46: mod_base = OTHER; note = 2'-O-Methyl-adenosine
  modified_base 48: mod_base = OTHER; note = 2'-O-Methyl-adenosine
  modified_base 50: mod_base = OTHER; note = 2'-O-Methyl-uridine
  modified_base 52: mod_base = OTHER; note = 2'-O-Methyl-adenosine
  modified_base 53: mod_base = OTHER; note = 2'-O-Methyl-guanosine
  modified_base 54: mod_base = OTHER; note = 2'-O-Methyl-guanosine
  modified_base 57: mod_base = OTHER; note = 2'-O-Methyl-adenosine
  modified_base 61: mod_base = OTHER; note = 2'-O-Methyl-cytidine
  modified_base 64: mod_base = OTHER; note = uridine phosphorothioate
  modified_base 66: mod_base = OTHER; note = 2'-O-Methyl-uridine
  modified_base 67: mod_base = OTHER; note = 2'-O-Methyl-cytidine
  modified_base 70: mod_base = OTHER; note = 2'-O-Methyl-cytidine
  modified_base 71: mod_base = OTHER; note = 2'-O-Methyl-uridine
  modified_base 72: mod_base = OTHER; note = 2'-O-Methyl-uridine
  modified_base 74: mod_base = OTHER; note = 2'-O-Methyl-adenosine
  modified_base 75: mod_base = OTHER; note = 2'-O-Methyl-adenosine
  modified_base 76: mod_base = OTHER; note = 2'-O-Methyl-adenosine
  modified_base 77: mod_base = OTHER; note = 2'-O-Methyl-adenosine
  modified_base 78: mod_base = OTHER; note = 2'-O-Methyl-adenosine
  modified_base 79: mod_base = OTHER; note = 2'-O-Methyl-guanosine
  modified_base 80: mod_base = OTHER; note = 2'-O-Methyl-uridine
  modified_base 82: mod_base = OTHER; note = 2'-O-Methyl-guanosine
  modified_base 83: mod_base = OTHER; note = 2'-O-Methyl-cytidine
  modified_base 84: mod_base = OTHER; note = 2'-O-Methyl-adenosine
  modified_base 85: mod_base = OTHER; note = 2'-O-Methyl-cytidine
  modified_base 86: mod_base = OTHER; note = 2'-O-Methyl-cytidine
  modified_base 87: mod_base = OTHER; note = 2'-O-Methyl-guanosine
  modified_base 89: mod_base = OTHER; note = 2'-O-Methyl-guanosine
  modified_base 92: mod_base = OTHER; note = 2'-O-Methyl-guanosine
  modified_base 93: mod_base = OTHER; note = 2'-O-Methyl-guanosine
  modified_base 94: mod_base = OTHER; note = 2'-O-Methyl-uridine
  modified_base 95: mod_base = OTHER; note = 2'-O-Methyl-guanosine
  modified_base 96: mod_base = OTHER; note = 2'-O-Methyl-cytidine
  modified_base 97: mod_base = OTHER; note = 2'-O-Methyl-uridine phosphorothioate
  modified_base 98: mod_base = OTHER; note = 2'-O-Methyl-uridine phosphorothioate
  modified_base 99: mod_base = OTHER; note = 2'-O-Methyl-uridine phosphorothioate
  modified_base 100: mod_base = OTHER; note = 2'-O-Methyl-uridine
  misc_difference 101: note = modified_base - a, c, u, g, unknown or other - a, c, g, inosine, u, deoxyadenosine, deoxyguanosine, deoxycytidine, deoxyinosine, thymine, ribonebularine, 2'-O-methylnebularine, or 2'-deoxynebularine
  misc_difference 102: note = modified_base - a, c, u, g, unknown or other - a, c, g, inosine, u, deoxyadenosine, deoxyguanosine, deoxycytidine, deoxyinosine, thymine, ribonebularine, 2'-O-methylnebularine, or 2'-deoxynebularine
  misc_difference 103: note = modified_base - a, c, u, g, unknown or other - a, c, g, inosine, u, deoxyadenosine, deoxyguanosine, deoxycytidine, deoxyinosine, thymine, ribonebularine, 2'-O-methylnebularine, or 2'-deoxynebularine

SEQ ID NO: 1819 - RNA, 103 nt, synthetic construct; identical to SEQ ID NO: 1796
  source 1..103: mol_type = other RNA; note = Description of Artificial Sequence: Synthetic polynucleotide
  modified_base 1: mod_base = OTHER; note = 2'-O-Methyl-guanosine phosphorothioate
  modified_base 2: mod_base = OTHER; note = 2'-O-Methyl-adenosine phosphorothioate
  modified_base 3: mod_base = OTHER; note = 2'-O-Methyl-guanosine phosphorothioate
  modified_base 21: mod_base = OTHER; note = 2'-O-Methyl-guanosine
  modified_base 25: mod_base = OTHER; note = uridine phosphorothioate
  modified_base 28: mod_base = OTHER; note = 2'-O-Methyl-adenosine
  modified_base 29: mod_base = OTHER; note = 2'-O-Methyl-guanosine
  modified_base 30: mod_base = OTHER; note = 2'-O-Methyl-cytidine
  modified_base 31: mod_base = OTHER; note = 2'-O-Methyl-uridine
  modified_base 32: mod_base = OTHER; note = 2'-O-Methyl-adenosine
  modified_base 34: mod_base = OTHER; note = 2'-O-Methyl-adenosine
  modified_base 35: mod_base = OTHER; note = 2'-O-Methyl-adenosine
  modified_base 36: mod_base = OTHER; note = 2'-O-Methyl-adenosine
  modified_base 37: mod_base = OTHER; note = 2'-O-Methyl-uridine
  modified_base 38: mod_base = OTHER; note = 2'-O-Methyl-adenosine
  modified_base 39: mod_base = OTHER; note = 2'-O-Methyl-guanosine
  modified_base 40: mod_base = OTHER; note = 2'-O-Methyl-cytidine
  modified_base 41: mod_base = OTHER; note = 2'-O-Methyl-adenosine
  modified_base 42: mod_base = OTHER; note = 2'-O-Methyl-adenosine
  modified_base 45: mod_base = OTHER; note = uridine phosphorothioate
  modified_base 46: mod_base = OTHER; note = 2'-O-Methyl-adenosine
  modified_base 48: mod_base = OTHER; note = 2'-O-Methyl-adenosine
  modified_base 50: mod_base = OTHER; note = 2'-O-Methyl-uridine
  modified_base 52: mod_base = OTHER; note = 2'-O-Methyl-adenosine
  modified_base 53: mod_base = OTHER; note = 2'-O-Methyl-guanosine
  modified_base 54: mod_base = OTHER; note = 2'-O-Methyl-guanosine
  modified_base 57: mod_base = OTHER; note = 2'-O-Methyl-adenosine
  modified_base 61: mod_base = OTHER; note = 2'-O-Methyl-cytidine
  modified_base 64: mod_base = OTHER; note = uridine phosphorothioate
  modified_base 66: mod_base = OTHER; note = 2'-O-Methyl-uridine
  modified_base 67: mod_base = OTHER; note = 2'-O-Methyl-cytidine
  modified_base 70: mod_base = OTHER; note = 2'-O-Methyl-cytidine
  modified_base 71: mod_base = OTHER; note = 2'-O-Methyl-uridine
  modified_base 72: mod_base = OTHER; note = 2'-O-Methyl-uridine
  modified_base 74: mod_base = OTHER; note = 2'-O-Methyl-adenosine
  modified_base 75: mod_base = OTHER; note = 2'-O-Methyl-adenosine
  modified_base 76: mod_base = OTHER; note = 2'-O-Methyl-adenosine
  modified_base 77: mod_base = OTHER; note = 2'-O-Methyl-adenosine
  modified_base 78: mod_base = OTHER; note = 2'-O-Methyl-adenosine
  modified_base 79: mod_base = OTHER; note = 2'-O-Methyl-guanosine
  modified_base 80: mod_base = OTHER; note = 2'-O-Methyl-uridine
  modified_base 82: mod_base = OTHER; note = 2'-O-Methyl-guanosine
  modified_base 83: mod_base = OTHER; note = 2'-O-Methyl-cytidine
  modified_base 84: mod_base = OTHER; note = 2'-O-Methyl-adenosine
  modified_base 85: mod_base = OTHER; note = 2'-O-Methyl-cytidine
  modified_base 86: mod_base = OTHER; note = 2'-O-Methyl-cytidine
  modified_base 87: mod_base = OTHER; note = 2'-O-Methyl-guanosine
  modified_base 89: mod_base = OTHER; note = 2'-O-Methyl-guanosine
  modified_base 92: mod_base = OTHER; note = 2'-O-Methyl-guanosine
  modified_base 93: mod_base = OTHER; note = 2'-O-Methyl-guanosine
  modified_base 94: mod_base = OTHER; note = 2'-O-Methyl-uridine
  modified_base 95: mod_base = OTHER; note = 2'-O-Methyl-guanosine
  modified_base 96: mod_base = OTHER; note = 2'-O-Methyl-cytidine
  modified_base 97: mod_base = OTHER; note = 2'-O-Methyl-uridine phosphorothioate
  modified_base 98: mod_base = OTHER; note = 2'-O-Methyl-uridine phosphorothioate
  modified_base 99: mod_base = OTHER; note = 2'-O-Methyl-uridine phosphorothioate
  modified_base 100: mod_base = OTHER; note = 2'-O-Methyl-uridine
  misc_difference 101: note = modified_base - a, c, u, g, unknown or other - a, c, g, inosine, u, deoxyadenosine, deoxyguanosine, deoxycytidine, deoxyinosine, thymine, ribonebularine, 2'-O-methylnebularine, or 2'-deoxynebularine
  misc_difference 102: note = modified_base - a, c, u, g, unknown or other - a, c, g, inosine, u, deoxyadenosine, deoxyguanosine, deoxycytidine, deoxyinosine, thymine, ribonebularine, 2'-O-methylnebularine, or 2'-deoxynebularine
  misc_difference 103: note = modified_base - a, c, u, g, unknown or other - a, c, g, inosine, u, deoxyadenosine, deoxyguanosine, deoxycytidine, deoxyinosine, thymine, ribonebularine, 2'-O-methylnebularine, or 2'-deoxynebularine

SEQ ID NO: 1820 - RNA, 103 nt, synthetic construct; identical to SEQ ID NO: 1797
  source 1..103: mol_type = other RNA; note = Description of Artificial Sequence: Synthetic polynucleotide
  modified_base 1: mod_base = OTHER; note = 2'-O-Methyl-cytidine phosphorothioate
  modified_base 2: mod_base = OTHER; note = 2'-O-Methyl-adenosine phosphorothioate
  modified_base 3: mod_base = OTHER; note = 2'-O-Methyl-guanosine phosphorothioate
  modified_base 21: mod_base = OTHER; note = 2'-O-Methyl-guanosine
  modified_base 25: mod_base = OTHER; note = uridine phosphorothioate
  modified_base 28: mod_base = OTHER; note = 2'-O-Methyl-adenosine
  modified_base 29: mod_base = OTHER; note = 2'-O-Methyl-guanosine
  modified_base 30: mod_base = OTHER; note = 2'-O-Methyl-cytidine
  modified_base 31: mod_base = OTHER; note = 2'-O-Methyl-uridine
  modified_base 32: mod_base = OTHER; note = 2'-O-Methyl-adenosine
  modified_base 34: mod_base = OTHER; note = 2'-O-Methyl-adenosine
  modified_base 35: mod_base = OTHER; note = 2'-O-Methyl-adenosine
  modified_base 36: mod_base = OTHER; note = 2'-O-Methyl-adenosine
  modified_base 37: mod_base = OTHER; note = 2'-O-Methyl-uridine
  modified_base 38: mod_base = OTHER; note = 2'-O-Methyl-adenosine
  modified_base 39: mod_base = OTHER; note = 2'-O-Methyl-guanosine
  modified_base 40: mod_base = OTHER; note = 2'-O-Methyl-cytidine
  modified_base 41: mod_base = OTHER; note = 2'-O-Methyl-adenosine
  modified_base 42: mod_base = OTHER; note = 2'-O-Methyl-adenosine
  modified_base 45: mod_base = OTHER; note = uridine phosphorothioate
  modified_base 46: mod_base = OTHER; note = 2'-O-Methyl-adenosine
  modified_base 48: mod_base = OTHER; note = 2'-O-Methyl-adenosine
  modified_base 50: mod_base = OTHER; note = 2'-O-Methyl-uridine
  modified_base 52: mod_base = OTHER; note = 2'-O-Methyl-adenosine
  modified_base 53: mod_base = OTHER; note = 2'-O-Methyl-guanosine
  modified_base 54: mod_base = OTHER; note = 2'-O-Methyl-guanosine
  modified_base 55: mod_base = OTHER; note = 2'-O-Methyl-cytidine
  modified_base 56: mod_base = OTHER; note = 2'-O-Methyl-uridine
  modified_base 57: mod_base = OTHER; note = 2'-O-Methyl-adenosine
  modified_base 60: mod_base = OTHER; note = 2'-O-Methyl-cytidine
  modified_base 61: mod_base = OTHER; note = 2'-O-Methyl-cytidine
  modified_base 64: mod_base = OTHER; note = uridine phosphorothioate
  modified_base 66: mod_base = OTHER; note = 2'-O-Methyl-uridine
  modified_base 67: mod_base = OTHER; note = 2'-O-Methyl-cytidine
  modified_base 70: mod_base = OTHER; note = 2'-O-Methyl-cytidine
  modified_base 71: mod_base = OTHER; note = 2'-O-Methyl-uridine
  modified_base 72: mod_base = OTHER; note = 2'-O-Methyl-uridine
  modified_base 74: mod_base = OTHER; note = 2'-O-Methyl-adenosine
  modified_base 75: mod_base = OTHER; note = 2'-O-Methyl-adenosine
  modified_base 76: mod_base = OTHER; note = 2'-O-Methyl-adenosine
  modified_base 77: mod_base = OTHER; note = 2'-O-Methyl-adenosine
  modified_base 78: mod_base = OTHER; note = 2'-O-Methyl-adenosine
  modified_base 79: mod_base = OTHER; note = 2'-O-Methyl-guanosine
  modified_base 80: mod_base = OTHER; note = 2'-O-Methyl-uridine
  modified_base 81: mod_base = OTHER; note = 2'-O-Methyl-guanosine
  modified_base 83: mod_base = OTHER; note = 2'-O-Methyl-cytidine
  modified_base 84: mod_base = OTHER; note = 2'-O-Methyl-adenosine
  modified_base 85: mod_base = OTHER; note = 2'-O-Methyl-cytidine
  modified_base 86: mod_base = OTHER; note = 2'-O-Methyl-cytidine
  modified_base 87: mod_base = OTHER; note = 2'-O-Methyl-guanosine
  modified_base 88: mod_base = OTHER; note = 2'-O-Methyl-adenosine
  modified_base 89: mod_base = OTHER; note = 2'-O-Methyl-guanosine
  modified_base 90: mod_base = OTHER; note = 2'-O-Methyl-uridine
  modified_base 91: mod_base = OTHER; note = 2'-O-Methyl-cytidine
  modified_base 92: mod_base = OTHER; note = 2'-O-Methyl-guanosine
  modified_base 93: mod_base = OTHER; note = 2'-O-Methyl-guanosine
  modified_base 94: mod_base = OTHER; note = 2'-O-Methyl-uridine
  modified_base 95: mod_base = OTHER; note = 2'-O-Methyl-guanosine
  modified_base 96: mod_base = OTHER; note = 2'-O-Methyl-cytidine
  modified_base 97: mod_base = OTHER; note = 2'-O-Methyl-uridine phosphorothioate
  modified_base 98: mod_base = OTHER; note = 2'-O-Methyl-uridine phosphorothioate
  modified_base 99: mod_base = OTHER; note = 2'-O-Methyl-uridine phosphorothioate
  modified_base 100: mod_base = OTHER; note = 2'-O-Methyl-uridine
  misc_difference 101: note = modified_base - a, c, u, g, unknown or other - a, c, g, inosine, u, deoxyadenosine, deoxyguanosine, deoxycytidine, deoxyinosine, thymine, ribonebularine, 2'-O-methylnebularine, or 2'-deoxynebularine
  misc_difference 102: note = modified_base - a, c, u, g, unknown or other - a, c, g, inosine, u, deoxyadenosine, deoxyguanosine, deoxycytidine, deoxyinosine, thymine, ribonebularine, 2'-O-methylnebularine, or 2'-deoxynebularine
  misc_difference 103: note = modified_base - a, c, u, g, unknown or other - a, c, g, inosine, u, deoxyadenosine, deoxyguanosine, deoxycytidine, deoxyinosine, thymine, ribonebularine, 2'-O-methylnebularine, or 2'-deoxynebularine

SEQ ID NO: 1821 - RNA, 103 nt, synthetic construct; identical to SEQ ID NO: 1797
  source 1..103: mol_type = other RNA; note = Description of Artificial Sequence: Synthetic polynucleotide
  modified_base 1: mod_base = OTHER; note = 2'-O-Methyl-cytidine phosphorothioate
  modified_base 2: mod_base = OTHER; note = 2'-O-Methyl-adenosine phosphorothioate
  modified_base 3: mod_base = OTHER; note = 2'-O-Methyl-guanosine
  modified_base 21: mod_base = OTHER; note = 2'-O-Methyl-guanosine
  modified_base 28: mod_base = OTHER; note = 2'-O-Methyl-adenosine
  modified_base 29: mod_base = OTHER; note = 2'-O-Methyl-guanosine
  modified_base 30: mod_base = OTHER; note = 2'-O-Methyl-cytidine
  modified_base 31: mod_base = OTHER; note = 2'-O-Methyl-uridine
  modified_base 32: mod_base = OTHER; note = 2'-O-Methyl-adenosine
  modified_base 34: mod_base = OTHER; note = 2'-O-Methyl-adenosine
  modified_base 35: mod_base = OTHER; note = 2'-O-Methyl-adenosine
  modified_base 36: mod_base = OTHER; note = 2'-O-Methyl-adenosine
  modified_base 37: mod_base = OTHER; note = 2'-O-Methyl-uridine
  modified_base 38: mod_base = OTHER; note = 2'-O-Methyl-adenosine
  modified_base 39: mod_base = OTHER; note = 2'-O-Methyl-guanosine
  modified_base 40: mod_base = OTHER; note = 2'-O-Methyl-cytidine
  modified_base 41: mod_base = OTHER; note = 2'-O-Methyl-adenosine
  modified_base 42: mod_base = OTHER; note = 2'-O-Methyl-adenosine
  modified_base 46: mod_base = OTHER; note = 2'-O-Methyl-adenosine
  modified_base 48: mod_base = OTHER; note = 2'-O-Methyl-adenosine
  modified_base 50: mod_base = OTHER; note = 2'-O-Methyl-uridine
  modified_base 52: mod_base = OTHER; note = 2'-O-Methyl-adenosine
  modified_base 53: mod_base = OTHER; note = 2'-O-Methyl-guanosine
  modified_base 54: mod_base = OTHER; note = 2'-O-Methyl-guanosine
  modified_base 57: mod_base = OTHER; note = 2'-O-Methyl-adenosine
  modified_base 61: mod_base = OTHER; note = 2'-O-Methyl-cytidine
  modified_base 66: mod_base = OTHER; note = 2'-O-Methyl-uridine
  modified_base 67: mod_base = OTHER; note = 2'-O-Methyl-cytidine
  modified_base 70: mod_base = OTHER; note = 2'-O-Methyl-cytidine
  modified_base 71: mod_base = OTHER; note = 2'-O-Methyl-uridine
  modified_base 72: mod_base = OTHER; note = 2'-O-Methyl-uridine
  modified_base 74: mod_base = OTHER; note = 2'-O-Methyl-adenosine
  modified_base 75: mod_base = OTHER; note = 2'-O-Methyl-adenosine
  modified_base 76: mod_base = OTHER; note = 2'-O-Methyl-adenosine
  modified_base 77: mod_base = OTHER; note = 2'-O-Methyl-adenosine
  modified_base 78: mod_base = OTHER; note = 2'-O-Methyl-adenosine
  modified_base 79: mod_base = OTHER; note = 2'-O-Methyl-guanosine
  modified_base 80: mod_base = OTHER; note = 2'-O-Methyl-uridine
  modified_base 82: mod_base = OTHER; note = 2'-O-Methyl-guanosine
  modified_base 83: mod_base = OTHER; note = 2'-O-Methyl-cytidine
  modified_base 84: mod_base = OTHER; note = 2'-O-Methyl-adenosine
  modified_base 85: mod_base = OTHER; note = 2'-O-Methyl-cytidine
  modified_base 86: mod_base = OTHER; note = 2'-O-Methyl-cytidine
  modified_base 87: mod_base = OTHER; note = 2'-O-Methyl-guanosine
  modified_base 89: mod_base = OTHER; note = 2'-O-Methyl-guanosine
  modified_base 92: mod_base = OTHER; note = 2'-O-Methyl-guanosine
  modified_base 93: mod_base = OTHER; note = 2'-O-Methyl-guanosine
  modified_base 94: mod_base = OTHER; note = 2'-O-Methyl-uridine
  modified_base 95: mod_base = OTHER; note = 2'-O-Methyl-guanosine
  modified_base 96: mod_base = OTHER; note = 2'-O-Methyl-cytidine
  modified_base 97: mod_base = OTHER; note = 2'-O-Methyl-uridine phosphorothioate
  modified_base 98: mod_base = OTHER; note = 2'-O-Methyl-uridine phosphorothioate
  modified_base 99: mod_base = OTHER; note = 2'-O-Methyl-uridine phosphorothioate
  modified_base 100: mod_base = OTHER; note = 2'-O-Methyl-uridine
  misc_difference 101: note = modified_base - a, c, u, g, unknown or other - a, c, g, inosine, u, deoxyadenosine, deoxyguanosine, deoxycytidine, deoxyinosine, thymine, ribonebularine, 2'-O-methylnebularine, or 2'-deoxynebularine
  misc_difference 102: note = modified_base - a, c, u, g, unknown or other - a, c, g, inosine, u, deoxyadenosine, deoxyguanosine, deoxycytidine, deoxyinosine, thymine, ribonebularine, 2'-O-methylnebularine, or 2'-deoxynebularine
  misc_difference 103: note = modified_base - a, c, u, g, unknown or other - a, c, g, inosine, u, deoxyadenosine, deoxyguanosine, deoxycytidine, deoxyinosine, thymine, ribonebularine, 2'-O-methylnebularine, or 2'-deoxynebularine

SEQ ID NO: 1822 - RNA, 103 nt, synthetic construct; identical to SEQ ID NO: 1795
  source 1..103: mol_type = other RNA; note = Description of Artificial Sequence: Synthetic polynucleotide
  modified_base 1: mod_base = OTHER; note = 2'-O-Methyl-cytidine phosphorothioate
  modified_base 2: mod_base = OTHER; note = 2'-O-Methyl-cytidine phosphorothioate
  modified_base 3: mod_base = OTHER; note = 2'-O-Methyl-cytidine
  modified_base 21: mod_base = OTHER; note = 2'-O-Methyl-guanosine
  modified_base 28: mod_base = OTHER; note = 2'-O-Methyl-adenosine
  modified_base 29: mod_base = OTHER; note = 2'-O-Methyl-guanosine
  modified_base 30: mod_base = OTHER; note = 2'-O-Methyl-cytidine
  modified_base 31: mod_base = OTHER; note = 2'-O-Methyl-uridine
  modified_base 32: mod_base = OTHER; note = 2'-O-Methyl-adenosine
  modified_base 34: mod_base = OTHER; note = 2'-O-Methyl-adenosine
  modified_base 35: mod_base = OTHER; note = 2'-O-Methyl-adenosine
  modified_base 36: mod_base = OTHER; note = 2'-O-Methyl-adenosine
  modified_base 37: mod_base = OTHER; note = 2'-O-Methyl-uridine
  modified_base 38: mod_base = OTHER; note = 2'-O-Methyl-adenosine
  modified_base 39: mod_base = OTHER; note = 2'-O-Methyl-guanosine
  modified_base 40: mod_base = OTHER; note = 2'-O-Methyl-cytidine
  modified_base 41: mod_base = OTHER; note = 2'-O-Methyl-adenosine
  modified_base 42: mod_base = OTHER; note = 2'-O-Methyl-adenosine
  modified_base 46: mod_base = OTHER; note = 2'-O-Methyl-adenosine
  modified_base 48: mod_base = OTHER; note = 2'-O-Methyl-adenosine
  modified_base 50: mod_base = OTHER; note = 2'-O-Methyl-uridine
  modified_base 52: mod_base = OTHER; note = 2'-O-Methyl-adenosine
  modified_base 53: mod_base = OTHER; note = 2'-O-Methyl-guanosine
  modified_base 54: mod_base = OTHER; note = 2'-O-Methyl-guanosine
  modified_base 57: mod_base = OTHER; note = 2'-O-Methyl-adenosine
  modified_base 61: mod_base = OTHER; note = 2'-O-Methyl-cytidine
  modified_base 66: mod_base = OTHER; note = 2'-O-Methyl-uridine
  modified_base 67: mod_base = OTHER; note = 2'-O-Methyl-cytidine
  modified_base 70: mod_base = OTHER; note = 2'-O-Methyl-cytidine
  modified_base 71: mod_base = OTHER; note = 2'-O-Methyl-uridine
  modified_base 72: mod_base = OTHER; note = 2'-O-Methyl-uridine
  modified_base 74: mod_base = OTHER; note = 2'-O-Methyl-adenosine
  modified_base 75: mod_base = OTHER; note = 2'-O-Methyl-adenosine
  modified_base 76: mod_base = OTHER; note = 2'-O-Methyl-adenosine
  modified_base 77: mod_base = OTHER; note = 2'-O-Methyl-adenosine
  modified_base 78: mod_base = OTHER; note = 2'-O-Methyl-adenosine
  modified_base 79: mod_base = OTHER; note = 2'-O-Methyl-guanosine
  modified_base 80: mod_base = OTHER; note = 2'-O-Methyl-uridine
  modified_base 82: mod_base = OTHER; note = 2'-O-Methyl-guanosine
  modified_base 83: mod_base = OTHER; note = 2'-O-Methyl-cytidine
  modified_base 84: mod_base = OTHER; note = 2'-O-Methyl-adenosine
  modified_base 85: mod_base = OTHER; note = 2'-O-Methyl-cytidine
  modified_base 86: mod_base = OTHER; note = 2'-O-Methyl-cytidine
  modified_base 87: mod_base = OTHER; note = 2'-O-Methyl-guanosine
  modified_base 89: mod_base = OTHER; note = 2'-O-Methyl-guanosine
  modified_base 92: mod_base = OTHER; note = 2'-O-Methyl-guanosine
  modified_base 93: mod_base = OTHER; note = 2'-O-Methyl-guanosine
  modified_base 94: mod_base = OTHER; note = 2'-O-Methyl-uridine
  modified_base 95: mod_base = OTHER; note = 2'-O-Methyl-guanosine
  modified_base 96: mod_base = OTHER; note = 2'-O-Methyl-cytidine
  modified_base 97: mod_base = OTHER; note = 2'-O-Methyl-uridine phosphorothioate
  modified_base 98: mod_base = OTHER; note = 2'-O-Methyl-uridine phosphorothioate
  modified_base 99: mod_base = OTHER; note = 2'-O-Methyl-uridine phosphorothioate
  modified_base 100: mod_base = OTHER; note = 2'-O-Methyl-uridine
  misc_difference 101: note = modified_base - a, c, u, g, unknown or other - a, c, g, inosine, u, deoxyadenosine, deoxyguanosine, deoxycytidine, deoxyinosine, thymine, ribonebularine, 2'-O-methylnebularine, or 2'-deoxynebularine
  misc_difference 102: note = modified_base - a, c, u, g, unknown or other - a, c, g, inosine, u, deoxyadenosine, deoxyguanosine, deoxycytidine, deoxyinosine, thymine, ribonebularine, 2'-O-methylnebularine, or 2'-deoxynebularine
  misc_difference 103: note = modified_base - a, c, u, g, unknown or other - a, c, g, inosine, u, deoxyadenosine, deoxyguanosine, deoxycytidine, deoxyinosine, thymine, ribonebularine, 2'-O-methylnebularine, or 2'-deoxynebularine

SEQ ID NO: 1823 - RNA, 103 nt, synthetic construct; identical to SEQ ID NO: 1796
  source 1..103: mol_type = other RNA; note = Description of Artificial Sequence: Synthetic polynucleotide
  modified_base 1: mod_base = OTHER; note = 2'-O-Methyl-guanosine phosphorothioate
  modified_base 2: mod_base = OTHER; note = 2'-O-Methyl-adenosine phosphorothioate
  modified_base 3: mod_base = OTHER; note = 2'-O-Methyl-guanosine
  modified_base 21: mod_base = OTHER; note = 2'-O-Methyl-guanosine
  modified_base 28: mod_base = OTHER; note = 2'-O-Methyl-adenosine
  modified_base 29: mod_base = OTHER; note = 2'-O-Methyl-guanosine
  modified_base 30: mod_base = OTHER; note = 2'-O-Methyl-cytidine
  modified_base 31: mod_base = OTHER; note = 2'-O-Methyl-uridine
  modified_base 32: mod_base = OTHER; note = 2'-O-Methyl-adenosine
  modified_base 34: mod_base = OTHER; note = 2'-O-Methyl-adenosine
  modified_base 35: mod_base = OTHER; note = 2'-O-Methyl-adenosine
  modified_base 36: mod_base = OTHER; note = 2'-O-Methyl-adenosine
  modified_base 37: mod_base = OTHER; note = 2'-O-Methyl-uridine
  modified_base 38: mod_base = OTHER; note = 2'-O-Methyl-adenosine
  modified_base 39: mod_base = OTHER; note = 2'-O-Methyl-guanosine
  modified_base 40: mod_base = OTHER; note = 2'-O-Methyl-cytidine
  modified_base 41: mod_base = OTHER; note = 2'-O-Methyl-adenosine
  modified_base 42: mod_base = OTHER; note = 2'-O-Methyl-adenosine
  modified_base 46: mod_base = OTHER; note = 2'-O-Methyl-adenosine
  modified_base 48: mod_base = OTHER; note = 2'-O-Methyl-adenosine
  modified_base 50: mod_base = OTHER; note = 2'-O-Methyl-uridine
  modified_base 52: mod_base = OTHER; note = 2'-O-Methyl-adenosine
  modified_base 53: mod_base = OTHER; note = 2'-O-Methyl-guanosine
  modified_base 54: mod_base = OTHER; note = 2'-O-Methyl-guanosine
  modified_base 57: mod_base = OTHER; note = 2'-O-Methyl-adenosine
  modified_base 61: mod_base = OTHER; note = 2'-O-Methyl-cytidine
  modified_base 66: mod_base = OTHER; note = 2'-O-Methyl-uridine
  modified_base 67: mod_base = OTHER; note = 2'-O-Methyl-cytidine
  modified_base 70: mod_base = OTHER; note = 2'-O-Methyl-cytidine
  modified_base 71: mod_base = OTHER; note = 2'-O-Methyl-uridine
  modified_base 72: mod_base = OTHER; note = 2'-O-Methyl-uridine
  modified_base 74: mod_base = OTHER; note = 2'-O-Methyl-adenosine
  modified_base 75: mod_base = OTHER; note = 2'-O-Methyl-adenosine
  modified_base 76: mod_base = OTHER; note = 2'-O-Methyl-adenosine
  modified_base 77: mod_base = OTHER; note = 2'-O-Methyl-adenosine
  modified_base 78: mod_base = OTHER; note = 2'-O-Methyl-adenosine
  modified_base 79: mod_base = OTHER; note = 2'-O-Methyl-guanosine
  modified_base 80: mod_base = OTHER; note = 2'-O-Methyl-uridine
  modified_base 82: mod_base = OTHER; note = 2'-O-Methyl-guanosine
  modified_base 83: mod_base = OTHER; note = 2'-O-Methyl-cytidine
  modified_base 84: mod_base = OTHER; note = 2'-O-Methyl-adenosine
  modified_base 85: mod_base = OTHER; note = 2'-O-Methyl-cytidine
  modified_base 86: mod_base = OTHER; note = 2'-O-Methyl-cytidine
  modified_base 87: mod_base = OTHER; note = 2'-O-Methyl-guanosine
  modified_base 89: mod_base = OTHER; note = 2'-O-Methyl-guanosine
  modified_base 92: mod_base = OTHER; note = 2'-O-Methyl-guanosine
  modified_base 93: mod_base = OTHER; note = 2'-O-Methyl-guanosine
  modified_base 94: mod_base = OTHER; note = 2'-O-Methyl-uridine
  modified_base 95: mod_base = OTHER; note = 2'-O-Methyl-guanosine
  modified_base 96: mod_base = OTHER; note = 2'-O-Methyl-cytidine
  modified_base 97: mod_base = OTHER; note = 2'-O-Methyl-uridine phosphorothioate
  modified_base 98: mod_base = OTHER; note = 2'-O-Methyl-uridine phosphorothioate
  modified_base 99: mod_base = OTHER; note = 2'-O-Methyl-uridine phosphorothioate
  modified_base 100: mod_base = OTHER; note = 2'-O-Methyl-uridine
  misc_difference 101: note = modified_base - a, c, u, g, unknown or other - a, c, g, inosine, u, deoxyadenosine, deoxyguanosine, deoxycytidine, deoxyinosine, thymine, ribonebularine, 2'-O-methylnebularine, or 2'-deoxynebularine
  misc_difference 102: note = modified_base - a, c, u, g, unknown or other - a, c, g, inosine, u, deoxyadenosine, deoxyguanosine, deoxycytidine, deoxyinosine, thymine, ribonebularine, 2'-O-methylnebularine, or 2'-deoxynebularine
  misc_difference 103: note = modified_base - a, c, u, g, unknown or other - a, c, g, inosine, u, deoxyadenosine, deoxyguanosine, deoxycytidine, deoxyinosine, thymine, ribonebularine, 2'-O-methylnebularine, or 2'-deoxynebularine

SEQ ID NO: 1824 - RNA, 103 nt, synthetic construct; identical to SEQ ID NO: 1795
  source 1..103: mol_type = other RNA; note = Description of Artificial Sequence: Synthetic polynucleotide
  modified_base 1: mod_base = OTHER; note = 2'-O-Methyl-cytidine phosphorothioate
  modified_base 2: mod_base = OTHER; note = 2'-O-Methyl-cytidine phosphorothioate
  modified_base 3: mod_base = OTHER; note = 2'-O-Methyl-cytidine
  modified_base 21: mod_base = OTHER; note = 2'-O-Methyl-guanosine
  modified_base 28: mod_base = OTHER; note = 2'-O-Methyl-adenosine
  modified_base 29: mod_base = OTHER; note = 2'-O-Methyl-guanosine
  modified_base 30: mod_base = OTHER; note = 2'-O-Methyl-cytidine
  modified_base 31: mod_base = OTHER; note = 2'-O-Methyl-uridine
  modified_base 32: mod_base = OTHER; note = 2'-O-Methyl-adenosine
  modified_base 34: mod_base = OTHER; note = 2'-O-Methyl-adenosine
  modified_base 35: mod_base = OTHER; note = 2'-O-Methyl-adenosine
  modified_base 36: mod_base = OTHER; note = 2'-O-Methyl-adenosine
  modified_base 37: mod_base = OTHER; note = 2'-O-Methyl-uridine
  modified_base 38: mod_base = OTHER; note = 2'-O-Methyl-adenosine
  modified_base 39: mod_base = OTHER; note = 2'-O-Methyl-guanosine
  modified_base 40: mod_base = OTHER; note = 2'-O-Methyl-cytidine
  modified_base 41: mod_base = OTHER; note = 2'-O-Methyl-adenosine
  modified_base 42: mod_base = OTHER; note = 2'-O-Methyl-adenosine
  modified_base 46: mod_base = OTHER; note = 2'-O-Methyl-adenosine
  modified_base 48: mod_base = OTHER; note = 2'-O-Methyl-adenosine
  modified_base 50: mod_base = OTHER; note = 2'-O-Methyl-uridine
  modified_base 52: mod_base = OTHER; note = 2'-O-Methyl-adenosine
  modified_base 53: mod_base = OTHER; note = 2'-O-Methyl-guanosine
  modified_base 54: mod_base = OTHER; note = 2'-O-Methyl-guanosine
  modified_base 57: mod_base = OTHER; note = 2'-O-Methyl-adenosine
  modified_base 61: mod_base = OTHER; note = 2'-O-Methyl-cytidine
  modified_base 64: mod_base = OTHER; note = uridine phosphorothioate
  modified_base 66: mod_base = OTHER; note = 2'-O-Methyl-uridine
  modified_base 67: mod_base = OTHER; note = 2'-O-Methyl-cytidine
  modified_base 70: mod_base = OTHER; note = 2'-O-Methyl-cytidine
  modified_base 71: mod_base = OTHER; note = 2'-O-Methyl-uridine
  modified_base 72: mod_base = OTHER; note = 2'-O-Methyl-uridine
  modified_base 74: mod_base = OTHER; note = 2'-O-Methyl-adenosine
  modified_base 75: mod_base = OTHER; note = 2'-O-Methyl-adenosine
  modified_base 76: mod_base = OTHER; note = 2'-O-Methyl-adenosine
  modified_base 77: mod_base = OTHER; note = 2'-O-Methyl-adenosine
  modified_base 78: mod_base = OTHER; note = 2'-O-Methyl-adenosine
  modified_base 79: mod_base = OTHER; note = 2'-O-Methyl-guanosine
  modified_base 80: mod_base = OTHER; note = 2'-O-Methyl-uridine
  modified_base 82: mod_base = OTHER; note = 2'-O-Methyl-guanosine
  modified_base 83: mod_base = OTHER; note = 2'-O-Methyl-cytidine
  modified_base 84: mod_base = OTHER; note = 2'-O-Methyl-adenosine
  modified_base 85: mod_base = OTHER; note = 2'-O-Methyl-cytidine
  modified_base 86: mod_base = OTHER; note = 2'-O-Methyl-cytidine
  modified_base 87: mod_base = OTHER; note = 2'-O-Methyl-guanosine
  modified_base 89: mod_base = OTHER; note = 2'-O-Methyl-guanosine
  modified_base 92: mod_base = OTHER; note = 2'-O-Methyl-guanosine
  modified_base 93: mod_base = OTHER; note = 2'-O-Methyl-guanosine
  modified_base 94: mod_base = OTHER; note = 2'-O-Methyl-uridine
  modified_base 95: mod_base = OTHER; note = 2'-O-Methyl-guanosine
  modified_base 96: mod_base = OTHER; note = 2'-O-Methyl-cytidine
  modified_base 97: mod_base = OTHER; note = 2'-O-Methyl-uridine phosphorothioate
  modified_base 98: mod_base = OTHER; note = 2'-O-Methyl-uridine phosphorothioate
  modified_base 99: mod_base = OTHER; note = 2'-O-Methyl-uridine phosphorothioate
  modified_base 100: mod_base = OTHER; note = 2'-O-Methyl-uridine
  misc_difference 101: note = modified_base - a, c, u, g, unknown or other - a, c, g, inosine, u, deoxyadenosine, deoxyguanosine, deoxycytidine, deoxyinosine, thymine, ribonebularine, 2'-O-methylnebularine, or 2'-deoxynebularine
  misc_difference 102: note = modified_base - a, c, u, g, unknown or other - a, c, g, inosine, u, deoxyadenosine, deoxyguanosine, deoxycytidine, deoxyinosine, thymine, ribonebularine, 2'-O-methylnebularine, or 2'-deoxynebularine
  misc_difference 103: note = modified_base - a, c, u, g, unknown or other - a, c, g, inosine, u, deoxyadenosine, deoxyguanosine, deoxycytidine, deoxyinosine, thymine, ribonebularine, 2'-O-methylnebularine, or 2'-deoxynebularine

SEQ ID NO: 1825 - RNA, 103 nt, synthetic construct; identical to SEQ ID NO: 1796
  source 1..103: mol_type = other RNA; note = Description of Artificial Sequence: Synthetic polynucleotide
  modified_base 1: mod_base = OTHER; note = 2'-O-Methyl-guanosine phosphorothioate
  modified_base 2: mod_base = OTHER; note = 2'-O-Methyl-adenosine phosphorothioate
  modified_base 3: mod_base = OTHER; note = 2'-O-Methyl-guanosine
  modified_base 21: mod_base = OTHER; note = 2'-O-Methyl-guanosine
  modified_base 28: mod_base = OTHER; note = 2'-O-Methyl-adenosine
  modified_base 29: mod_base = OTHER; note = 2'-O-Methyl-guanosine
  modified_base 30: mod_base = OTHER; note = 2'-O-Methyl-cytidine
  modified_base 31: mod_base = OTHER; note = 2'-O-Methyl-uridine
  modified_base 32: mod_base = OTHER; note = 2'-O-Methyl-adenosine
  modified_base 34: mod_base = OTHER; note = 2'-O-Methyl-adenosine
  modified_base 35: mod_base = OTHER; note = 2'-O-Methyl-adenosine
  modified_base 36: mod_base = OTHER; note = 2'-O-Methyl-adenosine
  modified_base 37: mod_base = OTHER; note = 2'-O-Methyl-uridine
  modified_base 38: mod_base = OTHER; note = 2'-O-Methyl-adenosine
  modified_base 39: mod_base = OTHER; note = 2'-O-Methyl-guanosine
  modified_base 40: mod_base = OTHER; note = 2'-O-Methyl-cytidine
  modified_base 41: mod_base = OTHER; note = 2'-O-Methyl-adenosine
  modified_base 42: mod_base = OTHER; note = 2'-O-Methyl-adenosine
  modified_base 46: mod_base = OTHER; note = 2'-O-Methyl-adenosine
  modified_base 48: mod_base = OTHER; note = 2'-O-Methyl-adenosine
  modified_base 50: mod_base = OTHER; note = 2'-O-Methyl-uridine
  modified_base 52: mod_base = OTHER; note = 2'-O-Methyl-adenosine
  modified_base 53: mod_base = OTHER; note = 2'-O-Methyl-guanosine
  modified_base 54: mod_base = OTHER; note = 2'-O-Methyl-guanosine
  modified_base 57: mod_base = OTHER; note = 2'-O-Methyl-adenosine
  modified_base 61: mod_base = OTHER; note = 2'-O-Methyl-cytidine
  modified_base 64: mod_base = OTHER; note = uridine phosphorothioate
  modified_base 66: mod_base = OTHER; note = 2'-O-Methyl-uridine
  modified_base 67: mod_base = OTHER; note = 2'-O-Methyl-cytidine
  modified_base 70: mod_base = OTHER; note = 2'-O-Methyl-cytidine
  modified_base 71: mod_base = OTHER; note = 2'-O-Methyl-uridine
  modified_base 72: mod_base = OTHER; note = 2'-O-Methyl-uridine
  modified_base 74: mod_base = OTHER; note = 2'-O-Methyl-adenosine
  modified_base 75: mod_base = OTHER; note = 2'-O-Methyl-adenosine
  modified_base 76: mod_base = OTHER; note = 2'-O-Methyl-adenosine
  modified_base 77: mod_base = OTHER; note = 2'-O-Methyl-adenosine
  modified_base 78: mod_base = OTHER; note = 2'-O-Methyl-adenosine
  modified_base 79: mod_base = OTHER; note = 2'-O-Methyl-guanosine
  modified_base 80: mod_base = OTHER; note = 2'-O-Methyl-uridine
  modified_base 82: mod_base = OTHER; note = 2'-O-Methyl-guanosine
  modified_base 83: mod_base = OTHER; note = 2'-O-Methyl-cytidine
  modified_base 84: mod_base = OTHER; note = 2'-O-Methyl-adenosine
  modified_base 85: mod_base = OTHER; note = 2'-O-Methyl-cytidine
  modified_base 86: mod_base = OTHER; note = 2'-O-Methyl-cytidine
  modified_base 87: mod_base = OTHER; note = 2'-O-Methyl-guanosine
  modified_base 89: mod_base = OTHER; note = 2'-O-Methyl-guanosine
  modified_base 92: mod_base = OTHER; note = 2'-O-Methyl-guanosine
  modified_base 93: mod_base = OTHER; note = 2'-O-Methyl-guanosine
  modified_base 94: mod_base = OTHER; note = 2'-O-Methyl-uridine
  modified_base 95: mod_base = OTHER; note = 2'-O-Methyl-guanosine
  modified_base 96: mod_base = OTHER; note = 2'-O-Methyl-cytidine
  modified_base 97: mod_base = OTHER; note = 2'-O-Methyl-uridine phosphorothioate
  modified_base 98: mod_base = OTHER; note = 2'-O-Methyl-uridine phosphorothioate
  modified_base 99: mod_base = OTHER; note = 2'-O-Methyl-uridine phosphorothioate
  modified_base 100: mod_base = OTHER; note = 2'-O-Methyl-uridine
  misc_difference 101: note = modified_base - a, c, u, g, unknown or other - a, c, g, inosine, u, deoxyadenosine, deoxyguanosine, deoxycytidine, deoxyinosine, thymine, ribonebularine, 2'-O-methylnebularine, or 2'-deoxynebularine
  misc_difference 102: note = modified_base - a, c, u, g, unknown or other - a, c, g, inosine, u, deoxyadenosine, deoxyguanosine, deoxycytidine, deoxyinosine, thymine, ribonebularine, 2'-O-methylnebularine, or 2'-deoxynebularine
  misc_difference 103: note = modified_base - a, c, u, g, unknown or other - a, c, g, inosine, u, deoxyadenosine, deoxyguanosine, deoxycytidine, deoxyinosine, thymine, ribonebularine, 2'-O-methylnebularine, or 2'-deoxynebularine

SEQ ID NO: 1826 - RNA, 103 nt, synthetic construct; identical to SEQ ID NO: 1797
  source 1..103: mol_type = other RNA; note = Description of Artificial Sequence: Synthetic polynucleotide
  modified_base 1: mod_base = OTHER; note = 2'-O-Methyl-cytidine phosphorothioate
  modified_base 2: mod_base = OTHER; note = 2'-O-Methyl-adenosine phosphorothioate
  modified_base 3: mod_base = OTHER; note = 2'-O-Methyl-guanosine
  modified_base 21: mod_base = OTHER; note = 2'-O-Methyl-guanosine
  modified_base 28: mod_base = OTHER; note = 2'-O-Methyl-adenosine
  modified_base 29: mod_base = OTHER; note = 2'-O-Methyl-guanosine
  modified_base 30: mod_base = OTHER; note = 2'-O-Methyl-cytidine
  modified_base 31: mod_base = OTHER; note = 2'-O-Methyl-uridine
  modified_base 32: mod_base = OTHER; note = 2'-O-Methyl-adenosine
  modified_base 34: mod_base = OTHER; note = 2'-O-Methyl-adenosine
  modified_base 35: mod_base = OTHER; note = 2'-O-Methyl-adenosine
  modified_base 36: mod_base = OTHER; note = 2'-O-Methyl-adenosine
  modified_base 37: mod_base = OTHER; note = 2'-O-Methyl-uridine
  modified_base 38: mod_base = OTHER; note = 2'-O-Methyl-adenosine
  modified_base 39: mod_base = OTHER; note = 2'-O-Methyl-guanosine
  modified_base 40: mod_base = OTHER; note = 2'-O-Methyl-cytidine
  modified_base 41: mod_base = OTHER; note = 2'-O-Methyl-adenosine
  modified_base 42: mod_base = OTHER; note = 2'-O-Methyl-adenosine
  modified_base 46: mod_base = OTHER; note = 2'-O-Methyl-adenosine
  modified_base 48: mod_base = OTHER; note = 2'-O-Methyl-adenosine
  modified_base 50: mod_base = OTHER; note = 2'-O-Methyl-uridine
  modified_base 52: mod_base = OTHER; note = 2'-O-Methyl-adenosine
  modified_base 53: mod_base = OTHER; note = 2'-O-Methyl-guanosine
  modified_base 54: mod_base = OTHER; note = 2'-O-Methyl-guanosine
  modified_base 55: mod_base = OTHER; note = 2'-O-Methyl-cytidine
  modified_base 56: mod_base = OTHER; note = 2'-O-Methyl-uridine
  modified_base 57: mod_base = OTHER; note = 2'-O-Methyl-adenosine
  modified_base 60: mod_base = OTHER; note = 2'-O-Methyl-cytidine
  modified_base 61: mod_base = OTHER; note = 2'-O-Methyl-cytidine
  modified_base 64: mod_base = OTHER; note = uridine phosphorothioate
  modified_base 66: mod_base = OTHER; note = 2'-O-Methyl-uridine
  modified_base 67: mod_base = OTHER; note = 2'-O-Methyl-cytidine
  modified_base 70: mod_base = OTHER; note = 2'-O-Methyl-cytidine
  modified_base 71: mod_base = OTHER; note = 2'-O-Methyl-uridine
  modified_base 72: mod_base = OTHER; note = 2'-O-Methyl-uridine
  modified_base 74: mod_base = OTHER; note = 2'-O-Methyl-adenosine
  modified_base 75: mod_base = OTHER; note = 2'-O-Methyl-adenosine
  modified_base 76: mod_base = OTHER; note = 2'-O-Methyl-adenosine
  modified_base 77: mod_base = OTHER; note = 2'-O-Methyl-adenosine
  modified_base 78: mod_base = OTHER; note = 2'-O-Methyl-adenosine
  modified_base 79: mod_base = OTHER; note = 2'-O-Methyl-guanosine
  modified_base 80: mod_base = OTHER; note = 2'-O-Methyl-uridine
  modified_base 81: mod_base = OTHER; note = 2'-O-Methyl-guanosine
  modified_base 83: mod_base = OTHER; note = 2'-O-Methyl-cytidine
  modified_base 84: mod_base = OTHER; note = 2'-O-Methyl-adenosine
  modified_base 85: mod_base = OTHER; note = 2'-O-Methyl-cytidine
  modified_base 86: mod_base = OTHER; note = 2'-O-Methyl-cytidine
  modified_base 87: mod_base = OTHER; note = 2'-O-Methyl-guanosine
  modified_base 88: mod_base = OTHER; note = 2'-O-Methyl-adenosine
  modified_base 89: mod_base = OTHER; note = 2'-O-Methyl-guanosine
  modified_base 90: mod_base = OTHER; note = 2'-O-Methyl-uridine
  modified_base 91: mod_base = OTHER; note = 2'-O-Methyl-cytidine
  modified_base 92: mod_base = OTHER; note = 2'-O-Methyl-guanosine
  modified_base 93: mod_base = OTHER; note = 2'-O-Methyl-guanosine
  modified_base 94: mod_base = OTHER; note = 2'-O-Methyl-uridine
  modified_base 95: mod_base = OTHER; note = 2'-O-Methyl-guanosine
  modified_base 96: mod_base = OTHER; note = 2'-O-Methyl-cytidine
  modified_base 97: mod_base = OTHER; note = 2'-O-Methyl-uridine phosphorothioate
  modified_base 98: mod_base = OTHER; note = 2'-O-Methyl-uridine phosphorothioate
  modified_base 99: mod_base = OTHER; note = 2'-O-Methyl-uridine phosphorothioate
  modified_base 100: mod_base = OTHER; note = 2'-O-Methyl-uridine
  misc_difference 101: note = modified_base - a, c, u, g, unknown or other - a, c, g, inosine, u, deoxyadenosine, deoxyguanosine, deoxycytidine, deoxyinosine, thymine, ribonebularine, 2'-O-methylnebularine, or 2'-deoxynebularine
  misc_difference 102: note = modified_base - a, c, u, g, unknown or other - a, c, g, inosine, u, deoxyadenosine, deoxyguanosine, deoxycytidine, deoxyinosine, thymine, ribonebularine, 2'-O-methylnebularine, or 2'-deoxynebularine
  misc_difference 103: note = modified_base - a, c, u, g, unknown or other - a, c, g, inosine, u, deoxyadenosine, deoxyguanosine, deoxycytidine, deoxyinosine, thymine, ribonebularine, 2'-O-methylnebularine, or 2'-deoxynebularine

SEQ ID NO: 1827 - RNA, 103 nt, synthetic construct; identical to SEQ ID NO: 1795
  source 1..103: mol_type = other RNA; note = Description of Artificial Sequence: Synthetic polynucleotide
  modified_base 1: mod_base = OTHER; note = 2'-O-Methyl-cytidine phosphorothioate
  modified_base 2: mod_base = OTHER; note = 2'-O-Methyl-cytidine phosphorothioate
  modified_base 3: mod_base = OTHER; note = 2'-O-Methyl-cytidine
  modified_base 21: mod_base = OTHER; note = 2'-O-Methyl-guanosine
  modified_base 28: mod_base = OTHER; note = 2'-O-Methyl-adenosine
  modified_base 29: mod_base = OTHER; note = 2'-O-Methyl-guanosine
  modified_base 30: mod_base = OTHER; note = 2'-O-Methyl-cytidine
  modified_base 31: mod_base = OTHER; note = 2'-O-Methyl-uridine
  modified_base 32: mod_base = OTHER; note = 2'-O-Methyl-adenosine
  modified_base 34: mod_base = OTHER; note = 2'-O-Methyl-adenosine
  modified_base 35: mod_base = OTHER; note = 2'-O-Methyl-adenosine
  modified_base 36: mod_base = OTHER; note = 2'-O-Methyl-adenosine
  modified_base 37: mod_base = OTHER; note = 2'-O-Methyl-uridine
  modified_base 38: mod_base = OTHER; note = 2'-O-Methyl-adenosine
  modified_base 39: mod_base = OTHER; note = 2'-O-Methyl-guanosine
  modified_base 40: mod_base = OTHER; note = 2'-O-Methyl-cytidine
  modified_base 41: mod_base = OTHER; note = 2'-O-Methyl-adenosine
  modified_base 42: mod_base = OTHER; note = 2'-O-Methyl-adenosine
  modified_base 45: mod_base = OTHER; note = uridine phosphorothioate
  modified_base 46: mod_base = OTHER; note = 2'-O-Methyl-adenosine
  modified_base 48: mod_base = OTHER; note = 2'-O-Methyl-adenosine
  modified_base 50: mod_base = OTHER; note = 2'-O-Methyl-uridine
  modified_base 52: mod_base = OTHER; note = 2'-O-Methyl-adenosine
  modified_base 53: mod_base = OTHER; note = 2'-O-Methyl-guanosine
  modified_base 54: mod_base = OTHER; note = 2'-O-Methyl-guanosine
  modified_base 57: mod_base = OTHER; note = 2'-O-Methyl-adenosine
  modified_base 61: mod_base = OTHER; note = 2'-O-Methyl-cytidine
  modified_base 66: mod_base = OTHER; note = 2'-O-Methyl-uridine
  modified_base 67: mod_base = OTHER; note = 2'-O-Methyl-cytidine
  modified_base 70: mod_base = OTHER; note = 2'-O-Methyl-cytidine
  modified_base 71: mod_base = OTHER; note = 2'-O-Methyl-uridine
  modified_base 72: mod_base = OTHER; note = 2'-O-Methyl-uridine
  modified_base 74: mod_base = OTHER; note = 2'-O-Methyl-adenosine
  modified_base 75: mod_base = OTHER; note = 2'-O-Methyl-adenosine
  modified_base 76: mod_base = OTHER; note = 2'-O-Methyl-adenosine
  modified_base 77: mod_base = OTHER; note = 2'-O-Methyl-adenosine
  modified_base 78: mod_base = OTHER; note = 2'-O-Methyl-adenosine
  modified_base 79: mod_base = OTHER; note = 2'-O-Methyl-guanosine
  modified_base 80: mod_base = OTHER; note = 2'-O-Methyl-uridine
  modified_base 82: mod_base = OTHER; note = 2'-O-Methyl-guanosine
  modified_base 83: mod_base = OTHER; note = 2'-O-Methyl-cytidine
  modified_base 84: mod_base = OTHER; note = 2'-O-Methyl-adenosine
  modified_base 85: mod_base = OTHER; note = 2'-O-Methyl-cytidine
  modified_base 86: mod_base = OTHER; note = 2'-O-Methyl-cytidine
  modified_base 87: mod_base = OTHER; note = 2'-O-Methyl-guanosine
  modified_base 89: mod_base = OTHER; note = 2'-O-Methyl-guanosine
  modified_base 92: mod_base = OTHER; note = 2'-O-Methyl-guanosine
  modified_base 93: mod_base = OTHER; note = 2'-O-Methyl-guanosine
  modified_base 94: mod_base = OTHER; note = 2'-O-Methyl-uridine
  modified_base 95: mod_base = OTHER; note = 2'-O-Methyl-guanosine
  modified_base 96: mod_base = OTHER; note = 2'-O-Methyl-cytidine
  modified_base 97: mod_base = OTHER; note = 2'-O-Methyl-uridine phosphorothioate
  modified_base 98: mod_base = OTHER; note = 2'-O-Methyl-uridine phosphorothioate
  modified_base 99: mod_base = OTHER; note = 2'-O-Methyl-uridine phosphorothioate
  modified_base 100: mod_base = OTHER; note = 2'-O-Methyl-uridine
  misc_difference 101: note = modified_base - a, c, u, g, unknown or other - a, c, g, inosine, u, deoxyadenosine, deoxyguanosine, deoxycytidine, deoxyinosine, thymine, ribonebularine, 2'-O-methylnebularine, or 2'-deoxynebularine
  misc_difference 102: note = modified_base - a, c, u, g, unknown or other - a, c, g, inosine, u, deoxyadenosine, deoxyguanosine, deoxycytidine, deoxyinosine, thymine, ribonebularine, 2'-O-methylnebularine, or 2'-deoxynebularine
  misc_difference 103: note = modified_base - a, c, u, g, unknown or other - a, c, g, inosine, u, deoxyadenosine, deoxyguanosine, deoxycytidine, deoxyinosine, thymine, ribonebularine, 2'-O-methylnebularine, or 2'-deoxynebularine

SEQ ID NO: 1828 - RNA, 103 nt, synthetic construct; identical to SEQ ID NO: 1796
  source 1..103: mol_type = other RNA; note = Description of Artificial Sequence: Synthetic polynucleotide
  modified_base 1: mod_base = OTHER; note = 2'-O-Methyl-guanosine phosphorothioate
  modified_base 2: mod_base = OTHER; note = 2'-O-Methyl-adenosine phosphorothioate
  modified_base 3: mod_base = OTHER; note = 2'-O-Methyl-guanosine
  modified_base 21: mod_base = OTHER; note = 2'-O-Methyl-guanosine
  modified_base 28: mod_base = OTHER; note = 2'-O-Methyl-adenosine
  modified_base 29: mod_base = OTHER; note = 2'-O-Methyl-guanosine
  modified_base 30: mod_base = OTHER; note = 2'-O-Methyl-cytidine
  modified_base 31: mod_base = OTHER; note = 2'-O-Methyl-uridine
  modified_base 32: mod_base = OTHER; note = 2'-O-Methyl-adenosine
  modified_base 34: mod_base = OTHER; note = 2'-O-Methyl-adenosine
  modified_base 35: mod_base = OTHER; note = 2'-O-Methyl-adenosine
  modified_base 36: mod_base = OTHER; note = 2'-O-Methyl-adenosine
  modified_base 37: mod_base = OTHER; note = 2'-O-Methyl-uridine
  modified_base 38: mod_base = OTHER; note = 2'-O-Methyl-adenosine
  modified_base 39: mod_base = OTHER; note = 2'-O-Methyl-guanosine
  modified_base 40: mod_base = OTHER; note = 2'-O-Methyl-cytidine
  modified_base 41: mod_base = OTHER; note = 2'-O-Methyl-adenosine
  modified_base 42: mod_base = OTHER; note = 2'-O-Methyl-adenosine
  modified_base 45: mod_base = OTHER; note = uridine phosphorothioate
  modified_base 46: mod_base = OTHER; note = 2'-O-Methyl-adenosine
  modified_base 48: mod_base = OTHER; note = 2'-O-Methyl-adenosine
  modified_base 50: mod_base = OTHER; note = 2'-O-Methyl-uridine
  modified_base 52: mod_base = OTHER; note = 2'-O-Methyl-adenosine
  modified_base 53: mod_base = OTHER; note = 2'-O-Methyl-guanosine
  modified_base 54: mod_base = OTHER; note = 2'-O-Methyl-guanosine
  modified_base 57: mod_base = OTHER; note = 2'-O-Methyl-adenosine
  modified_base 61: mod_base = OTHER; note = 2'-O-Methyl-cytidine
  modified_base 66: mod_base = OTHER; note = 2'-O-Methyl-uridine
  modified_base 67: mod_base = OTHER; note = 2'-O-Methyl-cytidine
  modified_base 70: mod_base = OTHER; note = 2'-O-Methyl-cytidine
  modified_base 71: mod_base = OTHER; note = 2'-O-Methyl-uridine
  modified_base 72: mod_base = OTHER; note = 2'-O-Methyl-uridine
  modified_base 74: mod_base = OTHER; note = 2'-O-Methyl-adenosine
  modified_base 75: mod_base = OTHER; note = 2'-O-Methyl-adenosine
  modified_base 76: mod_base = OTHER; note = 2'-O-Methyl-adenosine
  modified_base 77: mod_base = OTHER; note = 2'-O-Methyl-adenosine
  modified_base 78: mod_base = OTHER; note = 2'-O-Methyl-adenosine
  modified_base 79: mod_base = OTHER; note = 2'-O-Methyl-guanosine
  modified_base 80: mod_base = OTHER; note = 2'-O-Methyl-uridine
  modified_base 82: mod_base = OTHER; note = 2'-O-Methyl-guanosine
  modified_base 83: mod_base = OTHER; note = 2'-O-Methyl-cytidine
  modified_base 84: mod_base = OTHER; note = 2'-O-Methyl-adenosine
  modified_base 85: mod_base = OTHER; note = 2'-O-Methyl-cytidine
  modified_base 86: mod_base = OTHER; note = 2'-O-Methyl-cytidine
  modified_base 87: mod_base = OTHER; note = 2'-O-Methyl-guanosine
  modified_base 89: mod_base = OTHER; note = 2'-O-Methyl-guanosine
  modified_base 92: mod_base = OTHER; note = 2'-O-Methyl-guanosine
  modified_base 93: mod_base = OTHER; note = 2'-O-Methyl-guanosine
  modified_base 94: mod_base = OTHER; note = 2'-O-Methyl-uridine
  modified_base 95: mod_base = OTHER; note = 2'-O-Methyl-guanosine
  modified_base 96: mod_base = OTHER; note = 2'-O-Methyl-cytidine
  modified_base 97: mod_base = OTHER; note = 2'-O-Methyl-uridine phosphorothioate
  modified_base 98: mod_base = OTHER; note = 2'-O-Methyl-uridine phosphorothioate
  modified_base 99: mod_base = OTHER; note = 2'-O-Methyl-uridine phosphorothioate
  modified_base 100: mod_base = OTHER; note = 2'-O-Methyl-uridine
  misc_difference 101: note = modified_base - a, c, u, g, unknown or other - a, c, g, inosine, u, deoxyadenosine, deoxyguanosine, deoxycytidine, deoxyinosine, thymine, ribonebularine, 2'-O-methylnebularine, or 2'-deoxynebularine
  misc_difference 102: note = modified_base - a, c, u, g, unknown or other - a, c, g, inosine, u, deoxyadenosine, deoxyguanosine, deoxycytidine, deoxyinosine, thymine, ribonebularine, 2'-O-methylnebularine, or 2'-deoxynebularine
  misc_difference 103: note = modified_base - a, c, u, g, unknown or other - a, c, g, inosine, u, deoxyadenosine, deoxyguanosine, deoxycytidine, deoxyinosine, thymine, ribonebularine, 2'-O-methylnebularine, or 2'-deoxynebularine

SEQ ID NO: 1829 - RNA, 103 nt, synthetic construct; identical to SEQ ID NO: 1797
  source 1..103: mol_type = other RNA; note = Description of Artificial Sequence: Synthetic polynucleotide
  modified_base 1: mod_base = OTHER; note = 2'-O-Methyl-cytidine phosphorothioate
  modified_base 2: mod_base = OTHER; note = 2'-O-Methyl-adenosine phosphorothioate
  modified_base 3: mod_base = OTHER; note = 2'-O-Methyl-guanosine
  modified_base 21: mod_base = OTHER; note = 2'-O-Methyl-guanosine
  modified_base 28: mod_base = OTHER; note = 2'-O-Methyl-adenosine
  modified_base 29: mod_base = OTHER; note = 2'-O-Methyl-guanosine
  modified_base 30: mod_base = OTHER; note = 2'-O-Methyl-cytidine
  modified_base 31: mod_base = OTHER; note = 2'-O-Methyl-uridine
  modified_base 32: mod_base = OTHER; note = 2'-O-Methyl-adenosine
  modified_base 34: mod_base = OTHER; note = 2'-O-Methyl-adenosine
  modified_base 35: mod_base = OTHER; note = 2'-O-Methyl-adenosine
  modified_base 36: mod_base = OTHER; note = 2'-O-Methyl-adenosine
  modified_base 37: mod_base = OTHER; note = 2'-O-Methyl-uridine
  modified_base 38: mod_base = OTHER; note = 2'-O-Methyl-adenosine
  modified_base 39: mod_base = OTHER; note = 2'-O-Methyl-guanosine
  modified_base 40: mod_base = OTHER; note = 2'-O-Methyl-cytidine
  modified_base 41: mod_base = OTHER; note = 2'-O-Methyl-adenosine
  modified_base 42: mod_base = OTHER; note = 2'-O-Methyl-adenosine
  modified_base 45: mod_base = OTHER; note = uridine phosphorothioate
  modified_base 46: mod_base = OTHER; note = 2'-O-Methyl-adenosine
  modified_base 48: mod_base = OTHER; note = 2'-O-Methyl-adenosine
  modified_base 50: mod_base = OTHER; note = 2'-O-Methyl-uridine
  modified_base 52: mod_base = OTHER; note = 2'-O-Methyl-adenosine
  modified_base 53: mod_base = OTHER; note = 2'-O-Methyl-guanosine
  modified_base 54: mod_base = OTHER; note = 2'-O-Methyl-guanosine
  modified_base 55: mod_base = OTHER; note = 2'-O-Methyl-cytidine
  modified_base 56: mod_base = OTHER; note = 2'-O-Methyl-uridine
  modified_base 57: mod_base = OTHER; note = 2'-O-Methyl-adenosine
  modified_base 60: mod_base = OTHER; note = 2'-O-Methyl-cytidine
  modified_base 61: mod_base = OTHER; note = 2'-O-Methyl-cytidine
  modified_base 66: mod_base = OTHER; note = 2'-O-Methyl-uridine
  modified_base 67: mod_base = OTHER; note = 2'-O-Methyl-cytidine
  modified_base 70: mod_base = OTHER; note = 2'-O-Methyl-cytidine
  modified_base 71: mod_base = OTHER; note = 2'-O-Methyl-uridine
  modified_base 72: mod_base = OTHER; note = 2'-O-Methyl-uridine
  modified_base 74: mod_base = OTHER; note = 2'-O-Methyl-adenosine
  modified_base 75: mod_base = OTHER; note = 2'-O-Methyl-adenosine
  modified_base 76: mod_base = OTHER; note = 2'-O-Methyl-adenosine
  modified_base 77: mod_base = OTHER; note = 2'-O-Methyl-adenosine
  modified_base 78: mod_base = OTHER; note = 2'-O-Methyl-adenosine
  modified_base 79: mod_base = OTHER; note = 2'-O-Methyl-guanosine
  modified_base 80: mod_base = OTHER; note = 2'-O-Methyl-uridine
  modified_base 81: mod_base = OTHER; note = 2'-O-Methyl-guanosine
  modified_base 83: mod_base = OTHER; note = 2'-O-Methyl-cytidine
  modified_base 84: mod_base = OTHER; note = 2'-O-Methyl-adenosine
  modified_base 85: mod_base = OTHER; note = 2'-O-Methyl-cytidine
  modified_base 86: mod_base = OTHER; note = 2'-O-Methyl-cytidine
  modified_base 87: mod_base = OTHER; note = 2'-O-Methyl-guanosine
  modified_base 88: mod_base = OTHER; note = 2'-O-Methyl-adenosine
  modified_base 89: mod_base = OTHER; note = 2'-O-Methyl-guanosine
  modified_base 90: mod_base = OTHER; note = 2'-O-Methyl-uridine
  modified_base 91: mod_base = OTHER; note = 2'-O-Methyl-cytidine
  modified_base 92: mod_base = OTHER; note = 2'-O-Methyl-guanosine
  modified_base 93: mod_base = OTHER; note = 2'-O-Methyl-guanosine
  modified_base 94: mod_base = OTHER; note = 2'-O-Methyl-uridine
  modified_base 95: mod_base = OTHER; note = 2'-O-Methyl-guanosine
  modified_base 96: mod_base = OTHER; note = 2'-O-Methyl-cytidine
  modified_base 97: mod_base = OTHER; note = 2'-O-Methyl-uridine phosphorothioate
  modified_base 98: mod_base = OTHER; note = 2'-O-Methyl-uridine phosphorothioate
  modified_base 99: mod_base = OTHER; note = 2'-O-Methyl-uridine phosphorothioate
  modified_base 100: mod_base = OTHER; note = 2'-O-Methyl-uridine
  misc_difference 101: note = modified_base - a, c, u, g, unknown or other - a, c, g, inosine, u, deoxyadenosine, deoxyguanosine, deoxycytidine, deoxyinosine, thymine, ribonebularine, 2'-O-methylnebularine, or 2'-deoxynebularine
  misc_difference 102: note = modified_base - a, c, u, g, unknown or other - a, c, g, inosine, u, deoxyadenosine, deoxyguanosine, deoxycytidine, deoxyinosine, thymine, ribonebularine, 2'-O-methylnebularine, or 2'-deoxynebularine
  misc_difference 103: note = modified_base - a, c, u, g, unknown or other - a, c, g, inosine, u, deoxyadenosine, deoxyguanosine, deoxycytidine, deoxyinosine, thymine, ribonebularine, 2'-O-methylnebularine, or 2'-deoxynebularine

SEQ ID NO: 1830 - RNA, 103 nt, synthetic construct; identical to SEQ ID NO: 1795
  source 1..103: mol_type = other RNA; note = Description of Artificial Sequence: Synthetic polynucleotide
  modified_base 1: mod_base = OTHER; note = 2'-O-Methyl-cytidine phosphorothioate
  modified_base 2: mod_base = OTHER; note = 2'-O-Methyl-cytidine phosphorothioate
  modified_base 3: mod_base = OTHER; note = 2'-O-Methyl-cytidine
  modified_base 21: mod_base = OTHER; note = 2'-O-Methyl-guanosine
  modified_base 25: mod_base = OTHER; note = uridine phosphorothioate
  modified_base 28: mod_base = OTHER; note = 2'-O-Methyl-adenosine
  modified_base 29: mod_base = OTHER; note = 2'-O-Methyl-guanosine
  modified_base 30: mod_base = OTHER; note = 2'-O-Methyl-cytidine
  modified_base 31: mod_base = OTHER; note = 2'-O-Methyl-uridine
  modified_base 32: mod_base = OTHER; note = 2'-O-Methyl-adenosine
  modified_base 34: mod_base = OTHER; note = 2'-O-Methyl-adenosine
  modified_base 35: mod_base = OTHER; note = 2'-O-Methyl-adenosine
  modified_base 36: mod_base = OTHER; note = 2'-O-Methyl-adenosine
  modified_base 37: mod_base = OTHER; note = 2'-O-Methyl-uridine
  modified_base 38: mod_base = OTHER; note = 2'-O-Methyl-adenosine
  modified_base 39: mod_base = OTHER; note = 2'-O-Methyl-guanosine
  modified_base 40: mod_base = OTHER; note = 2'-O-Methyl-cytidine
  modified_base 41: mod_base = OTHER; note = 2'-O-Methyl-adenosine
  modified_base 42: mod_base = OTHER; note = 2'-O-Methyl-adenosine
  modified_base 46: mod_base = OTHER; note = 2'-O-Methyl-adenosine
  modified_base 48: mod_base = OTHER; note = 2'-O-Methyl-adenosine
  modified_base 50: mod_base = OTHER; note = 2'-O-Methyl-uridine
  modified_base 52: mod_base = OTHER; note = 2'-O-Methyl-adenosine
  modified_base 53: mod_base = OTHER; note = 2'-O-Methyl-guanosine
  modified_base 54: mod_base = OTHER; note = 2'-O-Methyl-guanosine
  modified_base 57: mod_base = OTHER; note = 2'-O-Methyl-adenosine
  modified_base 61: mod_base = OTHER; note = 2'-O-Methyl-cytidine
  modified_base 66: mod_base = OTHER; note = 2'-O-Methyl-uridine
  modified_base 67: mod_base = OTHER; note = 2'-O-Methyl-cytidine
  modified_base 70: mod_base = OTHER; note = 2'-O-Methyl-cytidine
  modified_base 71: mod_base = OTHER; note = 2'-O-Methyl-uridine
  modified_base 72: mod_base = OTHER; note = 2'-O-Methyl-uridine
  modified_base 74: mod_base = OTHER; note = 2'-O-Methyl-adenosine
  modified_base 75: mod_base = OTHER; note = 2'-O-Methyl-adenosine
  modified_base 76: mod_base = OTHER; note = 2'-O-Methyl-adenosine
  modified_base 77: mod_base = OTHER; note = 2'-O-Methyl-adenosine
  modified_base 78: mod_base = OTHER; note = 2'-O-Methyl-adenosine
  modified_base 79: mod_base = OTHER; note = 2'-O-Methyl-guanosine
  modified_base 80: mod_base = OTHER; note = 2'-O-Methyl-uridine
  modified_base 82: mod_base = OTHER; note = 2'-O-Methyl-guanosine
  modified_base 83: mod_base = OTHER; note = 2'-O-Methyl-cytidine
  modified_base 84: mod_base = OTHER; note = 2'-O-Methyl-adenosine
  modified_base 85: mod_base = OTHER; note = 2'-O-Methyl-cytidine
  modified_base 86: mod_base = OTHER; note = 2'-O-Methyl-cytidine
  modified_base 87: mod_base = OTHER; note = 2'-O-Methyl-guanosine
  modified_base 89: mod_base = OTHER; note = 2'-O-Methyl-guanosine
  modified_base 92: mod_base = OTHER; note = 2'-O-Methyl-guanosine
  modified_base 93: mod_base = OTHER; note = 2'-O-Methyl-guanosine
  modified_base 94: mod_base = OTHER; note = 2'-O-Methyl-uridine
  modified_base 95: mod_base = OTHER; note = 2'-O-Methyl-guanosine
  modified_base 96: mod_base = OTHER; note = 2'-O-Methyl-cytidine
  modified_base 97: mod_base = OTHER; note = 2'-O-Methyl-uridine phosphorothioate
  modified_base 98: mod_base = OTHER; note = 2'-O-Methyl-uridine phosphorothioate
  modified_base 99: mod_base = OTHER; note = 2'-O-Methyl-uridine phosphorothioate
  modified_base 100: mod_base = OTHER; note = 2'-O-Methyl-uridine
  misc_difference 101: note = modified_base - a, c, u, g, unknown or other - a, c, g, inosine, u, deoxyadenosine, deoxyguanosine, deoxycytidine, deoxyinosine, thymine, ribonebularine, 2'-O-methylnebularine, or 2'-deoxynebularine
  misc_difference 102: note = modified_base - a, c, u, g, unknown or other - a, c, g, inosine, u, deoxyadenosine, deoxyguanosine, deoxycytidine, deoxyinosine, thymine, ribonebularine, 2'-O-methylnebularine, or 2'-deoxynebularine
  misc_difference 103: note = modified_base - a, c, u, g, unknown or other - a, c, g, inosine, u, deoxyadenosine, deoxyguanosine, deoxycytidine, deoxyinosine, thymine, ribonebularine, 2'-O-methylnebularine, or 2'-deoxynebularine

SEQ ID NO: 1831 - RNA, 103 nt, synthetic construct; identical to SEQ ID NO: 1796
  source 1..103: mol_type = other RNA; note = Description of Artificial Sequence: Synthetic polynucleotide
  modified_base 1: mod_base = OTHER; note = 2'-O-Methyl-guanosine phosphorothioate
  modified_base 2: mod_base = OTHER; note = 2'-O-Methyl-adenosine phosphorothioate
  modified_base 3: mod_base = OTHER; note = 2'-O-Methyl-guanosine
  modified_base 21: mod_base = OTHER; note = 2'-O-Methyl-guanosine
  modified_base 25: mod_base = OTHER; note = uridine phosphorothioate
  modified_base 28: mod_base = OTHER; note = 2'-O-Methyl-adenosine
  modified_base 29: mod_base = OTHER; note = 2'-O-Methyl-guanosine
  modified_base 30: mod_base = OTHER; note = 2'-O-Methyl-cytidine
  modified_base 31: mod_base = OTHER; note = 2'-O-Methyl-uridine
  modified_base 32: mod_base = OTHER; note = 2'-O-Methyl-adenosine
  modified_base 34: mod_base = OTHER; note = 2'-O-Methyl-adenosine
  modified_base 35: mod_base = OTHER; note = 2'-O-Methyl-adenosine
  modified_base 36: mod_base = OTHER; note = 2'-O-Methyl-adenosine
  modified_base 37: mod_base = OTHER; note = 2'-O-Methyl-uridine
  modified_base 38: mod_base = OTHER; note = 2'-O-Methyl-adenosine
  modified_base 39: mod_base = OTHER; note = 2'-O-Methyl-guanosine
  modified_base 40: mod_base = OTHER; note = 2'-O-Methyl-cytidine
  modified_base 41: mod_base = OTHER; note = 2'-O-Methyl-adenosine
  modified_base 42: mod_base = OTHER; note = 2'-O-Methyl-adenosine
  modified_base 46: mod_base = OTHER; note = 2'-O-Methyl-adenosine
  modified_base 48: mod_base = OTHER; note = 2'-O-Methyl-adenosine
  modified_base 50: mod_base = OTHER; note = 2'-O-Methyl-uridine
  modified_base 52: mod_base = OTHER; note = 2'-O-Methyl-adenosine
  modified_base 53: mod_base = OTHER; note = 2'-O-Methyl-guanosine
  modified_base 54: mod_base = OTHER; note = 2'-O-Methyl-guanosine
  modified_base 57: mod_base = OTHER; note = 2'-O-Methyl-adenosine
  modified_base 61: mod_base = OTHER; note = 2'-O-Methyl-cytidine
  modified_base 66: mod_base = OTHER; note = 2'-O-Methyl-uridine
  modified_base 67: mod_base = OTHER; note = 2'-O-Methyl-cytidine
  modified_base 70: mod_base = OTHER; note = 2'-O-Methyl-cytidine
  modified_base 71: mod_base = OTHER; note = 2'-O-Methyl-uridine
  modified_base 72: mod_base = OTHER; note = 2'-O-Methyl-uridine
  modified_base 74: mod_base = OTHER; note = 2'-O-Methyl-adenosine
  modified_base 75: mod_base = OTHER; note = 2'-O-Methyl-adenosine
  modified_base 76: mod_base = OTHER; note = 2'-O-Methyl-adenosine
  modified_base 77: mod_base = OTHER; note = 2'-O-Methyl-adenosine
  modified_base 78: mod_base = OTHER; note = 2'-O-Methyl-adenosine
  modified_base 79: mod_base = OTHER; note = 2'-O-Methyl-guanosine
  modified_base 80: mod_base = OTHER; note = 2'-O-Methyl-uridine
  modified_base 82: mod_base = OTHER; note = 2'-O-Methyl-guanosine
  modified_base 83: mod_base = OTHER; note = 2'-O-Methyl-cytidine
  modified_base 84: mod_base = OTHER; note = 2'-O-Methyl-adenosine
  modified_base 85: mod_base = OTHER; note = 2'-O-Methyl-cytidine
  modified_base 86: mod_base = OTHER; note = 2'-O-Methyl-cytidine
  modified_base 87: mod_base = OTHER; note = 2'-O-Methyl-guanosine
  modified_base 89: mod_base = OTHER; note = 2'-O-Methyl-guanosine
  modified_base 92: mod_base = OTHER; note = 2'-O-Methyl-guanosine
  modified_base 93: mod_base = OTHER; note = 2'-O-Methyl-guanosine
  modified_base 94: mod_base = OTHER; note = 2'-O-Methyl-uridine
  modified_base 95: mod_base = OTHER; note = 2'-O-Methyl-guanosine
  modified_base 96: mod_base = OTHER; note = 2'-O-Methyl-cytidine
  modified_base 97: mod_base = OTHER; note = 2'-O-Methyl-uridine phosphorothioate
  modified_base 98: mod_base = OTHER; note = 2'-O-Methyl-uridine phosphorothioate
  modified_base 99: mod_base = OTHER; note = 2'-O-Methyl-uridine phosphorothioate
  modified_base 100: mod_base = OTHER; note = 2'-O-Methyl-uridine
  misc_difference 101: note = modified_base - a, c, u, g, unknown or other - a, c, g, inosine, u, deoxyadenosine, deoxyguanosine, deoxycytidine, deoxyinosine, thymine, ribonebularine, 2'-O-methylnebularine, or 2'-deoxynebularine
  misc_difference 102: note = modified_base - a, c, u, g, unknown or other - a, c, g, inosine, u, deoxyadenosine, deoxyguanosine, deoxycytidine, deoxyinosine, thymine, ribonebularine, 2'-O-methylnebularine, or 2'-deoxynebularine
  misc_difference 103: note = modified_base - a, c, u, g, unknown or other - a, c, g, inosine, u, deoxyadenosine, deoxyguanosine, deoxycytidine, deoxyinosine, thymine, ribonebularine, 2'-O-methylnebularine, or 2'-deoxynebularine

SEQ ID NO: 1832 - RNA, 103 nt, synthetic construct; identical to SEQ ID NO: 1797
  source 1..103: mol_type = other RNA; note = Description of Artificial Sequence: Synthetic polynucleotide
  modified_base 1: mod_base = OTHER; note = 2'-O-Methyl-cytidine phosphorothioate
  modified_base 2: mod_base = OTHER; note = 2'-O-Methyl-adenosine phosphorothioate
  modified_base 3: mod_base = OTHER; note = 2'-O-Methyl-guanosine
  modified_base 21: mod_base = OTHER; note = 2'-O-Methyl-guanosine
  modified_base 25: mod_base = OTHER; note = uridine phosphorothioate
  modified_base 28: mod_base = OTHER; note = 2'-O-Methyl-adenosine
  modified_base 29: mod_base = OTHER; note = 2'-O-Methyl-guanosine
  modified_base 30: mod_base = OTHER; note = 2'-O-Methyl-cytidine
  modified_base 31: mod_base = OTHER; note = 2'-O-Methyl-uridine
  modified_base 32: mod_base = OTHER; note = 2'-O-Methyl-adenosine
  modified_base 34: mod_base = OTHER; note = 2'-O-Methyl-adenosine
  modified_base 35: mod_base = OTHER; note = 2'-O-Methyl-adenosine
  modified_base 36: mod_base = OTHER; note = 2'-O-Methyl-adenosine
  modified_base 37: mod_base = OTHER; note = 2'-O-Methyl-uridine
  modified_base 38: mod_base = OTHER; note = 2'-O-Methyl-adenosine
  modified_base 39: mod_base = OTHER; note = 2'-O-Methyl-guanosine
  modified_base 40: mod_base = OTHER; note = 2'-O-Methyl-cytidine
  modified_base 41: mod_base = OTHER; note = 2'-O-Methyl-adenosine
  modified_base 42: mod_base = OTHER; note = 2'-O-Methyl-adenosine
  modified_base 46: mod_base = OTHER; note = 2'-O-Methyl-adenosine
  modified_base 48: mod_base = OTHER; note = 2'-O-Methyl-adenosine
  modified_base 50: mod_base = OTHER; note = 2'-O-Methyl-uridine
  modified_base 52: mod_base = OTHER; note = 2'-O-Methyl-adenosine
  modified_base 53: mod_base = OTHER; note = 2'-O-Methyl-guanosine
  modified_base 54: mod_base = OTHER; note = 2'-O-Methyl-guanosine
  modified_base 55: mod_base = OTHER; note = 2'-O-Methyl-cytidine
  modified_base 56: mod_base = OTHER; note = 2'-O-Methyl-uridine
  modified_base 57: mod_base = OTHER; note = 2'-O-Methyl-adenosine
  modified_base 60: mod_base = OTHER; note = 2'-O-Methyl-cytidine
  modified_base 61: mod_base = OTHER; note = 2'-O-Methyl-cytidine
  modified_base 66: mod_base = OTHER; note = 2'-O-Methyl-uridine
  modified_base 67: mod_base = OTHER; note = 2'-O-Methyl-cytidine
  modified_base 70: mod_base = OTHER; note = 2'-O-Methyl-cytidine
  modified_base 71: mod_base = OTHER; note = 2'-O-Methyl-uridine
  modified_base 72: mod_base = OTHER; note = 2'-O-Methyl-uridine
  modified_base 74: mod_base = OTHER; note = 2'-O-Methyl-adenosine
  modified_base 75: mod_base = OTHER; note = 2'-O-Methyl-adenosine
  modified_base 76: mod_base = OTHER; note = 2'-O-Methyl-adenosine
  modified_base 77: mod_base = OTHER; note = 2'-O-Methyl-adenosine
  modified_base 78: mod_base = OTHER; note = 2'-O-Methyl-adenosine
  modified_base 79: mod_base = OTHER; note = 2'-O-Methyl-guanosine
  modified_base 80: mod_base = OTHER; note = 2'-O-Methyl-uridine
  modified_base 81: mod_base = OTHER; note = 2'-O-Methyl-guanosine
  modified_base 83: mod_base = OTHER; note = 2'-O-Methyl-cytidine
  modified_base 84: mod_base = OTHER; note = 2'-O-Methyl-adenosine
  modified_base 85: mod_base = OTHER; note = 2'-O-Methyl-cytidine
  modified_base 86: mod_base = OTHER; note = 2'-O-Methyl-cytidine
  modified_base 87: mod_base = OTHER; note = 2'-O-Methyl-guanosine
  modified_base 88: mod_base = OTHER; note = 2'-O-Methyl-adenosine
  modified_base 89: mod_base = OTHER; note = 2'-O-Methyl-guanosine
  modified_base 90: mod_base = OTHER; note = 2'-O-Methyl-uridine
  modified_base 91: mod_base = OTHER; note = 2'-O-Methyl-cytidine
  modified_base 92: mod_base = OTHER; note = 2'-O-Methyl-guanosine
  modified_base 93: mod_base = OTHER; note = 2'-O-Methyl-guanosine
  modified_base 94: mod_base = OTHER; note = 2'-O-Methyl-uridine
  modified_base 95: mod_base = OTHER; note = 2'-O-Methyl-guanosine
  modified_base 96: mod_base = OTHER; note = 2'-O-Methyl-cytidine
  modified_base 97: mod_base = OTHER; note = 2'-O-Methyl-uridine phosphorothioate
  modified_base 98: mod_base = OTHER; note = 2'-O-Methyl-uridine phosphorothioate
  modified_base 99: mod_base = OTHER; note = 2'-O-Methyl-uridine phosphorothioate
  modified_base 100: mod_base = OTHER; note = 2'-O-Methyl-uridine
  misc_difference 101: note = modified_base - a, c, u, g, unknown or other - a, c, g, inosine, u, deoxyadenosine, deoxyguanosine, deoxycytidine, deoxyinosine, thymine, ribonebularine, 2'-O-methylnebularine, or 2'-deoxynebularine
  misc_difference 102: note = modified_base - a, c, u, g, unknown or other - a, c, g, inosine, u, deoxyadenosine, deoxyguanosine, deoxycytidine, deoxyinosine, thymine, ribonebularine, 2'-O-methylnebularine, or 2'-deoxynebularine
  misc_difference 103: note = modified_base - a, c, u, g, unknown or other - a, c, g, inosine, u, deoxyadenosine, deoxyguanosine, deoxycytidine, deoxyinosine, thymine, ribonebularine, 2'-O-methylnebularine, or 2'-deoxynebularine

SEQ ID NO: 1833 - RNA, 103 nt, synthetic construct; identical to SEQ ID NO: 1795
  source 1..103: mol_type = other RNA; note = Description of Artificial Sequence: Synthetic polynucleotide
  modified_base 1: mod_base = OTHER; note = 2'-O-Methyl-cytidine phosphorothioate
  modified_base 2: mod_base = OTHER; note = 2'-O-Methyl-cytidine phosphorothioate
  modified_base 3: mod_base = OTHER; note = 2'-O-Methyl-cytidine
  modified_base 21: mod_base = OTHER; note = 2'-O-Methyl-guanosine
  modified_base 28: mod_base = OTHER; note = 2'-O-Methyl-adenosine
  modified_base 29: mod_base = OTHER; note = 2'-O-Methyl-guanosine
  modified_base 30: mod_base = OTHER; note = 2'-O-Methyl-cytidine
  modified_base 31: mod_base = OTHER; note = 2'-O-Methyl-uridine
  modified_base 32: mod_base = OTHER; note = 2'-O-Methyl-adenosine
  modified_base 34: mod_base = OTHER; note = 2'-O-Methyl-adenosine
  modified_base 35: mod_base = OTHER; note = 2'-O-Methyl-adenosine
  modified_base 36: mod_base = OTHER; note = 2'-O-Methyl-adenosine
  modified_base 37: mod_base = OTHER; note = 2'-O-Methyl-uridine
  modified_base 38: mod_base = OTHER; note = 2'-O-Methyl-adenosine
  modified_base 39: mod_base = OTHER; note = 2'-O-Methyl-guanosine
  modified_base 40: mod_base = OTHER; note = 2'-O-Methyl-cytidine
  modified_base 41: mod_base = OTHER; note = 2'-O-Methyl-adenosine
  modified_base 42: mod_base = OTHER; note = 2'-O-Methyl-adenosine
  modified_base 45: mod_base = OTHER; note = uridine phosphorothioate
  modified_base 46: mod_base = OTHER; note = 2'-O-Methyl-adenosine
  modified_base 48: mod_base = OTHER; note = 2'-O-Methyl-adenosine
  modified_base 50: mod_base = OTHER; note = 2'-O-Methyl-uridine
  modified_base 52: mod_base = OTHER; note = 2'-O-Methyl-adenosine
  modified_base 53: mod_base = OTHER; note = 2'-O-Methyl-guanosine
  modified_base 54: mod_base = OTHER; note = 2'-O-Methyl-guanosine
  modified_base 57: mod_base = OTHER; note = 2'-O-Methyl-adenosine
  modified_base 61: mod_base = OTHER; note = 2'-O-Methyl-cytidine
  modified_base 64: mod_base = OTHER; note = uridine phosphorothioate
  modified_base 66: mod_base = OTHER; note = 2'-O-Methyl-uridine
  modified_base 67: mod_base = OTHER; note = 2'-O-Methyl-cytidine
  modified_base 70: mod_base = OTHER; note = 2'-O-Methyl-cytidine
  modified_base 71: mod_base = OTHER; note = 2'-O-Methyl-uridine
  modified_base 72: mod_base = OTHER; note = 2'-O-Methyl-uridine
  modified_base 74: mod_base = OTHER; note = 2'-O-Methyl-adenosine
  modified_base 75: mod_base = OTHER; note = 2'-O-Methyl-adenosine
  modified_base 76: mod_base = OTHER; note = 2'-O-Methyl-adenosine
  modified_base 77: mod_base = OTHER; note = 2'-O-Methyl-adenosine
  modified_base 78: mod_base = OTHER; note = 2'-O-Methyl-adenosine
  modified_base 79: mod_base = OTHER; note = 2'-O-Methyl-guanosine
  modified_base 80: mod_base = OTHER; note = 2'-O-Methyl-uridine
  modified_base 82: mod_base = OTHER; note = 2'-O-Methyl-guanosine
  modified_base 83: mod_base = OTHER; note = 2'-O-Methyl-cytidine
  modified_base 84: mod_base = OTHER; note = 2'-O-Methyl-adenosine
  modified_base 85: mod_base = OTHER; note = 2'-O-Methyl-cytidine
  modified_base 86: mod_base = OTHER; note = 2'-O-Methyl-cytidine
  modified_base 87: mod_base = OTHER; note = 2'-O-Methyl-guanosine
  modified_base 89: mod_base = OTHER; note = 2'-O-Methyl-guanosine
  modified_base 92: mod_base = OTHER; note = 2'-O-Methyl-guanosine
  modified_base 93: mod_base = OTHER; note = 2'-O-Methyl-guanosine
  modified_base 94: mod_base = OTHER; note = 2'-O-Methyl-uridine
  modified_base 95: mod_base = OTHER; note = 2'-O-Methyl-guanosine
  modified_base 96: mod_base = OTHER; note = 2'-O-Methyl-cytidine
  modified_base 97: mod_base = OTHER; note = 2'-O-Methyl-uridine phosphorothioate
  modified_base 98: mod_base = OTHER; note = 2'-O-Methyl-uridine phosphorothioate
  modified_base 99: mod_base = OTHER; note = 2'-O-Methyl-uridine phosphorothioate
  modified_base 100: mod_base = OTHER; note = 2'-O-Methyl-uridine
  misc_difference 101: note = modified_base - a, c, u, g, unknown or other - a, c, g, inosine, u, deoxyadenosine, deoxyguanosine, deoxycytidine, deoxyinosine, thymine, ribonebularine, 2'-O-methylnebularine, or 2'-deoxynebularine
  misc_difference 102: note = modified_base - a, c, u, g, unknown or other - a, c, g, inosine, u, deoxyadenosine, deoxyguanosine, deoxycytidine, deoxyinosine, thymine, ribonebularine, 2'-O-methylnebularine, or 2'-deoxynebularine
  misc_difference 103: note = modified_base - a, c, u, g, unknown or other - a, c, g, inosine, u, deoxyadenosine, deoxyguanosine, deoxycytidine, deoxyinosine, thymine, ribonebularine, 2'-O-methylnebularine, or 2'-deoxynebularine

SEQ ID NO: 1834 - RNA, 103 nt, synthetic construct; identical to SEQ ID NO: 1796
  source 1..103: mol_type = other RNA; note = Description of Artificial Sequence: Synthetic polynucleotide
  modified_base 1: mod_base = OTHER; note = 2'-O-Methyl-guanosine phosphorothioate
  modified_base 2: mod_base = OTHER; note = 2'-O-Methyl-adenosine phosphorothioate
  modified_base 3: mod_base = OTHER; note = 2'-O-Methyl-guanosine
  modified_base 21: mod_base = OTHER; note = 2'-O-Methyl-guanosine
  modified_base 28: mod_base = OTHER; note = 2'-O-Methyl-adenosine
  modified_base 29: mod_base = OTHER; note = 2'-O-Methyl-guanosine
  modified_base 30: mod_base = OTHER; note = 2'-O-Methyl-cytidine
  modified_base 31: mod_base = OTHER; note = 2'-O-Methyl-uridine
  modified_base 32: mod_base = OTHER; note = 2'-O-Methyl-adenosine
  modified_base 34: mod_base = OTHER; note = 2'-O-Methyl-adenosine
  modified_base 35: mod_base = OTHER; note = 2'-O-Methyl-adenosine
  modified_base 36: mod_base = OTHER; note = 2'-O-Methyl-adenosine
  modified_base 37: mod_base = OTHER; note = 2'-O-Methyl-uridine
  modified_base 38: mod_base = OTHER; note = 2'-O-Methyl-adenosine
  modified_base 39: mod_base = OTHER; note = 2'-O-Methyl-guanosine
  modified_base 40: mod_base = OTHER; note = 2'-O-Methyl-cytidine
  modified_base 41: mod_base = OTHER; note = 2'-O-Methyl-adenosine
  modified_base 42: mod_base = OTHER; note = 2'-O-Methyl-adenosine
  modified_base 45: mod_base = OTHER; note = uridine phosphorothioate
  modified_base 46: mod_base = OTHER; note = 2'-O-Methyl-adenosine
  modified_base 48: mod_base = OTHER; note = 2'-O-Methyl-adenosine
  modified_base 50: mod_base = OTHER; note = 2'-O-Methyl-uridine
  modified_base 52: mod_base = OTHER; note = 2'-O-Methyl-adenosine
  modified_base 53: mod_base = OTHER; note = 2'-O-Methyl-guanosine
  modified_base 54: mod_base = OTHER; note = 2'-O-Methyl-guanosine
  modified_base 57: mod_base = OTHER; note = 2'-O-Methyl-adenosine
  modified_base 61: mod_base = OTHER; note = 2'-O-Methyl-cytidine
  modified_base 64: mod_base = OTHER; note = uridine phosphorothioate
  modified_base 66: mod_base = OTHER; note = 2'-O-Methyl-uridine
  modified_base 67: mod_base = OTHER; note = 2'-O-Methyl-cytidine
  modified_base 70: mod_base = OTHER; note = 2'-O-Methyl-cytidine
  modified_base 71: mod_base = OTHER; note = 2'-O-Methyl-uridine
  modified_base 72: mod_base = OTHER; note = 2'-O-Methyl-uridine
  modified_base 74: mod_base = OTHER; note = 2'-O-Methyl-adenosine
  modified_base 75: mod_base = OTHER; note = 2'-O-Methyl-adenosine
  modified_base 76: mod_base = OTHER; note = 2'-O-Methyl-adenosine
  modified_base 77: mod_base = OTHER; note = 2'-O-Methyl-adenosine
  modified_base 78: mod_base = OTHER; note = 2'-O-Methyl-adenosine
  modified_base 79: mod_base = OTHER; note = 2'-O-Methyl-guanosine
  modified_base 80: mod_base = OTHER; note = 2'-O-Methyl-uridine
  modified_base 82: mod_base = OTHER; note = 2'-O-Methyl-guanosine
  modified_base 83: mod_base = OTHER; note = 2'-O-Methyl-cytidine
  modified_base 84: mod_base = OTHER; note = 2'-O-Methyl-adenosine
  modified_base 85: mod_base = OTHER; note = 2'-O-Methyl-cytidine
  modified_base 86: mod_base = OTHER; note = 2'-O-Methyl-cytidine
  modified_base 87: mod_base = OTHER; note = 2'-O-Methyl-guanosine
  modified_base 89: mod_base = OTHER; note = 2'-O-Methyl-guanosine
  modified_base 92: mod_base = OTHER; note = 2'-O-Methyl-guanosine
  modified_base 93: mod_base = OTHER; note = 2'-O-Methyl-guanosine
  modified_base 94: mod_base = OTHER; note = 2'-O-Methyl-uridine
  modified_base 95: mod_base = OTHER; note = 2'-O-Methyl-guanosine
  modified_base 96: mod_base = OTHER; note = 2'-O-Methyl-cytidine
  modified_base 97: mod_base = OTHER; note = 2'-O-Methyl-uridine phosphorothioate
  modified_base 98: mod_base = OTHER; note = 2'-O-Methyl-uridine phosphorothioate
  modified_base 99: mod_base = OTHER; note = 2'-O-Methyl-uridine phosphorothioate
  modified_base 100: mod_base = OTHER; note = 2'-O-Methyl-uridine
  misc_difference 101: note = modified_base - a, c, u, g, unknown or other - a, c, g, inosine, u, deoxyadenosine, deoxyguanosine, deoxycytidine, deoxyinosine, thymine, ribonebularine, 2'-O-methylnebularine, or 2'-deoxynebularine
  misc_difference 102: note = modified_base - a, c, u, g, unknown or other - a, c, g, inosine, u, deoxyadenosine, deoxyguanosine, deoxycytidine, deoxyinosine, thymine, ribonebularine, 2'-O-methylnebularine, or 2'-deoxynebularine
  misc_difference 103: note = modified_base - a, c, u, g, unknown or other - a, c, g, inosine, u, deoxyadenosine, deoxyguanosine, deoxycytidine, deoxyinosine, thymine, ribonebularine, 2'-O-methylnebularine, or 2'-deoxynebularine

SEQ ID NO: 1835 - RNA, 103 nt, synthetic construct; identical to SEQ ID NO: 1797
  source 1..103: mol_type = other RNA; note = Description of Artificial Sequence: Synthetic polynucleotide
  modified_base 1: mod_base = OTHER; note = 2'-O-Methyl-cytidine phosphorothioate
  modified_base 2: mod_base = OTHER; note = 2'-O-Methyl-adenosine phosphorothioate
  modified_base 3: mod_base = OTHER; note = 2'-O-Methyl-guanosine
  modified_base 21: mod_base = OTHER; note = 2'-O-Methyl-guanosine
  modified_base 28: mod_base = OTHER; note = 2'-O-Methyl-adenosine
  modified_base 29: mod_base = OTHER; note = 2'-O-Methyl-guanosine
  modified_base 30: mod_base = OTHER; note = 2'-O-Methyl-cytidine
  modified_base 31: mod_base = OTHER; note = 2'-O-Methyl-uridine
  modified_base 32: mod_base = OTHER; note = 2'-O-Methyl-adenosine
  modified_base 34: mod_base = OTHER; note = 2'-O-Methyl-adenosine
  modified_base 35: mod_base = OTHER; note = 2'-O-Methyl-adenosine
  modified_base 36: mod_base = OTHER; note = 2'-O-Methyl-adenosine
  modified_base 37: mod_base = OTHER; note = 2'-O-Methyl-uridine
  modified_base 38: mod_base = OTHER; note = 2'-O-Methyl-adenosine
  modified_base 39: mod_base = OTHER; note = 2'-O-Methyl-guanosine
  modified_base 40: mod_base = OTHER; note = 2'-O-Methyl-cytidine
  modified_base 41: mod_base = OTHER; note = 2'-O-Methyl-adenosine
  modified_base 42: mod_base = OTHER; note = 2'-O-Methyl-adenosine
  modified_base 45: mod_base = OTHER; note = uridine phosphorothioate
  modified_base 46: mod_base = OTHER; note = 2'-O-Methyl-adenosine
  modified_base 48: mod_base = OTHER; note = 2'-O-Methyl-adenosine
  modified_base 50: mod_base = OTHER; note = 2'-O-Methyl-uridine
  modified_base 52: mod_base = OTHER; note = 2'-O-Methyl-adenosine
  modified_base 53: mod_base = OTHER; note = 2'-O-Methyl-guanosine
  modified_base 54: mod_base = OTHER; note = 2'-O-Methyl-guanosine
  modified_base 55: mod_base = OTHER; note = 2'-O-Methyl-cytidine
  modified_base 56: mod_base = OTHER; note = 2'-O-Methyl-uridine
  modified_base 57: mod_base = OTHER; note = 2'-O-Methyl-adenosine
  modified_base 60: mod_base = OTHER; note = 2'-O-Methyl-cytidine
  modified_base 61: mod_base = OTHER; note = 2'-O-Methyl-cytidine
  modified_base 64: mod_base = OTHER; note = uridine phosphorothioate
  modified_base 66: mod_base = OTHER; note = 2'-O-Methyl-uridine
  modified_base 67: mod_base = OTHER; note = 2'-O-Methyl-cytidine
  modified_base 70: mod_base = OTHER; note = 2'-O-Methyl-cytidine
  modified_base 71: mod_base = OTHER; note = 2'-O-Methyl-uridine
  modified_base 72: mod_base = OTHER; note = 2'-O-Methyl-uridine
  modified_base 74: mod_base = OTHER; note = 2'-O-Methyl-adenosine
  modified_base 75: mod_base = OTHER; note = 2'-O-Methyl-adenosine
  modified_base 76: mod_base = OTHER; note = 2'-O-Methyl-adenosine
  modified_base 77: mod_base = OTHER; note = 2'-O-Methyl-adenosine
  modified_base 78: mod_base = OTHER; note = 2'-O-Methyl-adenosine
  modified_base 79: mod_base = OTHER; note = 2'-O-Methyl-guanosine
  modified_base 80: mod_base = OTHER; note = 2'-O-Methyl-uridine
  modified_base 81: mod_base = OTHER; note = 2'-O-Methyl-guanosine
  modified_base 83: mod_base = OTHER; note = 2'-O-Methyl-cytidine
  modified_base 84: mod_base = OTHER; note = 2'-O-Methyl-adenosine
  modified_base 85: mod_base = OTHER; note = 2'-O-Methyl-cytidine
  modified_base 86: mod_base = OTHER; note = 2'-O-Methyl-cytidine
  modified_base 87: mod_base = OTHER; note = 2'-O-Methyl-guanosine
  modified_base 88: mod_base = OTHER; note = 2'-O-Methyl-adenosine
  modified_base 89: mod_base = OTHER; note = 2'-O-Methyl-guanosine
  modified_base 90: mod_base = OTHER; note = 2'-O-Methyl-uridine
  modified_base 91: mod_base = OTHER; note = 2'-O-Methyl-cytidine
  modified_base 92: mod_base = OTHER; note = 2'-O-Methyl-guanosine
  modified_base 93: mod_base = OTHER; note = 2'-O-Methyl-guanosine
  modified_base 94: mod_base = OTHER; note = 2'-O-Methyl-uridine
  modified_base 95: mod_base = OTHER; note = 2'-O-Methyl-guanosine
  modified_base 96: mod_base = OTHER; note = 2'-O-Methyl-cytidine
  modified_base 97: mod_base = OTHER; note = 2'-O-Methyl-uridine phosphorothioate
  modified_base 98: mod_base = OTHER; note = 2'-O-Methyl-uridine phosphorothioate
  modified_base 99: mod_base = OTHER; note = 2'-O-Methyl-uridine phosphorothioate
  modified_base 100: mod_base = OTHER; note = 2'-O-Methyl-uridine
  misc_difference 101: note = modified_base - a, c, u, g, unknown or other - a, c, g, inosine, u, deoxyadenosine, deoxyguanosine, deoxycytidine, deoxyinosine, thymine, ribonebularine, 2'-O-methylnebularine, or 2'-deoxynebularine
  misc_difference 102: note = modified_base - a, c, u, g, unknown or other - a, c, g, inosine, u, deoxyadenosine, deoxyguanosine, deoxycytidine, deoxyinosine, thymine, ribonebularine, 2'-O-methylnebularine, or 2'-deoxynebularine
  misc_difference 103: note = modified_base - a, c, u, g, unknown or other - a, c, g, inosine, u, deoxyadenosine, deoxyguanosine, deoxycytidine, deoxyinosine, thymine, ribonebularine, 2'-O-methylnebularine, or 2'-deoxynebularine

SEQ ID NO: 1836 - RNA, 103 nt, synthetic construct; identical to SEQ ID NO: 1795
  source 1..103: mol_type = other RNA; note = Description of Artificial Sequence: Synthetic polynucleotide
  modified_base 1: mod_base = OTHER; note = 2'-O-Methyl-cytidine phosphorothioate
  modified_base 2: mod_base = OTHER; note = 2'-O-Methyl-cytidine phosphorothioate
  modified_base 3: mod_base = OTHER; note = 2'-O-Methyl-cytidine
  modified_base 21: mod_base = OTHER; note = 2'-O-Methyl-guanosine
  modified_base 25: mod_base = OTHER; note = uridine phosphorothioate
  modified_base 28: mod_base = OTHER; note = 2'-O-Methyl-adenosine
  modified_base 29: mod_base = OTHER; note = 2'-O-Methyl-guanosine
  modified_base 30: mod_base = OTHER; note = 2'-O-Methyl-cytidine
  modified_base 31: mod_base = OTHER; note = 2'-O-Methyl-uridine
  modified_base 32: mod_base = OTHER; note = 2'-O-Methyl-adenosine
  modified_base 34: mod_base = OTHER; note = 2'-O-Methyl-adenosine
  modified_base 35: mod_base = OTHER; note = 2'-O-Methyl-adenosine
  modified_base 36: mod_base = OTHER; note = 2'-O-Methyl-adenosine
  modified_base 37: mod_base = OTHER; note = 2'-O-Methyl-uridine
  modified_base 38: mod_base = OTHER; note = 2'-O-Methyl-adenosine
  modified_base 39: mod_base = OTHER; note = 2'-O-Methyl-guanosine
  modified_base 40: mod_base = OTHER; note = 2'-O-Methyl-cytidine
  modified_base 41: mod_base = OTHER; note = 2'-O-Methyl-adenosine
  modified_base 42: mod_base = OTHER; note = 2'-O-Methyl-adenosine
  modified_base 45: mod_base = OTHER; note = uridine phosphorothioate
  modified_base 46: mod_base = OTHER; note = 2'-O-Methyl-adenosine
  modified_base 48: mod_base = OTHER; note = 2'-O-Methyl-adenosine
  modified_base 50: mod_base = OTHER; note = 2'-O-Methyl-uridine
  modified_base 52: mod_base = OTHER; note = 2'-O-Methyl-adenosine
  modified_base 53: mod_base = OTHER; note = 2'-O-Methyl-guanosine
  modified_base 54: mod_base = OTHER; note = 2'-O-Methyl-guanosine
  modified_base 57: mod_base = OTHER; note = 2'-O-Methyl-adenosine
  modified_base 61: mod_base = OTHER; note = 2'-O-Methyl-cytidine
  modified_base 66: mod_base = OTHER; note = 2'-O-Methyl-uridine
  modified_base 67: mod_base = OTHER; note = 2'-O-Methyl-cytidine
  modified_base 70: mod_base = OTHER; note = 2'-O-Methyl-cytidine
  modified_base 71: mod_base = OTHER; note = 2'-O-Methyl-uridine
  modified_base 72: mod_base = OTHER; note = 2'-O-Methyl-uridine
  modified_base 74: mod_base = OTHER; note = 2'-O-Methyl-adenosine
  modified_base 75: mod_base = OTHER; note = 2'-O-Methyl-adenosine
  modified_base 76: mod_base = OTHER; note = 2'-O-Methyl-adenosine
  modified_base 77: mod_base = OTHER; note = 2'-O-Methyl-adenosine
  modified_base 78: mod_base = OTHER; note = 2'-O-Methyl-adenosine
  modified_base 79: mod_base = OTHER; note = 2'-O-Methyl-guanosine
  modified_base 80: mod_base = OTHER; note = 2'-O-Methyl-uridine
  modified_base 82: mod_base = OTHER; note = 2'-O-Methyl-guanosine
  modified_base 83: mod_base = OTHER; note = 2'-O-Methyl-cytidine
  modified_base 84: mod_base = OTHER; note = 2'-O-Methyl-adenosine
  modified_base 85: mod_base = OTHER; note = 2'-O-Methyl-cytidine
  modified_base 86: mod_base = OTHER; note = 2'-O-Methyl-cytidine
  modified_base 87: mod_base = OTHER; note = 2'-O-Methyl-guanosine
  modified_base 89: mod_base = OTHER; note = 2'-O-Methyl-guanosine
  modified_base 92: mod_base = OTHER; note = 2'-O-Methyl-guanosine
  modified_base 93: mod_base = OTHER; note = 2'-O-Methyl-guanosine
  modified_base 94: mod_base = OTHER; note = 2'-O-Methyl-uridine
  modified_base 95: mod_base = OTHER; note = 2'-O-Methyl-guanosine
  modified_base 96: mod_base = OTHER; note = 2'-O-Methyl-cytidine
  modified_base 97: mod_base = OTHER; note = 2'-O-Methyl-uridine phosphorothioate
  modified_base 98: mod_base = OTHER; note = 2'-O-Methyl-uridine phosphorothioate
  modified_base 99: mod_base = OTHER; note = 2'-O-Methyl-uridine phosphorothioate
  modified_base 100: mod_base = OTHER; note = 2'-O-Methyl-uridine
  misc_difference 101: note = modified_base - a, c, u, g, unknown or other - a, c, g, inosine, u, deoxyadenosine, deoxyguanosine, deoxycytidine, deoxyinosine, thymine, ribonebularine, 2'-O-methylnebularine, or 2'-deoxynebularine
  misc_difference 102: note = modified_base - a, c, u, g, unknown or other - a, c, g, inosine, u, deoxyadenosine, deoxyguanosine, deoxycytidine, deoxyinosine, thymine, ribonebularine, 2'-O-methylnebularine, or 2'-deoxynebularine
  misc_difference 103: note = modified_base - a, c, u, g, unknown or other - a, c, g, inosine, u, deoxyadenosine, deoxyguanosine, deoxycytidine, deoxyinosine, thymine, ribonebularine, 2'-O-methylnebularine, or 2'-deoxynebularine

(The sequence listing continues in the following parts.)
